United States Patent Application Publication US 2026/0201011 A1 - sequence listing, part 3

SEQ ID NO: 10077 - protein, 1682 aa, Homo sapiens
MFRQFYLWTCLASGIILGSLFEICLGQYDDDWQYEDCKLARGGPPATIVAIDEESRNGTILVDNMLIKGTAGGPDPTIELSLKDNVDYWVLMDPVKQMLFLNSTGRVLDRDPPMNIHSIVVQVQCINKKVGTIIYHEVRIVVRDRNDNSPTFKHESYYATVNELTPVGTTIFTGFSGDNGATDIDDGPNGQIEYVIQYNPDDPTSNDTFEIPLMLTGNIVLRKRLNYEDKTRYFVIIQANDRAQNLNERRTTTTTLTVDVLDGDDLGPMFLPCVLVPNTRDCRPLTYQAAIPELRTPEELNPIIVTPPIQAIDQDRNIQPPSDRPGILYSILVGTPEDYPRFFHMHPRTAELSLLEPVNRDFHQKFDLVIKAEQDNGHPLPAFAGLHIEILDENNQSPYFTMPSYQGYILESAPVGATISDSLNLTSPLRIVALDKDIEDTKDPELHLFLNDYTSVFTVTQTGITRYLTLLQPVDREEQQTYTFSITAFDGVQESEPVIVNIQVMDANDNTPTFPEISYDVYVYTDMRPGDSVIQLTAVDADEGSNGEITYEILVGAQGDFIINKTTGLITIAPGVEMIVGRTYALTVQAADNAPPAERRNSICTVYIEVLPPNNQSPPRFPQLMYSLEISEAMRVGAVLLNLQATDREGDSITYAIENGDPQRVFNLSETTGILTLGKALDRESTDRYILIITASDGRPDGTSTATVNIVVTDVNDNAPVFDPYLPRNLSVVEEEANAFVGQVKATDPDAGINGQVHYSLGNFNNLFRITSNGSIYTAVKLNREVRDYYELVVVATDGAVHPRHSTLTLAIKVLDIDDNSPVFTNSTYTVLVEENLPAGTTILQIEAKDVDLGANVSYRIRSPEVKHFFALHPFTGELSLLRSLDYEAFPDQEASITFLVEAFDIYGTMPPGIATVTVIVKDMNDYPPVFSKRIYKGMVAPDAVKGTPITTVYAEDADPPGLPASRVRYRVDDVQFPYPASIFEVEEDSGRVITRVNLNEEPTTIFKLVVVAFDDGEPVMSSSATVKILVLHPGEIPRFTQEEYRPPPVSELATKGTMVGVISAAAINQSIVYSIVSGNEEDTFGINNITGVIYVNGPLDYETRTSYVLRVQADSLEVVLANLRVPSKSNTAKVYIEIQDENNHPPVFQKKFYIGGVSEDARMFTSVLRVKATDKDTGNYSVMAYRLIIPPIKEGKEGFVVETYTGLIKTAMLFHNMRRSYFKFQVIATDDYGKGLSGKADVLVSVVNQLDMQVIVSNVPPTLVEKKIEDLTEILDRYVQEQIPGAKVVVESIGARRHGDAFSLEDYTKCDLTVYAIDPQTNRAIDRNELFKFLDGKLLDINKDFQPYYGEGGRILEIRTPEAVTSIKKRGESLGYTEGALLALAFIIILCCIPAILVVLVSYRQFKVRQAECTKTARIQAALPAAKPAVPAPAPVAAPPPPPPPPPGAHLYEELGDSSMHKYEMPQYGSRRRLLPPAGQEEYGEVVGEAEEEYEEEEWARKRMIKLVVDREYETSSTGEDSAPECQRNRLHHPSIHSNINGNIYIAQNGSVVRTRRACLTDNLKVASPVRLGGPFKKLDKLAVTHEENVPLNTLSKGPFSTEKMNARPTLVTFAPCPVGTDNTAVKPLRNRLKSTVEQESMIDSKNIKEALEFHSDHTQSDDEELWMGPWNNLHIPMTKL

SEQ ID NO: 10078 - protein, 1964 aa, Homo sapiens
MFRQFYLWTCLASGIILGSLFEICLGQYDDDWQYEDCKLARGGPPATIVAIDEESRNGTILVDNMLIKGTAGGPDPTIELSLKDNVDYWVLMDPVKQMLFLNSTGRVLDRDPPMNIHSIVVQVQCINKKVGTIIYHEVRIVVRDRNDNSPTFKHESYYATVNELTPVGTTIFTGFSGDNGATDIDDGPNGQIEYVIQYNPDDPTSNDTFEIPLMLTGNIVLRKRLNYEDKTRYFVIIQANDRAQNLNERRTTTTTLTVDVLDGDDLGPMFLPCVLVPNTRDCRPLTYQAAIPELRTPEELNPIIVTPPIQAIDQDRNIQPPSDRPGILYSILVGTPEDYPRFFHMHPRTAELSLLEPVNRDFHQKFDLVIKAEQDNGHPLPAFAGLHIEILDENNQSPYFTMPSYQGYILESAPVGATISDSLNLTSPLRIVALDKDIEDTKDPELHLFLNDYTSVFTVTQTGITRYLTLLQPVDREEQQTYTFSITAFDGVQESEPVIVNIQVMDANDNTPTFPEISYDVYVYTDMRPGDSVIQLTAVDADEGSNGEITYEILVGAQGDFIINKTTGLITIAPGVEMIVGRTYALTVQAADNAPPAERRNSICTVYIEVLPPNNQSPPRFPQLMYSLEISEAMRVGAVLLNLQATDREGDSITYAIENGDPQRVFNLSETTGILTLGKALDRESTDRYILIITASDGRPDGTSTATVNIVVTDVNDNAPVFDPYLPRNLSVVEEEANAFVGQVKATDPDAGINGQVHYSLGNFNNLFRITSNGSIYTAVKLNREVRDYYELVVVATDGAVHPRHSTLTLAIKVLDIDDNSPVFTNSTYTVLVEENLPAGTTILQIEAKDVDLGANVSYRIRSPEVKHFFALHPFTGELSLLRSLDYEAFPDQEASITFLVEAFDIYGTMPPGIATVTVIVKDMNDYPPVFSKRIYKGMVAPDAVKGTPITTVYAEDADPPGLPASRVRYRVDDVQFPYPASIFEVEEDSGRVITRVNLNEEPTTIFKLVVVAFDDGEPVMSSSATVKILVLHPGEIPRFTQEEYRPPPVSELATKGTMVGVISAAAINQSIVYSIVSGNEEDTFGINNITGVIYVNGPLDYETRTSYVLRVQADSLEVVLANLRVPSKSNTAKVYIEIQDENNHPPVFQKKFYIGGVSEDARMFTSVLRVKATDKDTGNYSVMAYRLIIPPIKEGKEGFVVETYTGLIKTAMLFHNMRRSYFKFQVIATDDYGKGLSGKADVLVSVVNQLDMQVIVSNVPPTLVEKKIEDLTEILDRYVQEQIPGAKVVVESIGARRHGDAFSLEDYTKCDLTVYAIDPQTNRAIDRNELFKFLDGKLLDINKDFQPYYGEGGRILEIRTPEAVTSIKKRGESLGYTEGALLALAFIIILCCIPAILVVLVSYRQVFKGRQAECTKTARIQAALPAAKPAVPAPAPVAAPPPPPPPPPGAHLYEELGDSSILSSLFLLYHFQQSRGNNSVSEDRKHQQVVMPFSSNTIEAHKSAHVDGSLKSNKLKSARKFTFLSDEDDLSAHNPLYKENISQVSTNSDISQRTDFVDPFSPKIQAKSKSLRGPREKIQRLWSQSVSLPRRLMRKVPNRPEIIDLQQWQGTRQKAENENTGICTNKRGSSNPLLTTEEANLTEKEEIRQGETLMIEGTEQLKSLSSDSSFCFPRPHFSFSTLPTVSRTVELKSEPNVISSPAECSLELSPSRPCVLHSSLSRRETPICMLPIETERNIFENFAHPPNISPSACPLPPPPPISPPSPPPAPAPLAPPPDISPFSLFCPPPSPPSIPLPLPPPTFFPLSVSTSGPPTPPLLPPFPTPLPPPPPSIPCPPPPSASFLSTECVCITGVKCTTNLMPAEKIKSSMTQLSTTTVCKTDPQREPKGILRHVKNLAELEKSVANMYSQIEKNYLRTNVSELQTMCPSEVTNMEITSEQNKGSLNNIVEGTEKQSHSQSTSL

SEQ ID NO: 10079 - protein, 1681 aa, Homo sapiens
MFRQFYLWTCLASGIILGSLFEICLGQYDDDWQYEDCKLARGGPPATIVAIDEESRNGTILVDNMLIKGTAGGPDPTIELSLKDNVDYWVLMDPVKQMLFLNSTGRVLDRDPPMNIHSIVVQVQCINKKVGTIIYHEVRIVVRDRNDNSPTFKHESYYATVNELTPVGTTIFTGFSGDNGATDIDDGPNGQIEYVIQYNPDDPTSNDTFEIPLMLTGNIVLRKRLNYEDKTRYFVIIQANDRAQNLNERRTTTTTLTVDVLDGDDLGPMFLPCVLVPNTRDCRPLTYQAAIPELRTPEELNPIIVTPPIQAIDQDRNIQPPSDRPGILYSILVGTPEDYPRFFHMHPRTAELSLLEPVNRDFHQKFDLVIKAEQDNGHPLPAFAGLHIEILDENNQSPYFTMPSYQGYILESAPVGATISDSLNLTSPLRIVALDKDIEDTKDPELHLFLNDYTSVFTVTQTGITRYLTLLQPVDREEQQTYTFSITAFDGVQESEPVIVNIQVMDANDNTPTFPEISYDVYVYTDMRPGDSVIQLTAVDADEGSNGEITYEILVGAQGDFIINKTTGLITIAPGVEMIVGRTYALTVQAADNAPPAERRNSICTVYIEVLPPNNQSPPRFPQLMYSLEISEAMRVGAVLLNLQATDREGDSITYAIENGDPQRVFNLSETTGILTLGKALDRESTDRYILIITASDGRPDGTSTATVNIVVTDVNDNAPVFDPYLPRNLSVVEEEANAFVGQVKATDPDAGINGQVHYSLGNFNNLFRITSNGSIYTAVKLNREVRDYYELVVVATDGAVHPRHSTLTLAIKVLDIDDNSPVFTNSTYTVLVEENLPAGTTILQIEAKDVDLGANVSYRIRSPEVKHFFALHPFTGELSLLRSLDYEAFPDQEASITFLVEAFDIYGTMPPGIATVTVIVKDMNDYPPVFSKRIYKGMVAPDAVKGTPITTVYAEDADPPGLPASRVRYRVDDVQFPYPASIFEVEEDSGRVITRVNLNEEPTTIFKLVVVAFDDGEPVMSSSATVKILVLHPGEIPRFTQEEYRPPPVSELATKGTMVGVISAAAINQSIVYSIVSGNEEDTFGINNITGVIYVNGPLDYETRTSYVLRVQADSLEVVLANLRVPSKSNTAKVYIEIQDENNHPPVFQKKFYIGGVSEDARMFTSVLRVKATDKDTGNYSVMAYRLIIPPIKEGKEGFVVETYTGLIKTAMLFHNMRRSYFKFQVIATDDYGKGLSGKADVLVSVVNQLDMQVIVSNVPPTLVEKKIEDLTEILDRYVQEQIPGAKVVVESIGARRHGDAFSLEDYTKCDLTVYAIDPQTNRAIDRNELFKFLDGKLLDINKDFQPYYGEGGRILEIRTPEAVTSIKKRGESLGYTEGALLALAFIIILCCIPAILVVLVSYRQVFKGRQAECTKTARIQAALPAAKPAVPAPAPVAAPPPPPPPPPGAHLYEELGDSSMYEMPQYGSRRRLLPPAGQEEYGEVVGEAEEEYEEEEWARKRMIKLVVDREYETSSTGEDSAPECQRNRLHHPSIHSNINGNIYIAQNGSVVRTRRACLTDNLKVASPVRLGGPFKKLDKLAVTHEENVPLNTLSKGPFSTEKMNARPTLVTFAPCPVGTDNTAVKPLRNRLKSTVEQESMIDSKNIKEALEFHSDHTQSDDEELWMGPWNNLHIPMTKL

SEQ ID NO: 10080 - protein, 1790 aa, Homo sapiens
MFRQFYLWTCLASGIILGSLFEICLGQYDDDWQYEDCKLARGGPPATIVAIDEESRNGTILVDNMLIKGTAGGPDPTIELSLKDNVDYWVLMDPVKQMLFLNSTGRVLDRDPPMNIHSIVVQVQCINKKVGTIIYHEVRIVVRDRNDNSPTFKHESYYATVNELTPVGTTIFTGFSGDNGATDIDDGPNGQIEYVIQYNPDDPTSNDTFEIPLMLTGNIVLRKRLNYEDKTRYFVIIQANDRAQNLNERRTTTTTLTVDVLDGDDLGPMFLPCVLVPNTRDCRPLTYQAAIPELRTPEELNPIIVTPPIQAIDQDRNIQPPSDRPGILYSILVGTPEDYPRFFHMHPRTAELSLLEPVNRDFHQKFDLVIKAEQDNGHPLPAFAGLHIEILDENNQSPYFTMPSYQGYILESAPVGATISDSLNLTSPLRIVALDKDIEDVPPSGVPTKDPELHLFLNDYTSVFTVTQTGITRYLTLLQPVDREEQQTYTFSITAFDGVQESEPVIVNIQVMDANDNTPTFPEISYDVYVYTDMRPGDSVIQLTAVDADEGSNGEITYEILVGAQGDFIINKTTGLITIAPGVEMIVGRTYALTVQAADNAPPAERRNSICTVYIEVLPPNNQSPPRFPQLMYSLEISEAMRVGAVLLNLQATDREGDSITYAIENGDPQRVFNLSETTGILTLGKALDRESTDRYILIITASDGRPDGTSTATVNIVVTDVNDNAPVFDPYLPRNLSVVEEEANAFVGQVKATDPDAGINGQVHYSLGNFNNLFRITSNGSIYTAVKLNREVRDYYELVVVATDGAVHPRHSTLTLAIKVLDIDDNSPVFTNSTYTVLVEENLPAGTTILQIEAKDVDLGANVSYRIRSPEVKHFFALHPFTGELSLLRSLDYEAFPDQEASITFLVEAFDIYGTMPPGIATVTVIVKDMNDYPPVFSKRIYKGMVAPDAVKGTPITTVYAEDADPPGLPASRVRYRVDDVQFPYPASIFEVEEDSGRVITRVNLNEEPTTIFKLVVVAFDDGEPVMSSSATVKILVLHPGEIPRFTQEEYRPPPVSELATKGTMVGVISAAAINQSIVYSIVSGNEEDTFGINNITGVIYVNGPLDYETRTSYVLRVQADSLEVVLANLRVPSKSNTAKVYIEIQDENNHPPVFQKKFYIGGVSEDARMFTSVLRVKATDKDTGNYSVMAYRLIIPPIKEGKEGFVVETYTGLIKTAMLFHNMRRSYFKFQVIATDDYGKGLSGKADVLVSVVNQLDMQVIVSNVPPTLVEKKIEDLTEILDRYVQEQIPGAKVVVESIGARRHGDAFSLEDYTKCDLTVYAIDPQTNRAIDRNELFKFLDGKLLDINKDFQPYYGEGGRILEIRTPEAVTSIKKRGESLGYTEGALLALAFIIILCCIPAILVVLVSYRQFKVRQAECTKTARIQAALPAAKPAVPAPAPVAAPPPPPPPPPGAHLYEELGDSSMHKYEMPQYGSRRRLLPPAGQEEYGEVVGEAEEEYEEEEEEPKKIKKPKVEIREPSEEEEVVVTIEKPPAAEPTYTTWKRARIFPMIFKKVRGLADKRGIVDLEGEEWQRRLEEEDKDYLKLTLDQEEATESTVESEEESSSDYTEYSEEESEFSESETTEEESESETPSEEEESSTPESEESESTESEGEKARKNIVLARRRPMVEEVKEVKGRKEEPQEEQKEPKMEEEEHSEEEESGPAPVEESTDPEAQDIPEEGSAESASVEGGVESEEESESGSSSSSSESQSGGPWGYQVPAYDRSKNANQKKSPGANSEGYNTAL

SEQ ID NO: 10081 - protein, 72 aa, Homo sapiens
MFRQFYLWTCLASGIILGSLFEICLGQYDDGTILVDNMLIKGTAGGPDPTIELSLKDNVDYWVLMDPVKQML

SEQ ID NO: 10082 - protein, 1932 aa, Homo sapiens
MFRQFYLWTCLASGIILGSLFEICLGQYDDGTILVDNMLIKGTAGGPDPTIELSLKDNVDYWVLMDPVKQMLFLNSTGRVLDRDPPMNIHSIVVQVQCINKKVGTIIYHEVRIVVRDRNDNSPTFKHESYYATVNELTPVGTTIFTGFSGDNGATDIDDGPNGQIEYVIQYNPDDPTSNDTFEIPLMLTGNIVLRKRLNYEDKTRYFVIIQANDRAQNLNERRTTTTTLTVDVLDGDDLGPMFLPCVLVPNTRDCRPLTYQAAIPELRTPEELNPIIVTPPIQAIDQDRNIQPPSDRPGILYSILVGTPEDYPRFFHMHPRTAELSLLEPVNRDFHQKFDLVIKAEQDNGHPLPAFAGLHIEILDENNQSPYFTMPSYQGYILESAPVGATISDSLNLTSPLRIVALDKDIEDTKDPELHLFLNDYTSVFTVTQTGITRYLTLLQPVDREEQQTYTFSITAFDGVQESEPVIVNIQVMDANDNTPTFPEISYDVYVYTDMRPGDSVIQLTAVDADEGSNGEITYEILVGAQGDFIINKTTGLITIAPGVEMIVGRTYALTVQAADNAPPAERRNSICTVYIEVLPPNNQSPPRFPQLMYSLEISEAMRVGAVLLNLQATDREGDSITYAIENGDPQRVFNLSETTGILTLGKALDRESTDRYILIITASDGRPDGTSTATVNIVVTDVNDNAPVFDPYLPRNLSVVEEEANAFVGQVKATDPDAGINGQVHYSLGNFNNLFRITSNGSIYTAVKLNREVRDYYELVVVATDGAVHPRHSTLTLAIKVLDIDDNSPVFTNSTYTVLVEENLPAGTTILQIEAKDVDLGANVSYRIRSPEVKHFFALHPFTGELSLLRSLDYEAFPDQEASITFLVEAFDIYGTMPPGIATVTVIVKDMNDYPPVFSKRIYKGMVAPDAVKGTPITTVYAEDADPPGLPASRVRYRVDDVQFPYPASIFEVEEDSGRVITRVNLNEEPTTIFKLVVVAFDDGEPVMSSSATVKILVLHPGEIPRFTQEEYRPPPVSELATKGTMVGVISAAAINQSIVYSIVSGNEEDTFGINNITGVIYVNGPLDYETRTSYVLRVQADSLEVVLANLRVPSKSNTAKVYIEIQDENNHPPVFQKKFYIGGVSEDARMFTSVLRVKATDKDTGNYSVMAYRLIIPPIKEGKEGFVVETYTGLIKTAMLFHNMRRSYFKFQVIATDDYGKGLSGKADVLVSVVNQLDMQVIVSNVPPTLVEKKIEDLTEILDRYVQEQIPGAKVVVESIGARRHGDAFSLEDYTKCDLTVYAIDPQTNRAIDRNELFKFLDGKLLDINKDFQPYYGEGGRILEIRTPEAVTSIKKRGESLGYTEGALLALAFIIILCCIPAILVVLVSYRQRQAECTKTARIQAALPAAKPAVPAPAPVAAPPPPPPPPPGAHLYEELGDSSMHNLFLLYHFQQSRGNNSVSEDRKHQQVVMPFSSNTIEAHKSAHVDGSLKSNKLKSARKFTFLSDEDDLSAHNPLYKENISQVSTNSDISQRTDFVDPFSPKIQAKSKSLRGPREKIQRLWSQSVSLPRRLMRKVPNRPEIIDLQQWQGTRQKAENENTGICTNKRGSSNPLLTTEEANLTEKEEIRQGETLMIEGTEQLKSLSSDSSFCFPRPHFSFSTLPTVSRTVELKSEPNVISSPAECSLELSPSRPCVLHSSLSRRETPICMLPIETERNIFENFAHPPNISPSACPLPPPPPISPPSPPPAPAPLAPPPDISPFSLFCPPPSPPSIPLPLPPPTFFPLSVSTSGPPTPPLLPPFPTPLPPPPPSIPCPPPPSASFLSTECVCITGVKCTTNLMPAEKIKSSMTQLSTTTVCKTDPQREPKGILRHVKNLAELEKSVANMYSQIEKNYLRTNVSELQTMCPSEVTNMEITSEQNKGSLNNIVEGTEKQSHSQSTSL

SEQ ID NO: 10083 - protein, 1150 aa, Homo sapiens
MPSYQGYILESAPVGATISDSLNLTSPLRIVALDKDIEDVPPSGVPTKDPELHLFLNDYTSVFTVTQTGITRYLTLLQPVDREEQQTYTFSITAFDGVQESEPVIVNIQVMDANDNTPTFPEISYDVYVYTDMRPGDSVIQLTAVDADEGSNGEITYEILVGAQGDFIINKTTGLITIAPGVEMIVGRTYALTVQAADNAPPAERRNSICTVYIEVLPPNNQSPPRFPQLMYSLEISEAMRVGAVLLNLQATDREGDSITYAIENGDPQRVFNLSETTGILTLGKALDRESTDRYILIITASDGRPDGTSTATVNIVVTDVNDNAPVFDPYLPRNLSVVEEEANAFVGQVKATDPDAGINGQVHYSLGNFNNLFRITSNGSIYTAVKLNREVRDYYELVVVATDGAVHPRHSTLTLAIKVLDIDDNSPVFTNSTYTVLVEENLPAGTTILQIEAKDVDLGANVSYRIRSPEVKHFFALHPFTGELSLLRSLDYEAFPDQEASITFLVEAFDIYGTMPPGIATVTVIVKDMNDYPPVFSKRIYKGMVAPDAVKGTPITTVYAEDADPPGLPASRVRYRVDDVQFPYPASIFEVEEDSGRVITRVNLNEEPTTIFKLVVVAFDDGEPVMSSSATVKILVLHPGEIPRFTQEEYRPPPVSELATKGTMVGVISAAAINQSIVYSIVSGNEEDTFGINNITGVIYVNGPLDYETRTSYVLRVQADSLEVVLANLRVPSKSNTAKVYIEIQDENNHPPVFQKKFYIGGVSEDARMFTSVLRVKATDKDTGNYSVMAYRLIIPPIKEGKEGFVVETYTGLIKTAMLFHNMRRSYFKFQVIATDDYGKGLSGKADVLVSVVNQLDMQVIVSNVPPTLVEKKIEDLTEILDRYVQEQIPGAKVVVESIGARRHGDAFSLEDYTKCDLTVYAIDPQTNRAIDRNELFKFLDGKLLDINKDFQPYYGEGGRILEIRTPEAVTSIKKRGESLGYTEGALLALAFIIILCCIPAILVVLVSYRQFKVRQAECTKTARIQAALPAAKPAVPAPAPVAAPPPPPPPPPGAHLYEELGDSSMHKNYPWSLELILARNMDKIITVMSMGMKCLNMGVAVDCYHQLDRRNMVRWLVKLRKNMRRKRKSQRKLKNQRLKLESLVRRKK

SEQ ID NO: 10084 - protein, 416 aa, Homo sapiens
MQVIVSNVPPTLVEKKIEDLTEILDRYVQEQIPGAKVVVESIGARRHGDAFSLEDYTKCDLTVYAIDPQTNRAIDRNELFKFLDGKLLDINKDFQPYYGEGGRILEIRTPEAVTSIKKRGESLGYTEGALLALAFIIILCCIPAILVVLVSYRQRGYGSEQQQLLRPSLLKPEELSMESGIDPGQEYGQDYYSYEHGYEMPQYGSRRRLLPPAGQEEYGEVVGEAEEEYEEEEWARKRMIKLVVDREYETSSTGEDSAPECQRNRLHHPSIHSNINGNIYIAQNGSVVRTRRACLTDNLKVASPVRLGGPFKKLDKLAVTHEENVPLNTLSKGPFSTEKMNARPTLVTFAPCPVGTDNTAVKPLRNRLKSTVEQESMIDSKNIKEALEFHSDHTQSDDEELWMGPWNNLHIPMTKL

SEQ ID NO: 10085 - protein, 1360 aa, Homo sapiens
  SITE 1: note = misc_feature - Xaa can be any naturally occurring amino acid
XHIEILDENNQSPYFTMPSYQGYILESAPVGATISDSLNLTSPLRIVALDKDIEDTKDPELHLFLNDYTSVFTVTQTGITRYLTLLQPVDREEQQTYTFSITAFDGVQESEPVIVNIQVMDANDNTPTFPEISYDVYVYTDMRPGDSVIQLTAVDADEGSNGEITYEILVGAQGDFIINKTTGLITIAPGVEMIVGRTYALTVQAADNAPPAERRNSICTVYIEVLPPNNQSPPRFPQLMYSLEISEAMRVGAVLLNLQATDREGDSITYAIENGDPQRVFNLSETTGILTLGKALDRESTDRYILIITASDGRPDGTSTATVNIVVTDVNDNAPVFDPYLPRNLSVVEEEANAFVGQVKATDPDAGINGQVHYSLGNFNNLFRITSNGSIYTAVKLNREVRDYYELVVVATDGAVHPRHSTLTLAIKVLDIDDNSPVFTNSTYTVLVEENLPAGTTILQIEAKDVDLGANVSYRIRSPEVKHFFALHPFTGELSLLRSLDYEAFPDQEASITFLVEAFDIYGTMPPGIATVTVIVKDMNDYPPVFSKRIYKGMVAPDAVKGTPITTVYAEDADPPGLPASRVRYRVDDVQFPYPASIFEVEEDSGRVITRVNLNEEPTTIFKLVVVAFDDGEPVMSSSATVKILVLHPGEIPRFTQEEYRPPPVSELATKGTMVGVISAAAINQSIVYSIVSGNEEDTFGINNITGVIYVNGPLDYETRTSYVLRVQADSLEVVLANLRVPSKSNTAKVYIEIQDENNHPPVFQKKFYIGGVSEDARMFTSVLRVKATDKDTGNYSVMAYRLIIPPIKEGKEGFVVETYTGLIKTAMLFHNMRRSYFKFQVIATDDYGKGLSGKADVLVSVVNQLDMQVIVSNVPPTLVEKKIEDLTEILDRYVQEQIPGAKVVVESIGARRHGDAFSLEDYTKCDLTVYAIDPQTNRAIDRNELFKFLDGKLLDINKDFQPYYGEGGRILEIRTPEAVTSIKKRGESLGYTEGALLALAFIIILCCIPAILVVLVSYRQFKVRQAECTKTARIQAALPAAKPAVPAPAPVAAPPPPPPPPPGAHLYEELGDSSIWSFCWQLVICMRTCAIWRTLTRRGYGSEQQQLLRPSLLKPEELSMESGIDPGQEYGQDYYSYEHGYEMPQYGSRRRLLPPAGQEEYGEVVGEAEEEYEEEEWARKRMIKLVVDREYETSSTGEDSAPECQRNRLHHPSIHSNINGNIYIAQNGSVVRTRRACLTDNLKVASPVRLGGPFKKLDKLAVTHEENVPLNTLSKGPFSTEKMNARPTLVTFAPCPVGTDNTAVKPLRNRLKSTVEQESMIDSKNIKEALEFHSDHTQSDDEELWMGPWNNLHIPMTKL

SEQ ID NO: 10086 - protein, 37 aa, Homo sapiens
  SITE 1: note = misc_feature - Xaa can be any naturally occurring amino acid
XMKCLNMGVAVDCYHQLDRRNMVRWLVKLRKNMRRKR

SEQ ID NO: 10087 - protein, 807 aa, Homo sapiens
MVFSRRGGLGARDLLLWLLLLAAWEVGSGQLHYSIPEEAKHGTFVGRVAQDLGLELAELVPRLFRVASKTHRDLLEVNLQNGILFVNSRIDREELCQWSAECSIHLELIADRPLQVFHVEVKVKDINDNPPVFRGREQIIFIPESRLLNSRFPIEGAADADIGANALLTYTLSPSDYFSLDVEASDELSKSLWLELRKYLDREETPELHLLLTATDGGKPELQGTVELLITVLDVNDNAPLFDQAVYRVHLLETTANGTLVTTLNASDADEGVNGEVVFSFDSGISRDIQEKFKVDSSSGEIRLIDKLDYEETKSYEIQVKAVDKGSPPMSNHCKVLVKVLDVNDNAPELAVTSLYLPIREDAPLSTVIALITVSDRDSGANGQVTCSLMPHVPFKLVSTFKNYYSLVLDSALDRESLSVYELVVTARDGGSPSLWATARVSVEVADVNDNAPAFAQPEYTVFVKENNPPGCHIFTVSARDADAQENALVSYSLVERRVGERALSNYVSVHAESGKVYALQPLDHEELELLQFQVSARDAGVPPLGSNVTLQVFVLDENDNAPALLAPRVGGTIGAVSELVPRLVGAGHVVAKVRAVDADSGYNAWLSYELQPAAGGARIPFRVGLYTGEISTTRVLDEADLSRYRLLVLVKDHGEPALTATATVLVSLVESGQAPKASSRASVGVAGPEAALVDVNVYLIIAICAVSSLLVLTLLLYTALRCSVPPTEGAYVPGKPTLVCSSALGSWSNSQQRRQRVCSSEGPPKTDLMAFSPGLSPSLNTSERNEQPEANLDLSGNVSPTFEFWL

SEQ ID NO: 10088 - protein, 686 aa, Homo sapiens
MVFSRRGGLGARDLLLWLLLLAAWEVGSGQLHYSIPEEAKHGTFVGRVAQDLGLELAELVPRLFRVASKTHRDLLEVNLQNGILFVNSRIDREELCQWSAECSIHLELIADRPLQVFHVEVKVKDINDNPPVFRGREQIIFIPESRLLNSRFPIEGAADADIGANALLTYTLSPSDYFSLDVEASDELSKSLWLELRKYLDREETPELHLLLTATDGGKPELQGTVELLITVLDVNDNAPLFDQAVYRVHLLETTANGTLVTTLNASDADEGVNGEVVFSFDSGISRDIQEKFKVDSSSGEIRLIDKLDYEETKSYEIQVKAVDKGSPPMSNHCKVLVKVLDVNDNAPELAVTSLYLPIREDAPLSTVIALITVSDRDSGANGQVTCSLMPHVPFKLVSTFKNYYSLVLDSALDRESLSVYELVVTARDGGSPSLWATARVSVEVADVNDNAPAFAQPEYTVFVKENNPPGCHIFTVSARDADAQENALVSYSLVERRVGERALSNYVSVHAESGKVYALQPLDHEELELLQFQPRQPNPDWRYSASLRAGMHSSVHLEEAGILRAGPGGPDQQWPTVSSATPEPEAGEVSPPVGAGVNSNSWTFKYGPGNPKQSGPGELPDKFIIPGSPAIISIRQEPTNSQIDKSDFITFGKKEETKKKKKKKKGNKTQEKKEKGNSTTDNSDQ

SEQ ID NO: 10089 - protein, 950 aa, Homo sapiens
MVFSRRGGLGARDLLLWLLLLAAWEVGSGQLHYSIPEEAKHGTFVGRVAQDLGLELAELVPRLFRVASKTHRDLLEVNLQNGILFVNSRIDREELCQWSAECSIHLELIADRPLQVFHVEVKVKDINDNPPVFRGREQIIFIPESRLLNSRFPIEGAADADIGANALLTYTLSPSDYFSLDVEASDELSKSLWLELRKYLDREETPELHLLLTATDGGKPELQGTVELLITVLDVNDNAPLFDQAVYRVHLLETTANGTLVTTLNASDADEGVNGEVVFSFDSGISRDIQEKFKVDSSSGEIRLIDKLDYEETKSYEIQVKAVDKGSPPMSNHCKVLVKVLDVNDNAPELAVTSLYLPIREDAPLSTVIALITVSDRDSGANGQVTCSLMPHVPFKLVSTFKNYYSLVLDSALDRESLSVYELVVTARDGGSPSLWATARVSVEVADVNDNAPAFAQPEYTVFVKENNPPGCHIFTVSARDADAQENALVSYSLVERRVGERALSNYVSVHAESGKVYALQPLDHEELELLQFQVSARDAGVPPLGSNVTLQVFVLDENDNAPALLAPRVGGTIGAVSELVPRLVGAGHVVAKVRAVDADSGYNAWLSYELQPAAGGARIPFRVGLYTGEISTTRVLDEADLSRYRLLVLVKDHGEPALTATATVLVSLVESGQAPKASSRASVGVAGPEAALVDVNVYLIIAICAVSSLLVLTLLLYTALRCSVPPTEGAYVPGKPTLVCSSALGSWSNSQQRRQRVCSSEGPPKTDLMAFSPGLSPSLNTSERNEQPEANLDLSGNPRQPNPDWRYSASLRAGMHSSVHLEEAGILRAGPGGPDQQWPTVSSATPEPEAGEVSPPVGAGVNSNSWTFKYGPGNPKQSGPGELPDKFIIPGSPAIISIRQEPTNSQIDKSDFITFGKKEETKKKKKKKKGNKTQEKKEKGNSTTDNSDQ

SEQ ID NO: 10090 - protein, 948 aa, Homo sapiens
MVSRCSCLGVQCLLLSLLLLAAWEVGSGQLHYSVYEEARHGTFVGRIAQDLGLELAELVQRLFRVASKRHGDLLEVNLQNGILFVNSRIDREELCGRSVECSIHLEVIVDRPLQVFHVDVEVKDINDNPPRFSVTEQKLSIPESRLLDSRFPLEGASDADVGENALLTYKLSPNEYFVLDIINKKDKDKFPVLVLRKLLDREENPQLKLLLTATDGGKPEFTGSVSLLILVLDANDNAPIFDRPVYEVKMYENQVNQTLVIRLNASDSDEGINKEMMYSFSSLVPPTIRRKFWINERTGEIKVNDAIDFEDSNTYEIHVDVTDKGNPPMVGHCTVLVELLDENDNSPEVIVTSLSLPVKEDAQVGTVIALISVSDHDSGANGQVTCSLTPHVPFKLVSTYKNYYSLVLDSALDRERVSAYELVVTARDGGSPPLWATASVSVEVADVNDNAPAFAQSEYTVFVKENNPPGCHIFTVSAWDADAQENALVSYSLVERRLGERSLSSYVSVHAESGKVYALQPLDHEELELLQFQVSARDGGVPPLGSNLTLQVFVLDENDNAPALLASPAGSAGGAVSELVLRSVVAGHVVAKVRAVDADSGYNAWLSYELQSAAVGARIPFRVGLYTGEISTTRALDETDSPRQRLLVLVKDHGEPSLTATATVLVSLVEGSQAPKASSRASVGVAPEVALVDVNVYLIIAICAVSSLLVLTLLLYTALRCSAAPTEGACGPVKPTLVCSSAVGSWSYSQQRRQRVCSGEGLPKADLMAFSPSLPPCPMVDVDGEDQSIGGDHSRKPRQPNPDWRYSASLRAGMHSSVHLEEAGILRAGPGGPDQQWPTVSSATPEPEAGEVSPPVGAGVNSNSWTFKYGPGNPKQSGPGELPDKFIIPGSPAIISIRQEPTNSQIDKSDFITFGKKEETKKKKKKKKGNKTQEKKEKGNSTTDNSDQ

SEQ ID NO: 10091 - protein, 844 aa, Homo sapiens
MVSRCSCLGVQCLLLSLLLLAAWEVGSGQLHYSVYEEARHGTFVGRIAQDLGLELAELVQRLFRVASKRHGDLLEVNLQNGILFVNSRIDREELCGRSVECSIHLEVIVDRPLQVFHVDVEVKDINDNPPRFSVTEQKLSIPESRLLDSRFPLEGASDADVGENALLTYKLSPNEYFVLDIINKKDKDKFPVLVLRKLLDREENPQLKLLLTATDGGKPEFTGSVSLLILVLDANDNAPIFDRPVYEVKMYENQVNQTLVIRLNASDSDEGINKEMMYSFSSLVPPTIRRKFWINERTGEIKVNDAIDFEDSNTYEIHVDVTDKGNPPMVGHCTVLVELLDENDNSPEVIVTSLSLPVKEDAQVGTVIALISVSDHDSGANGQVTCSLTPHVPFKLVSTYKNYYSLVLDSALDRERVSAYELVVTARDGGSPPLWATASVSVEVADVNDNAPAFAQSEYTVFVKENNPPGCHIFTVSAWDADAQENALVSYSLVERRLGERSLSSYVSVHAESGKVYALQPLDHEELELLQFQVSARDGGVPPLGSNLTLQVFVLDENDNAPALLASPAGSAGGAVSELVLRSVVAGHVVAKVRAVDADSGYNAWLSYELQSAAVGARIPFRVGLYTGEISTTRALDETDSPRQRLLVLVKDHGEPSLTATATVLVSLVEGSQAPKASSRASVGVAPEVALVDVNVYLIIAICAVSSLLVLTLLLYTALRCSAAPTEGACGPVKPTLVCSSAVGSWSYSQQRRQRVCSGEGLPKADLMAFSPSLPPCPMVDVDGEDQSIGGDHSRKVGYYVFIFLLCFMNNIFSYRIFSNMYQNISFLSTFHLCLNISSDTFVI

SEQ ID NO: 10092 - protein, 685 aa, Homo sapiens
MVSRCSCLGVQCLLLSLLLLAAWEVGSGQLHYSVYEEARHGTFVGRIAQDLGLELAELVQRLFRVASKRHGDLLEVNLQNGILFVNSRIDREELCGRSVECSIHLEVIVDRPLQVFHVDVEVKDINDNPPRFSVTEQKLSIPESRLLDSRFPLEGASDADVGENALLTYKLSPNEYFVLDIINKKDKDKFPVLVLRKLLDREENPQLKLLLTATDGGKPEFTGSVSLLILVLDANDNAPIFDRPVYEVKMYENQVNQTLVIRLNASDSDEGINKEMMYSFSSLVPPTIRRKFWINERTGEIKVNDAIDFEDSNTYEIHVDVTDKGNPPMVGHCTVLVELLDENDNSPEVIVTSLSLPVKEDAQVGTVIALISVSDHDSGANGQVTCSLTPHVPFKLVSTYKNYYSLVLDSALDRERVSAYELVVTARDGGSPPLWATASVSVEVADVNDNAPAFAQSEYTVFVKENNPPGCHIFTVSAWDADAQENALVSYSLVERRLGERSLSSYVSVHAESGKVYALQPLDHEELELLQFQPRQPNPDWRYSASLRAGMHSSVHLEEAGILRAGPGGPDQQWPTVSSATPEPEAGEVSPPVGAGVNSNSWTFKYGPGNPKQSGPGELPDKFIIPGSPAIISIRQEPTNSQIDKSDFITFGKKEETKKKKKKKKGNKTQEKKEKGNSTTDNSDQ

SEQ ID NO: 10093 - protein, 949 aa, Homo sapiens
MFGFQRRGLGTPRLQLWLLLLEFWEVGSGQLHYSVSEEAKHGTFVGRIAQDLGLELAELVQRLFRVASKTHGDLLEVNLQNGILFVNSRIDREELCGQSAECSIHLEVIVDRPLQVFHVNVEVKDINDNPPVFSLREQKLLIAESKQSDSRFPLEGASDADIEENALLTYRLSKNEYFSLDSPTNGKQIKRLSLILKKSLDREKTPELNLLLTATDGGKPELTGTVRLLVQVLDVNDNDPEFDKSEYKVSLMENAAKETLVLKLNATDRDEGVNGEVTYSLMSIKPNGRHLFTLDQNNGEVRVNGTLDYEENKFYKIEVQATDKGTPPMAGHCTVWVEILDTNDNSPEVAVTSLSLPVREDAQPSTVIALISVSDRDSGVNGQVTCSLTPHVPFKLVSTFKNYYSLVLDSALDRENVWAYELVVTARDGGSPSLWATARVSVEVADVNDNAPAFAQPEYTVFVKENNPPGCHIFTVSARDADAQENALVSYSLVERRLGDRALSSYVSVHAESGKVYALQPLDHEELELLQFQVSARDAGVPPLSSNVTLQVFVLDENDNAPALLATQAGSAGGAVNKLVPRSVGAGHVVAKVRAVDADSGYNAWLSYELQPAAGGSRIPFRVGLYTGEISTTRALDEADSPRHRLLVLVKDHGEPALTATATVLVSLVESGQAPKASSRTLAGAASPEAALVDVNVYLIIAICVVSSLLVLTLLLYTALWWSATPTEGACAPGKPTLVCSRAVGSWSYSQQRRQRVCSEEGPPKTDLMAFSPSLPLGLNKEEEGERQEPGSNHPGQPRQPNPDWRYSASLRAGMHSSVHLEEAGILRAGPGGPDQQWPTVSSATPEPEAGEVSPPVGAGVNSNSWTFKYGPGNPKQSGPGELPDKFIIPGSPAIISIRQEPTNSQIDKSDFITFGKKEETKKKKKKKKGNKTQEKKEKGNSTTDNSDQ

SEQ ID NO: 10094 - protein, 810 aa, Homo sapiens
MFGFQRRGLGTPRLQLWLLLLEFWEVGSGQLHYSVSEEAKHGTFVGRIAQDLGLELAELVQRLFRVASKTHGDLLEVNLQNGILFVNSRIDREELCGQSAECSIHLEVIVDRPLQVFHVNVEVKDINDNPPVFSLREQKLLIAESKQSDSRFPLEGASDADIEENALLTYRLSKNEYFSLDSPTNGKQIKRLSLILKKSLDREKTPELNLLLTATDGGKPELTGTVRLLVQVLDVNDNDPEFDKSEYKVSLMENAAKETLVLKLNATDRDEGVNGEVTYSLMSIKPNGRHLFTLDQNNGEVRVNGTLDYEENKFYKIEVQATDKGTPPMAGHCTVWVEILDTNDNSPEVAVTSLSLPVREDAQPSTVIALISVSDRDSGVNGQVTCSLTPHVPFKLVSTFKNYYSLVLDSALDRENVWAYELVVTARDGGSPSLWATARVSVEVADVNDNAPAFAQPEYTVFVKENNPPGCHIFTVSARDADAQENALVSYSLVERRLGDRALSSYVSVHAESGKVYALQPLDHEELELLQFQVSARDAGVPPLSSNVTLQVFVLDENDNAPALLATQAGSAGGAVNKLVPRSVGAGHVVAKVRAVDADSGYNAWLSYELQPAAGGSRIPFRVGLYTGEISTTRALDEADSPRHRLLVLVKDHGEPALTATATVLVSLVESGQAPKASSRTLAGAASPEAALVDVNVYLIIAICVVSSLLVLTLLLYTALWWSATPTEGACAPGKPTLVCSRAVGSWSYSQQRRQRVCSEEGPPKTDLMAFSPSLPLGLNKEEEGERQEPGSNHPGQVSFLQIPPIRKCM

SEQ ID NO: 10095 - protein, 199 aa, Homo sapiens
  SITE 1: note = misc_feature - Xaa can be any naturally occurring amino acid
XVSSLLVLTLLLYTALWWSATPTEGACAPGKPTLVCSRAVGSWSYSQQRRQRVCSEEGPPKTDLMAFSPSLPLGLNKEEEGERQEPGSNHPGQPRQPNPDWRYSASLRAGMHSSVHLEEAGILRAGPGGPDQQWPTVSSATPEPEAGEVSPPVGAGVNSNSWTFKYGPGNPKQSGPEPKKQTQVSFLLRRKGEASQPRQ

SEQ ID NO: 10096 - protein, 803 aa, Homo sapiens
MVFTPEDRLGKQCLLLPLLLLAAWKVGSGQLHYSVPEEAKHGTFVGRIAQDLGLELAELVPRLFRMASKDREDLLEVNLQNGILFVNSRIDREELCGRSAECSIHLEVIVDRPLQVFHVDVEVRDINDNPPLFPVEEQRVLIYESRLPDSVFPLEGASDADVGSNSILTYKLSSSEYFGLDVKINSDDNKQIGLLLKKSLDREEAPAHNLFLTATDGGKPELTGTVQLLVTVLDVNDNAPTFEQSEYEVRIFENADNGTTVIRLNASDRDEGANGAISYSFNSLVAAMVIDHFSIDRNTGEIVIRGNLDFEQENLYKILIDATDKGHPPMAGHCTVLVRILDKNDNVPEIALTSLSLPVREDAQFGTVIALISVNDLDSGANGQVNCSLTPHVPFKLVSTFKNYYSLVLDSALDRESVSAYELVVTARDGGSPSLWATASLSVEVADMNDNAPAFAQPEYTVFVKENNPPGCHIFTVSARDADAQENALVSYSLVERRVGERALSSYISVHAESGKVYALQPLDHEELELLQFQVSARDAGVPPLGSNVTLQVFVLDENDNAPALLAPRVGGTGGAVSELVPRSLGAGQVVAKVRAVDADSGYNAWLSYELQPPASSARFPFRVGLYTGEISTTRVLDEADSPRHRLLVLVKDHGEPALTATATVLVSLVESGQAPKASSRASVGAAGPEAALVDVNVYLIIAICAVSSLLVLTLLLYTALRCSAPPTEGACTADKPTLVCSSAVGSWSYSQQRRQRVCSGEGPPKMDLMAFSPSLSPCPIMMGKAENQDLNEDHDAKVSEFS

SEQ ID NO: 10097 - protein, 686 aa, Homo sapiens
MVFTPEDRLGKQCLLLPLLLLAAWKVGSGQLHYSVPEEAKHGTFVGRIAQDLGLELAELVPRLFRMASKDREDLLEVNLQNGILFVNSRIDREELCGRSAECSIHLEVIVDRPLQVFHVDVEVRDINDNPPLFPVEEQRVLIYESRLPDSVFPLEGASDADVGSNSILTYKLSSSEYFGLDVKINSDDNKQIGLLLKKSLDREEAPAHNLFLTATDGGKPELTGTVQLLVTVLDVNDNAPTFEQSEYEVRIFENADNGTTVIRLNASDRDEGANGAISYSFNSLVAAMVIDHFSIDRNTGEIVIRGNLDFEQENLYKILIDATDKGHPPMAGHCTVLVRILDKNDNVPEIALTSLSLPVREDAQFGTVIALISVNDLDSGANGQVNCSLTPHVPFKLVSTFKNYYSLVLDSALDRESVSAYELVVTARDGGSPSLWATASLSVEVADMNDNAPAFAQPEYTVFVKENNPPGCHIFTVSARDADAQENALVSYSLVERRVGERALSSYISVHAESGKVYALQPLDHEELELLQFQPRQPNPDWRYSASLRAGMHSSVHLEEAGILRAGPGGPDQQWPTVSSATPEPEAGEVSPPVGAGVNSNSWTFKYGPGNPKQSGPGELPDKFIIPGSPAIISIRQEPTNSQIDKSDFITFGKKEETKKKKKKKKGNKTQEKKEKGNSTTDNSDQ

SEQ ID NO: 10098 - protein, 950 aa, Homo sapiens
MVFTPEDRLGKQCLLLPLLLLAAWKVGSGQLHYSVPEEAKHGTFVGRIAQDLGLELAELVPRLFRMASKDREDLLEVNLQNGILFVNSRIDREELCGRSAECSIHLEVIVDRPLQVFHVDVEVRDINDNPPLFPVEEQRVLIYESRLPDSVFPLEGASDADVGSNSILTYKLSSSEYFGLDVKINSDDNKQIGLLLKKSLDREEAPAHNLFLTATDGGKPELTGTVQLLVTVLDVNDNAPTFEQSEYEVRIFENADNGTTVIRLNASDRDEGANGAISYSFNSLVAAMVIDHFSIDRNTGEIVIRGNLDFEQENLYKILIDATDKGHPPMAGHCTVLVRILDKNDNVPEIALTSLSLPVREDAQFGTVIALISVNDLDSGANGQVNCSLTPHVPFKLVSTFKNYYSLVLDSALDRESVSAYELVVTARDGGSPSLWATASLSVEVADMNDNAPAFAQPEYTVFVKENNPPGCHIFTVSARDADAQENALVSYSLVERRVGERALSSYISVHAESGKVYALQPLDHEELELLQFQVSARDAGVPPLGSNVTLQVFVLDENDNAPALLAPRVGGTGGAVSELVPRSLGAGQVVAKVRAVDADSGYNAWLSYELQPPASSARFPFRVGLYTGEISTTRVLDEADSPRHRLLVLVKDHGEPALTATATVLVSLVESGQAPKASSRASVGAAGPEAALVDVNVYLIIAICAVSSLLVLTLLLYTALRCSAPPTEGACTADKPTLVCSSAVGSWSYSQQRRQRVCSGEGPPKMDLMAFSPSLSPCPIMMGKAENQDLNEDHDAKPRQPNPDWRYSASLRAGMHSSVHLEEAGILRAGPGGPDQQWPTVSSATPEPEAGEVSPPVGAGVNSNSWTFKYGPGNPKQSGPGELPDKFIIPGSPAIISIRQEPTNSQIDKSDFITFGKKEETKKKKKKKKGNKTQEKKEKGNSTTDNSDQ

SEQ ID NO: 10099 - protein, 458 aa, Homo sapiens
MDVNDNAPEITVSSITSPIPENTPETVVMVFRIRDRDSGDNGKMVCSIPEDIPFVLKSSVNNYYTLETERPLDRESRAEYNITITVTDLGTPRLKTEHNITVLVSDVNDNAPAFTQTSYALFVRENNSPALHIGSISATDRDSGTNAQVNYSLLPSQDPHLPLASLVSINADNGHLFALRSLDYEALQGFQFRVGATDHGSPALSSEALVRVLVLDANDNSPFVLYPLQNGSAPCTELVPWAAEPGYLVTKVVAVDGDSGQNAWLSYQLLKATEPGLFGVWAHNGEVRTARLLSERDAAKHRLVVLVKDNGEPPRSATATLHVLLVDGFSQPYLPLPEAAPAQAQADSLTVYLVVALASVSSLFLFSVLLFVAVRLCRRSRAAPVGRCSVPEGPFPGHLVDVSGTGTLSQSYHYEVCVTGGSRSNKFKFLKPIIPNFLPQSTGSEVEENPPFQNNLGF

SEQ ID NO: 10100 - protein, 67 aa, Homo sapiens
MENGGAGTLQIRQVLLFFVLLGMSQAGSETGNFLVMEELQSGSFVGNLAKTLGLEHLWILKQLSHTQ

SEQ ID NO: 10101 - protein, 795 aa, Homo sapiens
MENGGAGTLQIRQVLLFFVLLGMSQAGSETGNFLVMEELQSGSFVGNLAKTLGLEVSELSSRGARVVSNDNKECLQLDTNTGDLLLREMLDREELCGSNEPCVLYFQVLMKNPTQFLQIELQVRDINDHSPVFLEKEMLLEIPENSPVGAVFLLESAKDLDVGINAVKSYTINPNSHFHVKIRVNPDNRKYPELVLDKALDYEERPELSFILTALDGGSPPRSGTALVRVVVVDINDNSPEFEQAFYEVKILENSILGSLVVTVSAWDLDSGTNSELSYTFSHASEDIRKTFEINQKSGDITLTAPLDFEAIESYSIIIQATDGGGLFGKSTVRIQVMDVNDNAPEITVSSITSPIPENTPETVVMVFRIRDRDSGDNGKMVCSIPEDIPFVLKSSVNNYYTLETERPLDRESRAEYNITITVTDLGTPRLKTEHNITVLVSDVNDNAPAFTQTSYALFVRENNSPALHIGSISATDRDSGTNAQVNYSLLPSQDPHLPLASLVSINADNGHLFALRSLDYEALQGFQFRVGATDHGSPALSSEALVRVLVLDANDNSPFVLYPLQNGSAPCTELVPWAAEPGYLVTKVVAVDGDSGQNAWLSYQLLKATEPGLFGVWAHNGEVRTARLLSERDAAKHRLVVLVKDNGEPPRSATATLHVLLVDGFSQPYLPLPEAAPAQAQADSLTVYLVVALASVSSLFLFSVLLFVAVRLCRRSRAAPVGRCSVPEGPFPGHLVDVSGTGTLSQSYHYEVCVTGGSRSNKFKFLKPIIPNFLPQSTGSEVEENPPFQNNLGF

SEQ ID NO: 10102 - protein, 935 aa, Homo sapiens
MANRLQRGDRSRLLLLLCIFLGTLRGFRARQIRYSVPEETEKGSFVGNISKDLGLEPRELAKRGVRIVSRGKTQLFAVNPRSGSLITAGRIDREELCETVSSCFLNMELLVEDTLKIYGVEVEIIDINDNAPSFQEDEVEIKVSEHAIPGARFALPNARDPDVGVNSLQSYQLSPNNYFSLQLRGRTDGAKNPELVLEGSLDREKEAAHLLLLTALDGGDPIRKGAVPIRVVVLDVNDHIPMFTQSVYRVSVPENISSGTRVLMVNATDPDEGINGEVMYSFRNMESKASEIFQLDSQTGEVQVRGSLDFEKYRFYEMEIQGQDGGGLFTTTTMLITVVDVNDNAPEITITSSINSILENSPPGTVIALLNVQDQDSGENGQVSCFIPNHLPFKLEKTYGNYYKLITSRVLDRELVQSYNITLTATDQGSPPLSAETHVWLNVADDNDNPPVFPHSSYSAYIPENNPRGASIFSVTALDPDSKQNALVTYSLTDDTVQGVPLSSYVSINSNTGVLYALQSFDYEQFRDLELRVIARDSGDPPLSSNVSLSLFVLDQNDNAPEILYPALPTDGSTGVELAPRSAEPGYLVTKVVAVDKDSGQNAWLSYRLLKASEPGLFAVGEHTGEVRTARALLDRDALKQSLVVAVQDHGQPPLSATVTLTVAVADSIPEVLADLGSLESLANSETSDLSLYLVVAVAAVSCIFLVFVIVLLALRLWRWHKSRLLQASEGGLAGMPTSHFVGVDGVQAFLQTYSHEVSLIADSQKSHLIFPQPNYGDTLISQESCEKSEPLLIAEDSAIILGKCDPTSNQQAPPNTDWRFSQAQRPGTSGSQNGDDTGTWPNNQFDTEMLQAMILASASEAADGSSTLGGGAGTMGLSARYGPQFTLQHVPDYRQNVYIPGSNATLTNAAGKRDGKAPAGGNGNKKKSGKKEKK

SEQ ID NO: 10103 - protein, 750 aa, Homo sapiens
MANRLQRGDRSRLLLLLCIFLGTLRGFRARQIRYSVPEETEKGSFVGNISKDLGLEPRELAKRGVRIVSRGKTQLFAVNPRSGSLITAGRIDREELCETVSSCFLNMELLVEDTLKIYGVEVEIIDINDNAPSFQEDEVEIKVSEHAIPGARFALPNARDPDVGVNSLQSYQLSPNNYFSLQLRGRTDGAKNPELVLEGSLDREKEAAHLLLLTALDGGDPIRKGAVPIRVVVLDVNDHIPMFTQSVYRVSVPENISSGTRVLMVNATDPDEGINGEVMYSFRNMESKASEIFQLDSQTGEVQVRGSLDFEKYRFYEMEIQGQDGGGLFTTTTMLITVVDVNDNAPEITITSSINSILENSPPGTVIALLNVQDQDSGENGQVSCFIPNHLPFKLEKTYGNYYKLITSRVLDRELVQSYNITLTATDQGSPPLSAETHVWLNVADDNDNPPVFPHSSYSAYIPENNPRGASIFSVTALDPDSKQNALVTYSLTDDTVQGVPLSSYVSINSNTGVLYALQSFDYEQFRDLELRVIARDSGDPPLSSNVSLSLFVLDQNDNAPEILYPALPTDGSTGVELAPRSAEPGYLVTKVVAVDKDSGQNAWLSYRLLKASEPGLFAVGEHTGEQAPPNTDWRFSQAQRPGTSGSQNGDDTGTWPNNQFDTEMLQAMILASASEAADGSSTLGGGAGTMGLSARYGPQFTLQHVPDYRQNVYIPGSNATLTNAAGKRDGKAPAGGNGNKKKSGKKEKK

SEQ ID NO: 10104 - protein, 837 aa, Homo sapiens
MANRLQRGDRSRLLLLLCIFLGTLRGFRARQIRYSVPEETEKGSFVGNISKDLGLEPRELAKRGVRIVSRGKTQLFAVNPRSGSLITAGRIDREELCETVSSCFLNMELLVEDTLKIYGVEVEIIDINDNAPSFQEDEVEIKVSEHAIPGARFALPNARDPDVGVNSLQSYQLSPNNYFSLQLRGRTDGAKNPELVLEGSLDREKEAAHLLLLTALDGGDPIRKGAVPIRVVVLDVNDHIPMFTQSVYRVSVPENISSGTRVLMVNATDPDEGINGEVMYSFRNMESKASEIFQLDSQTGEVQVRGSLDFEKYRFYEMEIQGQDGGGLFTTTTMLITVVDVNDNAPEITITSSINSILENSPPGTVIALLNVQDQDSGENGQVSCFIPNHLPFKLEKTYGNYYKLITSRVLDRELVQSYNITLTATDQGSPPLSAETHVWLNVADDNDNPPVFPHSSYSAYIPENNPRGASIFSVTALDPDSKQNALVTYSLTDDTVQGVPLSSYVSINSNTGVLYALQSFDYEQFRDLELRVIARDSGDPPLSSNVSLSLFVLDQNDNAPEILYPALPTDGSTGVELAPRSAEPGYLVTKVVAVDKDSGQNAWLSYRLLKASEPGLFAVGEHTGEVRTARALLDRDALKQSLVVAVQDHGQPPLSATVTLTVAVADSIPEVLADLGSLESLANSETSDLSLYLVVAVAAVSCIFLVFVIVLLALRLWRWHKSRLLQASEGGLAGMPTSHFVGVDGVQAFLQTYSHEVSLIADSQKSHLIFPQPNYGDTLISQESCEKSEPLLIAEDSAIILGKCDPTSNQVRFISLPPNCWCLGTSLLRRCFLSLL

SEQ ID NO: 10105 - protein, 198 aa, Homo sapiens
MLTCLVLSGVAQPVAFGQGQQFLPVHPQNPGFVQNPSGALPKAYPDNHLSQVDVNELFSKLLKTGILKLSQTDSATTQVSEVTAQPPPEEEEDQNEDQDVPDLTNFTVEELKQRYDSVINRLYTGIQCYSCGMRFTTSQTDVYADHLDWHYRQNRTEKDVSRKVTHRRWYYSLTDWIEFEEIADLEERAKSQFFEKVH

SEQ ID NO: 10106 - protein, 1555 aa, Homo sapiens
MSEQTPAEAGAAGAREDACRDYQSSLEDLTFNSKPHINMLTILAEENLPFAKEIVSLIEAQTAKAPSSEKLPVMYLMDSIVKNVGREYLTAFTKNLVATFICVFEKVDENTRKSLFKLRSTWDEIFPLKKLYALDVRVNSLDPAWPIKPLPPNVNTSSIHVNPKFLNKSPEEPSTPGTVVSSPSISTPPIVPDIQKNLTQEQLIRQQLLAKQKQLLELQQKKLELELEQAKAQLAVSLSVQQETSNLGPGSAPSKLHVSQIPPMAVKAPHQVPVQSEKSRPGPSLQIQDLKGTNRDPRLNRISQHSHGKDQSHRKEFLMNTLNQSDTKTSKTIPSEKLNSSKQEKSKSGEKITKKELDQLDSKSKSKSKSPSPLKNKLSHTKDLKNQESESMRLSDMNKRDPRLKKHLQDKTDGKDDDVKEKRKTAEKKDKDEHMKSSEHRLAGSRNKIINGIVQKQDTITEESEKQGTKPGRSSTRKRSRSRSPKSRSPIIHSPKRRDRRSPKRRQRSMSPTSTPKAGKIRQSGAKQSHMEEFTPPSREDRNAKRSTKQDIRDPRRMKKTEEERPQETTNQHSTKSGTEPKENVENWQSSKSAKRWKSGWEENKSLQQVDEHSKPPHLRHRESWSSTKGILSPRAPKQQQHRLSVDANLQIPKELTLASKRELLQKTSERLASGEITQDDFLVVVHQIRQLFQYQEGVREEQRSPFNDRFPLKRPRYEDSDKPFVDSPASRFAGLDTNQRLTALAEDRPLFDGPSRPSVARDGPTKMIFEGPNKLSPRIDGPPTPASLRFDGSPGQMGGGGPLRFEGPQGQLGGGCPLRFEGPPGPVGTPLRFEGPIGQAGGGGFRFEGSPGLRFEGSPGGLRFEGPGGQPVGGLRFEGHRGQPVGGLRFEGPHGQPVGGLRFDNPRGQPVGGLRFEGGHGPSGAAIRFDGPHGQPGGGIRFEGPLLQQGVGMRFEGPHGQSVAGLRFEGQHNQLGGNLRFEGPHGQPGVGIRFEGPLVQQGGGMRFEGPSVPGGGLRIEGPLGQGGPRFEGCHALRFDGQPGQPSLLPRFDGLHGQPGPRFERTPGQPGPQRFDGPPGQQVQPRFDGVPQRFDGPQHQQASRFDIPLGLQGTRFDNHPSQRLESVSFNQTGPYNDPPGNAFNAPSQGLQFQRHEQIFDSPQGPNFNGPHGPGNQSFSNPLNRASGHYFDEKNLQSSQFGNFGNIPAPMTVGNIQASQQVLSGVAQPVAFGQGQQFLPVHPQNPGFVQNPSGALPKAYPDNHLSQVDVNELFSKLLKTGILKLSQTDSATTQVSEVTAQPPPEEEEDQNEDQDVPDLTNFTVEELKQRYDSVINRLYTGIQCYSCGMRFTTSQTDVYADHLDWHYRQNRTEKDVSRKVTHRRWYYSLTDWIEFEEIADLEERAKSQFFEKVHEEVVLKTQEAAKEKEFQSVPAGPAGAVESCEICQEQFEQYWDEEEEEWHLKNAIRVDGKIYHPSCYEDYQNTSSFDCTPSPSKTPVENPLNIMLNIVKNELQEPCDSPKVKEERIDTPPACTEESIATPSEIKTENDTVESV

SEQ ID NO: 10107 - protein, 999 aa, Homo sapiens
MSEQTPAEAGAAGAREDACRDYQSSLEDLTFNSKPHINMLTILAEENLPFAKEIVSLIEAQTAKAPSSEKLPVMYLMDSIVKNVGREYLTAFTKNLVATFICVFEKVDENTRKSLFKLRSTWDEIFPLKKLYALDVRVNSLDPAWPIKPLPPNVNTSSIHVNPKFLNKSPEEPSTPGTVVSSPSISTPPIVPDIQKNLTQEQLIRQQLLAKQKQLLELQQKKLELELEQAKAQLAVSLSVQQETSNLGPGSAPSKLHVSQIPPMAVKAPHQVPVQSEKSRPGPSLQIQDLKGTNRDPRLNRISQHSHGKDQSHRKEFLMNTLNQSDTKTSKTIPSEKLNSSKQEKSKSGEKITKKELDQLDSKSKSKSKSPSPLKNKLSHTKDLKNQESESMRLSDMNKRDPRLKKHLQDKTDGKDDDVKEKRKTAEKKDKDEHMKSSEHRLAGSRNKIINGIVQKQDTITEESEKQGTKPGRSSTRKRSRSRSPKSRSPIIHSPKRRDRRSPKRRQRSMSPTSTPKAGKIRQSGAKQSHMEEFTPPSREDRNAKRSTKQDIRDPRRMKKTEEERPQETTNQHSTKSGTEPKENVENWQSSKSAKRWKSGWEENKSLQQVDEHSKPPHLRHRESWSSTKGILSPRAPKQQQHRLSVDANLQIPKELTLASKRELLQKTSERLASGEITQDDFLVVVHQIRQLFQYQEGKHRCNVRDSPTEENKGGLKKKPLLSDAELTYYEHKAKLKRTQVQHSFPRLDLLDPDIFDYPLTDALLSGIECEPSKSKHASRNSGAQFDRKEQFSERARRLSPISGSRTYAENLSPHEGRRRHDEQVSAKGVREEQRSPFNDRFPLKRPRYEDSDKPFVDSPASRFAGLDTNQRLTALAEDRPLFDGPSRPSVARDGPTKMIFEGPNKLSPRIDGPPTPASLRFDGSPGQMGGGGPLRFEGPQGQLGGGCPLRFEGPPGPVGTPLRFEGPIGQAGGGGFRFEGSPGLRFEGSPGGLRFEGP

SEQ ID NO: 10108 - protein, 784 aa, Homo sapiens
MSEQTPAEAGAAGAREDACRDYQSSLEDLTFNSKPHINMLTILAEENLPFAKEIVSLIEAQTAKAPSSEKLPVMYLMDSIVKNVGREYLTAFTKNLVATFICVFEKVDENTRKSLFKLRSTWDEIFPLKKLYALDVRVNSLDPAWPIKPLPPNVNTSSIHVNPKFLNKSPEEPSTPGTVVSSPSISTPPIVPDIQKNLTQEQLIRQQLLAKQKQLLELQQKKLELELEQAKAQLAVSLSVQQETSNLGPGSAPSKLHVSQIPPMAVKAPHQVPVQSEKSRPGPSLQIQDLKGTNRDPRLNRISQHSHGKDQSHRKEFLMNTLNQSDTKTSKTIPSEKLNSSKQEKSKSGEKITKKELDQLDSKSKSKSKSPSPLKNKLSHTKDLKNQESESMRLSDMNKRDPRLKKHLQDKTDGKDDDVKEKRKTAEKKDKDEHMKSSEHRLAGSRNKIINGIVQKQDTITEESEKQGTKPGRSSTRKRSRSRSPKSRSPIIHSPKRRDRRSPKRRQRSMSPTSTPKAGKIRQSGAKQSHMEEFTPPSREDRNAKRSTKQDIRDPRRMKKTEEERPQETTNQHSTKSGTEPKENVENWQSSKSAKRWKSGWEENKSLQQVDEHSKPPHLRHRESWSSTKGILSPRAPKQQQHRLSVDANLQIPKELTLASKRELLQKTSERLASGEITQDDFLVVVHQIRQLFQYQEGVREEQRSPFNDRFPLKRPRYEDSDKPFVDSPASRFAGLDTNQRLTALAEDRPLFDGPSRPSVARDGPTKMIFEGPNKLSPRIDGPP

SEQ ID NO: 10109 - protein, 99 aa, Homo sapiens
MSEQTPAEAGAAGAREDACRDYQSSLEDLTFNSKPHINMLTILAEENLPFAKEIVSLIEAQTAKVDENTRKSLFKLRSTWDEIFPLKKLYALDVRVNSL

SEQ ID NO: 10110 - protein, 449 aa, Homo sapiens
MLPAATASLLGPLLTACALLPFAQGQTPNYTRPVFLCGGDVKGESGYVASEGFPNLYPPNKECIWTITVPEGQTVSLSFRVFDLELHPACRYDALEVFAGSGTSGQRLGRFCGTFRPAPLVAPGNQVTLRMTTDEGTGGRGFLLWYSGRATSGTEHQFCGGRLEKAQGTLTTPNWPESDYPPGISCSWHIIAPPDQVIALTFEKFDLEPDTYCRYDSVSVFNGAVSDDSRRLGKFCGDAVPGSISSEGNELLVQFVSDLSVTADGFSASYKTLPRGTAKEGQGPGPKRGTEPKVKLPPKSQPPEKTEESPSAPDAPTCPKQCRRTGTLQSNFCASSLVVTATVKSMVREPGEGLAVTVSLIGAYKTGGLDLPSPPTGASLKFYVPCKQCPPMKKGVSYLLMGQVEENRGPVLPPESFVVLHRPNQDQILTNLSKRKCPSQPVRAAASQD

SEQ ID NO: 10111 - protein, 303 aa, Homo sapiens
MRGANAWAPLCLLLAAATQLSRQQSPERPVFTCGGILTGESGFIGSEGFPGVYPPNSKCTWKITVPEGKVVVLNFRFIDLESDNLCRYDFVDVYNGHANGQRIGRFCGTFRPGALVSSGNKMMVQMISDANTAGNGFMAMFSAAEPNERGDQYCGGLLDRPSGSFKTPNWPDRDYPAGVTCVWHIVAPKNQLIELKFEKFDVERDNYCRYDYVAVFNGGEVNDARRIGKYCGDSPPAISRHCYHNHHSRWEFARHSLDHQHLQRGKFGDSAGGQEHECQADCRLQAVPSPQKRSKLHYYGPSR

SEQ ID NO: 10112 - protein, 415 aa, Homo sapiens
MRGANAWAPLCLLLAAATQLSRQQSPERPVFTCGGILTGESGFIGSEGFPGVYPPNSKCTWKITVPEGKVVVLNFRFIDLESDNLCRYDFVDVYNGHANGQRIGRFCGTFRPGALVSSGNKMMVQMISDANTAGNGFMAMFSAAEPNERGDQYCGGLLDRPSGSFKTPNWPDRDYPAGVTCVWHIVAPKNQLIELKFEKFDVERDNYCRYDYVAVFNGGEVNDARRIGKYCGDSPPAPIVSERNELLIQFLSDLSLTADGFIGHYIFRPKKLPTTTEQPVTTTFPVTTGLKPTVALCQQKCRRTGTLEGNYCSSDFVLAGTVITTITRDGSLHATVSIINIYKEGNLAIQQAGKNMSARLTVVCKQCPLLRRGLNYIIMGQVGEDGRGKIMPNSFIMMFKTKNQKLLDALKNKQC

SEQ ID NO: 10113 - protein, 140 aa, Homo sapiens
TEQPVTTTFPVTTGLKPTVALCQQKCRRTGTLEGNYCSSDFVLAGTVITTITRDGSLHATVSIINIYKEGNLAIQQAGKNMSARLTVVCKQCPLLRRGLNYIIMGQVGEDGRGKIMPNSFIMMFKTKNQKLLDALKNKQC

SEQ ID NO: 10114 - protein, 101 aa, Homo sapiens
  SITE 1: note = misc_feature - Xaa can be any naturally occurring amino acid
XGTFRPGALVSSGNKMMVQMISDANTAGNGFMAMFSAAEPNERGKKKKRGPESTSPLSRVAMLCQGISIVEDSLTDLPALLKPPTGQTGITLQESLVCGTL

SEQ ID NO: 10115 - protein, 158 aa, Homo sapiens
MERRAWSLQCTAFVLFCAWCALNSAKAKRQFVNEWAAEIPGGPEAASAIAEELGYDLLGQIGSLENHYLFKHKNHPRRSRRSAFHITKRLSDDDRVIWAEQQYEKERSKRSALRDSALNLFNDPMWNQQWYLQDTRMTAALPKLDLHVIPVWQKGITG

SEQ ID NO: 10116 - protein, 753 aa, Homo sapiens
MERRAWSLQCTAFVLFCAWCALNSAKAKRQFVNEWAAEIPGGPEAASAIAEELGYDLLGQIGSLENHYLFKHKNHPRRSRRSAFHITKRLSDDDRVIWAEQQYEKERSKRSALRDSALNLFNDPMWNQQWYLQDTRMTAALPKLDLHVIPVWQKGITGKGVVITVLDDGLEWNHTDIYANYDPEASYDFNDNDHDPFPRYDPTNENKHGTRCAGEIAMQANNHKCGVGVAYNSKVGGIRMLDGIVTDAIEASSIGFNPGHVDIYSASWGPNDDGKTVEGPGRLAQKAFEYGVKQGRQGKGSIFVWASGNGGRQGDNCDCDGYTDSIYTISISSASQQGLSPWYAEKCSSTLATSYSSGDYTDQRITSADLHNDCTETHTGTSASAPLAAGIFALALEANPNLTWRDMQHLVVWTSEYDPLANNPGWKKNGAGLMVNSRFGFGLLNAKALVDLADPRTWRSVPEKKECVVKDNDFEPRALKANGEVIIEIPTRACEGQENAIKSLEHVQFEATIEYSRRGDLHVTLTSAAGTSTVLLAERERDTSPNGFKNWDFMSVHTWGENPIGTWTLRITDMSGRIQNEGRIVNWKLILHGTSSQPEHMKQPRVYTSYNTVQNDRRGVEKMVDPGEEQPTQENPKENTLVSKSPSSSSVGGRRDELEEGAPSQAMLRLLQSAFSKNSPPKQSPKKSPSAKLNIPYENFYEALEKLNKPSQLKDSEDSLYNDYVDVFYNTKPYKHRDDRLLQALVDILNEEN

SEQ ID NO: 10117 - protein, 706 aa, Homo sapiens
MGKGSISFLFFSQIGSLENHYLFKHKNHPRRSRRSAFHITKRLSDDDRVIWAEQQYEKERSKRSALRDSALNLFNDPMWNQQWYLQDTRMTAALPKLDLHVIPVWQKGITGKGVVITVLDDGLEWNHTDIYANYDPEASYDFNDNDHDPFPRYDPTNENKHGTRCAGEIAMQANNHKCGVGVAYNSKVGGIRMLDGIVTDAIEASSIGFNPGHVDIYSASWGPNDDGKTVEGPGRLAQKAFEYGVKQGRQGKGSIFVWASGNGGRQGDNCDCDGYTDSIYTISISSASQQGLSPWYAEKCSSTLATSYSSGDYTDQRITSADLHNDCTETHTGTSASAPLAAGIFALALEANPNLTWRDMQHLVVWTSEYDPLANNPGWKKNGAGLMVNSRFGFGLLNAKALVDLADPRTWRSVPEKKECVVKDNDFEPRALKANGEVIIEIPTRACEGQENAIKSLEHVQFEATIEYSRRGDLHVTLTSAAGTSTVLLAERERDTSPNGFKNWDFMSVHTWGENPIGTWTLRITDMSGRIQNEGRIVNWKLILHGTSSQPEHMKQPRVYTSYNTVQNDRRGVEKMVDPGEEQPTQENPKENTLVSKSPSSSSVGGRRDELEEGAPSQAMLRLLQSAFSKNSPPKQSPKKSPSAKLNIPYENFYEALEKLNKPSQLKDSEDSLYNDYVDVFYNTKPYKHRDDRLLQALVDILNEEN

SEQ ID NO: 10118 - protein, 260 aa, Homo sapiens
MAGSPLLWGPRAGGVGLLVLLLLGLFRPPPALCARPVKEPRGLSAASPPLAETGAPRRFRRSVPRGEAAGAVQELARALAHLLEAERQERARAEAQEAEDQQARVLAQLLRVWGAPRNSDPALGLDDDPDAPAAQLARALLRARLDPAALAAQLVPAPVPAAALRPRPPVYDDGPAGPDAEEAGDETPDVDPELLRYLLGRILAGSADSEGVAAPRRLRRAADHDVGSELPPEGVLGALLRVKRLETPAPQVPARRLLPP

SEQ ID NO: 10119 - protein, 638 aa, Homo sapiens
MKGGCVSQWKAAAGFLFCVMVFASAERPVFTNHFLVELHKGGEDKARQVAAEHGFGVRKLPFAEGLYHFYHNGLAKAKRRRSLHHKQQLERDPRVKMALQQEGFDRKKRGYRDINEIDINMNDPLFTKQWYLINTGQADGTPGLDLNVAEAWELGYTGKGVTIGIMDDGIDYLHPDLASNYNAEASYDFSSNDPYPYPRYTDDWFNSHGTRCAGEVSAAANNNICGVGVAYNSKVAGIRMLDQPFMTDIIEASSISHMPQLIDIYSASWGPTDNGKTVDGPRELTLQAMADGVNKGRGGKGSIYVWASGDGGSYDDCNCDGYASSMWTISINSAINDGRTALYDESCSSTLASTFSNGRKRNPEAGVATTDLYGNCTLRHSGTSAAAPEAAGVFALALEANLGLTWRDMQHLTVLTSKRNQLHDEVHQWRRNGVGLEFNHLFGYGVLDAGAMVKMAKDWKTVPERFHCVGGSVQDPEKIPSTGKLVLTLTTDACEGKENFVRYLEHVQAVITVNATRRGDLNINMTSPMGTKSILLSRRPRDDDSKVGFDKWPFMTTHTWGEDARGTWTLELGFVGSAPQKGVLKEWTLMLHGTQSAPYIDQVVRDYQSKLAMSKKEELEEELDEAVERSLKSILNKN

SEQ ID NO: 10120 - protein, 603 aa, Homo sapiens
MKGGCVSQWKAAAGFLFCVMVFASAERPVFTNHFLVELHKGGEDKARQVAAEHGFGVRKVKMALQQEGFDRKKRGYRDINEIDINMNDPLFTKQWYLINTGQADGTPGLDLNVAEAWELGYTGKGVTIGIMDDGIDYLHPDLASNYNAEASYDFSSNDPYPYPRYTDDWFNSHGTRCAGEVSAAANNNICGVGVAYNSKVAGIRMLDQPFMTDIIEASSISHMPQLIDIYSASWGPTDNGKTVDGPRELTLQAMADGVNKGRGGKGSIYVWASGDGGSYDDCNCDGYASSMWTISINSAINDGRTALYDESCSSTLASTFSNGRKRNPEAGVATTDLYGNCTLRHSGTSAAAPEAAGVFALALEANLGLTWRDMQHLTVLTSKRNQLHDEVHQWRRNGVGLEFNHLFGYGVLDAGAMVKMAKDWKTVPERFHCVGGSVQDPEKIPSTGKLVLTLTTDACEGKENFVRYLEHVQAVITVNATRRGDLNINMTSPMGTKSILLSRRPRDDDSKVGFDKWPFMTTHTWGEDARGTWTLELGFVGSAPQKGVLKEWTLMLHGTQSAPYIDQVVRDYQSKLAMSKKEELEEELDEAVERSLKSILNKN

SEQ ID NO: 10121 - protein, 619 aa, Homo sapiens
MVFASAERPVFTNHFLVELHKGGEDKARQVAAEHGFGVRKLPFAEGLYHFYHNGLAKAKRRRSLHHKQQLERDPRVKMALQQEGFDRKKRGYRDINEIDINMNDPLFTKQWYLINTGQADGTPGLDLNVAEAWELGYTGKGVTIGIMDDGIDYLHPDLASNYNAEASYDFSSNDPYPYPRYTDDWFNSHGTRCAGEVSAAANNNICGVGVAYNSKVAGIRMLDQPFMTDIIEASSISHMPQLIDIYSASWGPTDNGKTVDGPRELTLQAMADGVNKGRGGKGSIYVWASGDGGSYDDCNCDGYASSMWTISINSAINDGRTALYDESCSSTLASTFSNGRKRNPEAGVATTDLYGNCTLRHSGTSAAAPEAAGVFALALEANLGLTWRDMQHLTVLTSKRNQLHDEVHQWRRNGVGLEFNHLFGYGVLDAGAMVKMAKDWKTVPERFHCVGGSVQDPEKIPSTGKLVLTLTTDACEGKENFVRYLEHVQAVITVNATRRGDLNINMTSPMGTKSILLSRRPRDDDSKVGFDKWPFMTTHTWGEDARGTWTLELGFVGSAPQKGVLKEWTLMLHGTQSAPYIDQVVRDYQSKLAMSKKEELEEELDEAVERSLKSILNKN

SEQ ID NO: 10122 - protein, 755 aa, Homo sapiens
MRPAPIALWLRLVLALALVRPRAVGWAPVRAPIYVSSWAVQVSQGNREVERLARKFGFVNLGPIFPDGQYFHLRHRGVVQQSLTPHWGHRLHLKKNPKVQWFQQQTLQRRVKRSVVVPTDPWFSKQWYMNSEAQPDLSILQAWSQGLSGQGIVVSVLDDGIEKDHPDLWANYDPLASYDFNDYDPDPQPRYTPSKENRHGTRCAGEVAAMANNGFCGVGVAFNARIGGVRMLDGTITDVIEAQSLSLQPQHIHIYSASWGPEDDGRTVDGPGILTREAFRRGVTKGRGGLGTLFIWASGNGGLHYDNCNCDGYTNSIHTLSVGSTTQQGRVPWYSEACASTLTTTYSSGVATDPQIVTTDLHHGCTDQHTGTSASAPLAAGMIALALEANPFLTWRDMQHLVVRASKPAHLQAEDWRTNGVGRQVSHHYGYGLLDAGLLVDTARTWLPTQPQRKCAVRVQSRPTPILPLIYIRENVSACAGLHNSIRSLEHVQAQLTLSYSRRGDLEISLTSPMGTRSTLVAIRPLDVSTEGYNNWVFMSTHFWDENPQGVWTLGLENKGYYFNTGTLYRYTLLLYGTAEDMTARPTGPQVTSSACVQRDTEGLCQACDGPAYILGQLCLAYCPPRFFNHTRLVTAGPGHTAAPALRVCSSCHASCYTCRGGSPRDCTSCPPSSTLDQQQGSCMGPTTPDSRPRLRAAACPHHRCPASAMVLSLLAVTLGGPVLCGMSMDLPLYAWLSRARATPTKPQVWLPAGT

SEQ ID NO: 10123 - protein, 230 aa, Homo sapiens
MRPAPIALWLRLVLALALVRPRAVGWAPVRAPIYVSSWAVQVSQGNREVERLARKFGFVNLGPIFPDGQYFHLRHRGVVQQSLTPHWGHRLHLKKNPKVQWFQQQTLQRRVKRSVVVPTDPWFSKQWYMNSEAQPDLSILQAWSQGLSGQGIVVSVLDDGIEKDHPDLWANYDPLASYDFNDYDPDPQPRYTPSKENRRTDAGRYHHRCHRGPVAEPAAAAHPHLQRQLG

SEQ ID NO: 10124 - protein, 318 aa, Homo sapiens
  SITE 1: note = misc_feature - Xaa can be any naturally occurring amino acid
XPIALWLRLVLALALVRPRAVGWAPVRAPIYVSSWAVQVSQGNREVERLARKFGFVNLGPIFPDGQYFHLRHRGVVQQSLTPHWGHRLHLKKNPKVQWFQQQTLQRRVKRSVVVPTDPWFSKQWYMNSEAQPDLSILQAWSQGLSGQGIVVSVLDDGIEKDHPDLWANYDPLASYDFNDYDPDPQPRYTPSKENRRTDAGRYHHRCHRGPVAEPAAAAHPHLQRQLGSRGRRPHGGRPRHPHPRGLPAWCDQASTRFPWAAPPSRAACPGTAKPAPPPSPPPTAAAWPPTPRSSPRTCITGAQTSTRAPRPQPHWRPA

SEQ ID NO: 10125 - protein, 101 aa, Homo sapiens
CQPCHRFCATCAGAGADGCINCTEGYFMEDGRCVQSCSISYYFDHSSENGYKSCKKCDISCLTCNGPGFKNCTSCPSGYLLDLGMCQMGAICKDVSLFRGA

SEQ ID NO: 10126 - protein, 690 aa, Homo sapiens
MGWGSRCCCPGRLDLLCVLALLGGCLLPVCRTRVYTNHWAVKIAGGFPEANRIASKYGFINIGQIGALKDYYHFYHSRTIKRSVISSRGTHSFISMEPKVEWIQQQVVKKRTKRDYDFSRAQSTYFNDPKWPSMWYMHCSDNTHPCQSDMNIEGAWKRGYTGKNIVVTILDDGIERTHPDLMQNYDALASCDVNGNDLDPMPRYDASNENKHGTRCAGEVAAAANNSHCTVGIAFNAKIGGVRMLDGDVTDMVEAKSVSFNPQHVHIYSASWGPDDDGKTVDGPAPLTRQAFENGVRMGRRGLGSVFVWASGNGGRSKDHCSCDGYTNSIYTISISSTAESGKKPWYLEECSSTLATTYSSGESYDKKIITTDLRQRCTDNHTGTSASAPMAAGIIALALEANPFLTWRDVQHVIVRTSRAGHLNANDWKTNAAGFKVSHLYGFGLMDAEAMVMEAEKWTTVPRQHVCVESTDRQIKTIRPNSAVRSIYKASGCSDNPNRHVNYLEHVVVRITITHPRRGDLAIYLTSPSGTRSQLLANRLFDHSMEGFKNWEFMTIHCWGERAAGDWVLEVYDTPSQLRNFKTPGKLKEWSLVLYGTSVQPYSPTNEFPKVERFRYSRVEDPTDDYGTEDYAGELASSGTQAKKRQLMHHPTTWENRMEWNGMKWNGMKWNGMEWNGMEWNRIESNRIE

SEQ ID NO: 10127 - protein, 913 aa, Homo sapiens
MGWGSRCCCPGRLDLLCVLALLGGCLLPVCRTRVYTNHWAVKIAGGFPEANRIASKYGFINIGQIGALKDYYHFYHSRTIKRSVISSRGTHSFISMEPKVEWIQQQVVKKRTKRDYDFSRAQSTYFNDPKWPSMWYMHCSDNTHPCQSDMNIEGAWKRGYTGKNIVVTILDDGIERTHPDLMQNYDALASCDVNGNDLDPMPRYDASNENKHGTRCAGEVAAAANNSHCTVGIAFNAKIGGVRMLDGDVTDMVEAKSVSFNPQHVHIYSASWGPDDDGKTVDGPAPLTRQAFENGVRMGRRGLGSVFVWASGNGGRSKDHCSCDGYTNSIYTISISSTAESGKKPWYLEECSSTLATTYSSGESYDKKIITTDLRQRCTDNHTGTSASAPMAAGIIALALEANPFLTWRDVQHVIVRTSRAGHLNANDWKTNAAGFKVSHLYGFGLMDAEAMVMEAEKWTTVPRQHVCVESTDRQIKTIRPNSAVRSIYKASGCSDNPNRHVNYLEHVVVRITITHPRRGDLAIYLTSPSGTRSQLLANRLFDHSMEGFKNWEFMTIHCWGERAAGDWVLEVYDTPSQLRNFKTPGKLKEWSLVLYGTSVQPYSPTNEFPKVERFRYSRVEDPTDDYGTEDYAGPCDPECSEVGCDGPGPDHCNDCLHYYYKLKNNTRICVSSCPPGHYHADKKRCRKCAPNCESCFGSHGDQCMSCKYGYFLNEETNSCVTHCPDGSYQDTKKNLCRKCSENCKTCTEFHNCTECRDGLSLQGSRCSVSCEDGRYFNGQDCQPCHRFCATCAGAGADGCINCTEGYFMEDGRCVQSCSISYYFDHSSENGYKSCKKCDISCLTCNGPGFKNCTSCPSGYLLDLGMCQMGAICKDATEESWAEGGFCMLVKKNNLCQRKVLQQLCCKTCTFQG

SEQ ID NO: 10128 - protein, 1860 aa, Homo sapiens
MGWGSRCCCPGRLDLLCVLALLGGCLLPVCRTRVYTNHWAVKIAGGFPEANRIASKYGFINIGQIGALKDYYHFYHSRTIKRSVISSRGTHSFISMEPKVEWIQQQVVKKRTKRDYDFSRAQSTYFNDPKWPSMWYMHCSDNTHPCQSDMNIEGAWKRGYTGKNIVVTILDDGIERTHPDLMQNYDALASCDVNGNDLDPMPRYDASNENKHGTRCAGEVAAAANNSHCTVGIAFNAKIGGVRMLDGDVTDMVEAKSVSFNPQHVHIYSASWGPDDDGKTVDGPAPLTRQAFENGVRMGRRGLGSVFVWASGNGGRSKDHCSCDGYTNSIYTISISSTAESGKKPWYLEECSSTLATTYSSGESYDKKIITTDLRQRCTDNHTGTSASAPMAAGIIALALEANPFLTWRDVQHVIVRTSRAGHLNANDWKTNAAGFKVSHLYGFGLMDAEAMVMEAEKWTTVPRQHVCVESTDRQIKTIRPNSAVRSIYKASGCSDNPNRHVNYLEHVVVRITITHPRRGDLAIYLTSPSGTRSQLLANRLFDHSMEGFKNWEFMTIHCWGERAAGDWVLEVYDTPSQLRNFKTPGKLKEWSLVLYGTSVQPYSPTNEFPKVERFRYSRVEDPTDDYGTEDYAGPCDPECSEVGCDGPGPDHCNDCLHYYYKLKNNTRICVSSCPPGHYHADKKRCRKCAPNCESCFGSHGDQCMSCKYGYFLNEETNSCVTHCPDGSYQDTKKNLCRKCSENCKTCTEFHNCTECRDGLSLQGSRCSVSCEDGRYFNGQDCQPCHRFCATCAGAGADGCINCTEGYFMEDGRCVQSCSISYYFDHSSENGYKSCKKCDISCLTCNGPGFKNCTSCPSGYLLDLGMCQMGAICKDGEYVDEHGHCQTCEASCAKCQGPTQEDCTTCPMTRIFDDGRCVSNCPSWKFEFENQCHPCHHTCQRCQGSGPTHCTSCGADNYGREHFLYQGECGDSCPEGHYATEGNTCLPCPDNCELCHSVHVCTRCMKGYFIAPTNHTCQKLECGQGEVQDPDYEECVPCEEGCLGCSLDDPGTCTSCAMGYYRFDHHCYKTCPEKTYSEEVECKACDSNCGSCDQNGCYWCEEGFFLLGGSCVRKCGPGFYGDQEMGECESCHRACETCTGPGHDECSSCQEGLQLLRGMCVHATKTQEEGKFWNDILRKLQPCHSSCKTCNGSATLCTSCPKGAYLLAQACVSSCPQGTWPSVRSGSCENCTEACAICSGADLCKKCQMQPGHPLFLHEGRCYSKCPEGSYAEDGICERCSSPCRTCEGNATNCHSCEGGHVLHHGVCQENCPERHVAVKGVCKHCPEMCQDCIHEKTCKECTPEFFLHDDMCHQSCPRGFYADSRHCVPCHKDCLECSGPKADDCELCLESSWVLYDGLCLEECPAGTYYEKETKECRDCHKSCLTCSSSGTCTTCQKGLIMNPRGSCMANEKCSPSEYWDEDAPGCKPCHVKCFHCMGPAEDQCQTCPMNSLLLNTTCVKDCPEGYYADEDSNRCAHCHSSCRTCEGRHSRQCHSCRPGWFQLGKECLLQCREGYYADNSTGRCERCNRSCKGCQGPRPTDCLSCDRFFFLLRSKGECHRSCPDHYYVEQSTQTCERCHPTCDQCKGKGALNCLSCVWSYHLMGGICTSDCLVGEYRVGEGEKFNCEKCHESCMECKGPGAKNCTLCPANLVLHMDDSHCLHCCNTSDPPSAQECCDCQDTTDECILRTSKVRPATEHFKTALFITSSMMLVLLLGAAVVVWKKSRGRVQPAAKAGYEKLADPNKSYSSYKSSYRESTSFEEDQVIEYRDRDYDEDDDDDIVYMGQDGTVYRKFKYGLLDDDDIDELEYDDESYSYYQ

SEQ ID NO: 10129 - protein, 1560 aa, Homo sapiens
NSIYTISISSTAESGKKPWYLEECSSTLATTYSSGESYDKKIITTDLRQRCTDNHTGTSASAPMAAGIIALALEANPFLTWRDVQHVIVRTSRAGHLNANDWKTNAAGFKVSHLYGFGLMDAEAMVMEAEKWTTVPRQHVCVESTDRQIKTIRPNSAVRSIYKASGCSDNPNRHVNYLEHVVVRITITHPRRGDLAIYLTSPSGTRSQLLANRLFDHSMEGFKNWEFMTIHCWGERAAGDWVLEVYDTPSQLRNFKTPGKLKEWSLVLYGTSVQPYSPTNEFPKVERFRYSRVEDPTDDYGTEDYAGPCDPECSEVGCDGPGPDHCNDCLHYYYKLKNNTRICVSSCPPGHYHADKKRCRKCAPNCESCFGSHGDQCMSCKYGYFLNEETNSCVTHCPDGSYQDTKKNLCRKCSENCKTCTEFHNCTECRDGLSLQGSRCSVSCEDGRYFNGQDCQPCHRFCATCAGAGADGCINCTEGYFMEDGRCVQSCSISYYFDHSSENGYKSCKKCDISCLTCNGPGFKNCTSCPSGYLLDLGMCQMGAICKDGEYVDEHGHCQTCEASCAKCQGPTQEDCTTCPMTRIFDDGRCVSNCPSWKFEFENQCHPCHHTCQRCQGSGPTHCTSCGADNYGREHFLYQGECGDSCPEGHYATEGNTCLPCPDNCELCHSVHVCTRCMKGYFIAPTNHTCQKLECGQGEVQDPDYEECVPCEEGCLGCSLDDPGTCTSCAMGYYRFDHHCYKTCPEKTYSEEVECKACDSNCGSCDQNGCYWCEEGFFLLGGSCVRKCGPGFYGDQEMGECESCHRACETCTGPGHDECSSCQEGLQLLRGMCVHATKTQEEGKFWNEAVSTANLSVVKSLLQERRRWKVQIKRDILRKLQPCHSSCKTCNGSATLCTSCPKGAYLLAQACVSSCPQGTWPSVRSGSCENCTEACAICSGADLCKKCQMQPGHPLFLHEGRCYSKCPEGSYAEDGICERCSSPCRTCEGNATNCHSCEGGHVLHHGVCQENCPERHVAVKGVCKHCPEMCQDCIHEKTCKECTPEFFLHDDMCHQSCPRGFYADSRHCVPCHKDCLECSGPKADDCELCLESSWVLYDGLCLEECPAGTYYEKETKECRDCHKSCLTCSSSGTCTTCQKGLIMNPRGSCMANEKCSPSEYWDEDAPGCKPCHVKCFHCMGPAEDQCQTCPMNSLLLNTTCVKDCPEGYYADEDSNRCAHCHSSCRTCEGRHSRQCHSCRPGWFQLGKECLLQCREGYYADNSTGRCERCNRSCKGCQGPRPTDCLSCDRFFFLLRSKGECHRSCPDHYYVEQSTQTCERCHPTCDQCKGKGALNCLSCVWSYHLMGGICTSDCLVGEYRVGEGEKFNCEKCHESCMECKGPGAKNCTLCPANLVLHMDDSHCLHCCNTSDPPSAQECCDCQDTTDECILRTSKVRPATEHFKTALFITSSMMLVLLLGAAVVVWKKSRGRVQPAAKAGYEKLADPNKSYSSYKSSYRESTSFEEDQVIEYRDRDYDEDDDDDIVYMGQDGTVYRKFKYGLLDDDDIDELEYDDESYSYYQ

SEQ ID NO: 10130 - protein, 692 aa, Homo sapiens
MGTVSSRRSWWPLPLLLLLLLLLGPAGARAQEDEDGDYEELVLALRSEEDGLAEAPEHGTTATFHRCAKDPWRLPGTYVVVLKEETHLSQSERTARRLQAQAARRGYLTKILHVFHGLLPGFLVKMSGDLLELALKLPHVDYIEEDSSVFAQSIPWNLERITPPRYRADEYQPPDGGSLVEVYLLDTSIQSDHREIEGRVMVTDFENVPEEDGTRFHRQASKCDSHGTHLAGVVSGRDAGVAKGASMRSLRVLNCQGKGTVSGTLIGLEFIRKSQLVQPVGPLVVLLPLAGGYSRVLNAACQRLARAGVVLVTAAGNFRDDACLYSPASAPEVITVGATNAQDQPVTLGTLGTNFGRCVDLFAPGEDIIGASSDCSTCFVSQSGTSQAAAHVAGIAAMMLSAEPELTLAELRQRLIHFSAKDVINEAWFPEDQRVLTPNLVAALPPSTHGAGWQLFCRTVWSAHSGPTRMATAVARCAPDEELLSCSSFSRSGKRRGERMEAQGGKLVCRAHNAFGGEGVYAIARCCLLPQANCSVHTAPPAEASMGTRVHCHQQGHVLTGCSSHWEVEDLGTHKPPVLRPRGQPNQCVGHREASIHASCCHAPGLECKVKEHGIPAPQEQVTVACEEGWTLTGCSALPGTSHVLGAYAVDNTCVVRSRDVSTTGSTSEGAVTAVAICCRSRHLAQASQELQ

SEQ ID NO: 10131 - protein, 293 aa, Homo sapiens
MGRVVAELVSSLLGLWLLLCSCGCPEGAELRAPPDKIAIIGAGIGGTSAAYYLRQKFGKDVKIDLFEREEVGGRLATMMVQGQEYEAGGSVIHPLNLHMKRFVKDLGLSAVQASGGLLGIYNGETLVFEESNWFIINVIKLVWRYGFQSLRMHMWVEDVLDKFMRIYRYQSHDYAFSSVEKLLHALGGDDFLGMLNRTLLETLQKAGFSEKFLNEMIAPVMRVNYGQSTDINAFVGAVSLSCSDSGLWAVEGGNKLVCSGLLQASKSNLISGSVMYIEEKTKTKYTVLGLCPL

SEQ ID NO: 10132 - protein, 505 aa, Homo sapiens
MGRVVAELVSSLLGLWLLLCSCGCPEGAELRAPPDKIAIIGAGIGGTSAAYYLRQKFGKDVKIDLFEREEVGGRLATMMVQGQEYEAGGSVIHPLNLHMKRFVKDLGLSAVQASGGLLGIYNGETLVFEESNWFIINVIKLVWRYGFQSLRMHMWVEDVLDKFMRIYRYQSHDYAFSSVEKLLHALGGDDFLGMLNRTLLETLQKAGFSEKFLNEMIAPVMRVNYGQSTDINAFVGAVSLSCSDSGLWAVEGGNKLVCSGLLQASKSNLISGSVMYIEEKTKTKYTGNPTKMYEVVYQIGTETRSDFYDIVLVATPLNRKMSNITFLNFDPPIEEFHQYYQHIVTTLVKGELNTSIFSSRPIDKFGLNTVLTTDNSDLFINSIGIVPSVREKEDPEPSTDGTYVWKIFSQETLTKAQILKLFLSYDYAVKKPWLAYPHYKPPEKCPSIILHDRLYYLNGIECAASAMEMSAIAAHNAALLAYHRWNGHTDMIDQDGLYEKLKTEL

SEQ ID NO: 10133 - protein, 130 aa, Homo sapiens
MMVQGQEYEAGGSVIHPLNLHMKRFVKDLGLSAVQASGGLLGIYNGETLVFEESNWFIINVIKLVWRYGFQSLRMHMWVEDVLDKFMRIYRYQSHDYAFSSVEKLLHALGGDDFLGMLNRTLLETLQKAG

SEQ ID NO: 10134 - protein, 154 aa, Homo sapiens
MMVQGQEYEAGGSVIHPLNLHMKRFVKDLGLSAVQASGGLLGIYNGETLVFEESNWFIINVIKLVWRYGFQSLRMHMWVEDVLDKFMRIYRYQSHDYAFSSVEKLLHALGGDDFLGMLNRTLLETLQKAGFSEKFLNEMIAPVMRVNYGQSTDI

SEQ ID NO: 10135 - protein, 209 aa, Homo sapiens
MMVQGQEYEAGGSVIHPLNLHMKRFVKDLGLSAVQASGGLLGIYNGETLVFEESNWFIINVIKLVWRYGFQSLRMHMWVEDVLDKFMRIYRYQSHDYAFSSVEKLLHALGGDDFLGMLNRTLLETLQKAGFSEKFLNEMIAPVMRVNYGQSTDINAFVGAVSLSCSDSGLWAVEGGNKLVCSGLLQASKSNLISGSVMYIEEKTKTKYT

SEQ ID NO: 10136 - protein, 111 aa, Homo sapiens
MARAAPLLAALTALLAAAAAGGDAPPGKIAVVGAGIGGSAVAHFLQQHFGPRVQIDVYEKGTVGGRLATISVNKQHYESGAASFHSLSLHMQDFVKLLDGATETREGKELA

SEQ ID NO: 10137 - protein, 494 aa, Homo sapiens
MARAAPLLAALTALLAAAAAGGDAPPGKIAVVGAGIGGSAVAHFLQQHFGPRVQIDVYEKGTVGGRLATISVNKQHYESGAASFHSLSLHMQDFVKLLGLRHRREVVGRSAIFGGEHFMLEETDWYLLNLFRLWWHYGISFLRLQMWVEEVMEKFMRIYKYQAHGYAFSGVEELLYSLGESTFVNMTQHSVAESLLQVGVTQRFIDDVVSAVLRASYGQSAAMPAFAGAMSLAGAQGSLWSVEGGNKLVCSGLLKLTKANVIHATVTSVTLHSTEGKALYQVAYENEVGNSSDFYDIVVIATPLHLDNSSSNLTFAGFHPPIDDVQGSFQPTVVSLVHGYLNSSYFGFPDPKLFPFANILTTDFPSFFCTLDNICPVNISASFRRKQPQEAAVWRVQSPKPLFRTQLKTLFRSYYSVQTAEWQAHPLYGSRPTLPRFALHDQLFYLNALEWAASSVEVMAVAAKNVALLAYNRWYQDLDKIDQKDLMHKVKTEL

SEQ ID NO: 10138 - protein, 82 aa, Homo sapiens
MARAAPLLAALTALLAAAAAGGDAPPGKIGAGRTRGGWGWDWGLCCGPFSPAALWTSGADRRVREGNRGWPLGHHLSQQAAL

SEQ ID NO: 10139 - protein, 82 aa, Homo sapiens; identical to SEQ ID NO: 10138

SEQ ID NO: 10140 - protein, 404 aa, Homo sapiens
MQDFVKLLGLRHRREVVGRSAIFGGEHFMLEETDWYLLNLFRLWWHYGISFLRLQMWVEEVMEKFMRIYKYQAHGYAFSGVEELLYSLGESTFVNMTQHSVAESLLQVGVTQRFIDDVVSAVLRASYGQSAAMPAFAGAMSLAGAQGSLWSVEGGNKLVCSGLLKLTKANVIHATVTSVTLHSTEGKALYQVAYENEVGNSSDFYDIVVIATPLHLDNSSSNLTFAGFHPPIDDVQGSFQPTVVSLVHGYLNSSYFGFPDPKLFPFANILTTDFPSFFCTLDNICPVNISASFRRKQPQEAAVWRVQSPKPLFRTQLKTLFRSYYSVQTAEWQAHPLYGSRPTLPRFALHDQLFYLNALEWAASSVEVMAVAAKNVALLAYNRWYQDLDKIDQKDLMHKVKTEL

SEQ ID NO: 10141 - protein, 933 aa, Homo sapiens
MAASRLDFGEVETFLDRHPELFEDYLMRKGKQEMVEKWLQRHSQGQGALGPRPSLAGTSSLAHSTCRGGSSVGGGTGPNGSAHSQPLPGGGDCGGVPLSPSWAGGSRGDGNLQRRASQKELRKSFARSKAIHVNRTYDEQVTSRAQEPLSSVRRRALLRKASSLPPTTAHILSALLESRVNLPRYPPTAIDYKCHLKKHNERQFFLELVKDISNDLDLTSLSYKILIFVCLMVDADRCSLFLVEGAAAGKKTLVSKFFDVHAGTPLLPCSSTENSNEVQVPWGKGIIGYVGEHGETVNIPDAYQDRRFNDEIDKLTGYKTKSLLCMPIRSSDGEIIGVAQAINKIPEGAPFTEDDEKVMQMYLPFCGIAISNAQLFAASRKEYERSRALLEVVNDLFEEQTDLEKIVKKIMHRAQTLLKCERCSVLLLEDIESPVVKFTKSFELMSPKCSADAENSFKESMEKSSYSDWLINNSIAELVASTGLPVNISDAYQDPRFDAEADQISGFHIRSVLCVPIWNSNHQIIGVAQVLNRLDGKPFDDADQRLFEAFVIFCGLGINNTIMYDQVKKSWAKQSVALDVLSYHATCSKAEVDKFKAANIPLVSELAIDDIHFDDFSLDVDAMITAALRMFMELGMVQKFKIDYETLCRWLLTVRKNYRMVLYHNWRHAFNVCQLMFAMLTTAGFQDILTEVEILAVIVGCLCHDLDHRGTNNAFQAKSGSALAQLYGTSATLEHHHFNHAVMILQSEGHNIFANLSSKEYSDLMQLLKQSILATDLTLYFERRTEFFELVSKGEYDWNIKNHRDIFRSMLMTACDLGAVTKPWEISRQVAELVTSEFFEQGDRERLELKLTPSAIFDRNRKDELPRLQLEWIDSICMPLYQALVKVNVKLKPMLDSVATNRSKWEELHQKRLLASTASSSPASVMVAKEDRN

SEQ ID NO: 10142 - protein, 575 aa, Homo sapiens
MQMYLPFCGIAISNAQLFAASRKEYERSRALLEVVNDLFEEQTDLEKIVKKIMHRAQTLLKCERCSVLLLEDIESPVVKFTKSFELMSPKCSADAENSFKESMEKSSYSDWLINNSIAELVASTGLPVNISDAYQDPRFDAEADQISGFHIRSVLCVPIWNSNHQIIGVAQVLNRLDGKPFDDADQRLFEAFVIFCGLGINNTIMYDQVKKSWAKQSVALDVLSYHATCSKAEVDKFKAANIPLVSELAIDDIHFDDFSLDVDAMITAALRMFMELGMVQKFKIDYETLCRWLLTVRKNYRMVLYHNWRHAFNVCQLMFAMLTTAGFQDILTEVEILAVIVGCLCHDLDHRGTNNAFQAKSGSALAQLYGTSATLEHHHFNHAVMILQSEGHNIFANLSSKEYSDLMQLLKQSILATDLTLYFERRTEFFELVSKGEYDWNIKNHRDIFRSMLMTACDLGAVTKPWEISRQVAELVTSEFFEQGDRERLELKLTPSAIFDRNRKDELPRLQLEWIDSICMPLYQALVKVNVKLKPMLDSVATNRSKWEELHQKRLLASTASSSPASVMVAKEDRN

SEQ ID NO: 10143 - protein, 36 aa, Homo sapiens
MQMYLPFCGIAISNAQLFAASRKEYERSRSYVRDVY

SEQ ID NO: 10144 - protein, 489 aa, Homo sapiens
MSPKCSADAENSFKESMEKSSYSDWLINNSIAELVASTGLPVNISDAYQDPRFDAEADQISGFHIRSVLCVPIWNSNHQIIGVAQVLNRLDGKPFDDADQRLFEAFVIFCGLGINNTIMYDQVKKSWAKQSVALDVLSYHATCSKAEVDKFKAANIPLVSELAIDDIHFDDFSLDVDAMITAALRMFMELGMVQKFKIDYETLCRWLLTVRKNYRMVLYHNWRHAFNVCQLMFAMLTTAGFQDILTEVEILAVIVGCLCHDLDHRGTNNAFQAKSGSALAQLYGTSATLEHHHFNHAVMILQSEGHNIFANLSSKEYSDLMQLLKQSILATDLTLYFERRTEFFELVSKGEYDWNIKNHRDIFRSMLMTACDLGAVTKPWEISRQVAELVTSEFFEQGDRERLELKLTPSAIFDRNRKDELPRLQLEWIDSICMPLYQALVKVNVKLKPMLDSVATNRSKWEELHQKRLLASTASSSPASVMVAKEDRN

SEQ ID NO: 10145 - protein, 437 aa, Homo sapiens
  SITE 1: note = misc_feature - Xaa can be any naturally occurring amino acid
XLPFCGIAISNAQLFAASRKEYERSRALLEVVNDLFEEQTDLEKIVKKIMHRAQTLLKCERCSVLLLEDIESPVVKFTKSFELMSPKCSADAENSFKESMEKSSYSDWLINNSIAELVASTGLPVNISDAYQDPRFDAEADQISGFHIRSVLCVPIWNSNHQIIGVAQVLNRLDGKPFDDADQRLFEVLSYHATCSKAEVDKFKAANIPLVSELAIDDIHFDDFSLDVDAMITAALRMFMELGMVQKFKIDYETLCRWLLTVRKNYRMVLYHNWRHAFNVCQLMFAMLTTAGFQDILTEVEILAVIVGCLCHDLDHRGTNNAFQAKSGSALAQLYGTSATLEHHHFNHAVMILQSEGHNIFANLSSKEYSDLMQLLKQSILATDLTLYFERRTEFFELVSKGEYDWNIKNHRDIFRSMLMTACDLGAVTKPWEISRQ

SEQ ID NO: 10146 - protein, 136 aa, Homo sapiens
  SITE 1: note = misc_feature - Xaa can be any naturally occurring amino acid
XVLPLVEERKISMLMTACDLGAVTKPWEISRQVAELVTSEFFEQGDRERLELKLTPSAIFDRNRKDELPRLQLEWIDSICMPLYQALVKVNVKLKPMLDSVATNRSKWEELHQKRLLASTASSSPASVMVAKEDRN

SEQ ID NO: 10147 - protein, 327 aa, Homo sapiens
FPTASSVPEHKGVGFHAWDVRNLRKLRGQVPAGSLPPTDPSLHRWFLAPLPSPEVIGVAELVNKINGPWFSKFDEDLATAFSIYCGISIAHSLLYKKVNEAQYRSHLANEMMMYHMKVSDDEYTKLLHDGIQPVAAIDSNFASFTYTPRSLPEDDTSMAILSMLQDMNFINNYKIDCPTLARFCLMVKKGYRDPPYHNWMHAFSVSHFCYLLYKNLELTNYLEDIEIFALFISCMCHDLDHRGTNNSFQVASKSVLAALYSSEGSVMERHHFAQAIAILNTHGCNIFDHFSRKDYQRMLDLMRDIILATDLAHHLRIFKDLQKMAEG

SEQ ID NO: 10148 - protein, 38 aa, Homo sapiens
MGQACGHSILCRSQQYPAARPAEPQPGPPCKGARTPRE

SEQ ID NO: 10149 - protein, 941 aa, Homo sapiens
MGQACGHSILCRSQQYPAARPAEPRGQQVFLKPDEPPPPPQPCADSLQDALLSLGSVIDISGLQRAVKEALSAVLPRVETVYTYLLDGESQLVCEDPPHELPQEGKVREAIISQKRLGCNGLGFSDLPGKPLARLVAPLAPDTQVLVMPLADKEAGAVAAVILVHCGQLSDNEEWSLQAVEKHTLVALRRVQVLQQRGPREAPRAVQNPPEGTAEDQKGGAAYTDRDRKILQLCGELYDLDASSLQLKVLQYLQQETRASRCCLLLVSEDNLQLSCKVIGDKVLGEEVSFPLTGCLGQVVEDKKSIQLKDLTSEDVQQLQSMLGCELQAMLCVPVISRATDQVVALACAFNKLEGDLFTDEDEHVIQHCFHYTSTVLTSTLAFQKEQKLKCECQALLQVAKNLFTHLDDVSVLLQEIITEARNLSNAEICSVFLLDQNELVAKVFDGGVVDDESYEIRIPADQGIAGHVATTGQILNIPDAYAHPLFYRGVDDSTGFRTRNILCFPIKNENQEVIGVAELVNKINGPWFSKFDEDLATAFSIYCGISIAHSLLYKKVNEAQYRSHLANEMMMYHMKVSDDEYTKLLHDGIQPVAAIDSNFASFTYTPRSLPEDDTSMAILSMLQDMNFINNYKIDCPTLARFCLMVKKGYRDPPYHNWMHAFSVSHFCYLLYKNLELTNYLEDIEIFALFISCMCHDLDHRGTNNSFQVASKSVLAALYSSEGSVMERHHFAQAIAILNTHGCNIFDHFSRKDYQRMLDLMRDIILATDLAHHLRIFKDLQKMAEVGYDRNNKQHHRLLLCLLMTSCDLSDQTKGWKTTRKIAELIYKEFFSQGDLEKAMGNRPMEMMDREKAYIPELQISFMEHIAMPIYKLLQDLFPKAAELYERVASNREHWTKVSHKFTIRGLPSNNSLDFLDEEYEVPDLDGTRAPINGCCSLDAE

SEQ ID NO: 10150 - protein, 826 aa, Homo sapiens
MGQACGHSILCRSQQYPAARPAEPRGQQVFLKPDEPPPPPQPCADSLQVHCGQLSDNEEWSLQAVEKHTLVALRRVQVLQQRGPREAPRAVQNPPEGTAEDQKGGAAYTDRDRKILQLCGELYDLDASSLQLKVLQYLQQETRASRCCLLLVSEDNLQLSCKVIGDKVLGEEVSFPLTGCLGQVVEDKKSIQLKDLTSEDVQQLQSMLGCELQAMLCVPVISRATDQVVALACAFNKLEGDLFTDEDEHVIQHCFHYTSTVLTSTLAFQKEQKLKCECQALLQVAKNLFTHLDDVSVLLQEIITEARNLSNAEICSVFLLDQNELVAKVFDGGVVDDESYEIRIPADQGIAGHVATTGQILNIPDAYAHPLFYRGVDDSTGFRTRNILCFPIKNENQEVIGVAELVNKINGPWFSKFDEDLATAFSIYCGISIAHSLLYKKVNEAQYRSHLANEMMMYHMKVSDDEYTKLLHDGIQPVAAIDSNFASFTYTPRSLPEDDTSMAILSMLQDMNFINNYKIDCPTLARFCLMVKKGYRDPPYHNWMHAFSVSHFCYLLYKNLELTNYLEDIEIFALFISCMCHDLDHRGTNNSFQVASKSVLAALYSSEGSVMERHHFAQAIAILNTHGCNIFDHFSRKDYQRMLDLMRDIILATDLAHHLRIFKDLQKMAEVGYDRNNKQHHRLLLCLLMTSCDLSDQTKGWKTTRKIAELIYKEFFSQGDLEKAMGNRPMEMMDREKAYIPELQISFMEHIAMPIYKLLQDLFPKAAELYERVASNREHWTKVSHKFTIRGLPSNNSLDFLDEEYEVPDLDGTRAPINGCCSLDAE

SEQ ID NO: 10151 - protein, 39 aa, Homo sapiens
MGQACGHSILCRSQQYPAARPAEPSLQLPEHCFHTCDLI

SEQ ID NO: 10152 - protein, 932 aa, Homo sapiens
MKKQRIQEGKSLAHRRGQQVFLKPDEPPPPPQPCADSLQDALLSLGSVIDISGLQRAVKEALSAVLPRVETVYTYLLDGESQLVCEDPPHELPQEGKVREAIISQKRLGCNGLGFSDLPGKPLARLVAPLAPDTQVLVMPLADKEAGAVAAVILVHCGQLSDNEEWSLQAVEKHTLVALRRVQVLQQRGPREAPRAVQNPPEGTAEDQKGGAAYTDRDRKILQLCGELYDLDASSLQLKVLQYLQQETRASRCCLLLVSEDNLQLSCKVIGDKVLGEEVSFPLTGCLGQVVEDKKSIQLKDLTSEDVQQLQSMLGCELQAMLCVPVISRATDQVVALACAFNKLEGDLFTDEDEHVIQHCFHYTSTVLTSTLAFQKEQKLKCECQALLQVAKNLFTHLDDVSVLLQEIITEARNLSNAEICSVFLLDQNELVAKVFDGGVVDDESYEIRIPADQGIAGHVATTGQILNIPDAYAHPLFYRGVDDSTGFRTRNILCFPIKNENQEVIGVAELVNKINGPWFSKFDEDLATAFSIYCGISIAHSLLYKKVNEAQYRSHLANEMMMYHMKVSDDEYTKLLHDGIQPVAAIDSNFASFTYTPRSLPEDDTSMAILSMLQDMNFINNYKIDCPTLARFCLMVKKGYRDPPYHNWMHAFSVSHFCYLLYKNLELTNYLEDIEIFALFISCMCHDLDHRGTNNSFQVASKSVLAALYSSEGSVMERHHFAQAIAILNTHGCNIFDHFSRKDYQRMLDLMRDIILATDLAHHLRIFKDLQKMAEVGYDRNNKQHHRLLLCLLMTSCDLSDQTKGWKTTRKIAELIYKEFFSQGDLEKAMGNRPMEMMDREKAYIPELQISFMEHIAMPIYKLLQDLFPKAAELYERVASNREHWTKVSHKFTIRGLPSNNSLDFLDEEYEVPDLDGTRAPINGCCSLDAE

SEQ ID NO: 10153 - protein, 198 aa, Homo sapiens
MLQDMNFINNYKIDCPTLARFCLMVKKGYRDPPYHNWMHAFSVSHFCYLLYKNLELTNYLEDIEIFALFISCMCHDLDHRGTNNSFQVASKSVLAALYSSEGSVMERHHFAQAIAILNTHGCNIFDHFSRKDYQRMLDLMRDIILATDLAHHLRIFKDLQKMAEVGYDRNNKQHHRLLLCLLMTSCDLSDQTKGWKTT

SEQ ID NO: 10154 - protein, 178 aa, Homo sapiens
MMMYHMKVSDDEYTKLLHDGIQPVAAIDSNFASFTYTPRSLPEDDTSMAILSMLQDMNFINNYKIDCPTLARFCLMVKKGYRDPPYHNWMHAFSVSHFCYLLYKNLELTNYLEDIEIFALFISCMCHDLDHRGTNNSFQVASKSVLAALYSSEGSVMERHHFAQAIAILNTHGCNIFD

SEQ ID NO: 10155 - protein, 87 aa, Homo sapiens
MRRQPAASLDPLAKEPGPPGSRDDRLEDALLSLGSVIDISGLQRAVKEALSAVLPRVETVYTYLLDGESQLVCEDPPHELPQEGKVR

SEQ ID NO: 10156 - protein, 144 aa, Homo sapiens
MRRQPAASLDPLAKEPGPPGSRDDRLEDALLSLGSVIDISGLQRAVKEALSAVLPRVETVYTYLLDGESQLVCEDPPHELPQEGKVREAIISQKRLGCNGLGFSDLPGKPLARLVAPLAPDTQVLVMPLADKEAGAVAAVILVH

SEQ ID NO: 10157 - protein, 920 aa, Homo sapiens
MRRQPAASLDPLAKEPGPPGSRDDRLEDALLSLGSVIDISGLQRAVKEALSAVLPRVETVYTYLLDGESQLVCEDPPHELPQEGKVREAIISQKRLGCNGLGFSDLPGKPLARLVAPLAPDTQVLVMPLADKEAGAVAAVILVHCGQLSDNEEWSLQAVEKHTLVALRRVQVLQQRGPREAPRAVQNPPEGTAEDQKGGAAYTDRDRKILQLCGELYDLDASSLQLKVLQYLQQETRASRCCLLLVSEDNLQLSCKVIGDKVLGEEVSFPLTGCLGQVVEDKKSIQLKDLTSEDVQQLQSMLGCELQAMLCVPVISRATDQVVALACAFNKLEGDLFTDEDEHVIQHCFHYTSTVLTSTLAFQKEQKLKCECQALLQVAKNLFTHLDDVSVLLQEIITEARNLSNAEICSVFLLDQNELVAKVFDGGVVDDESYEIRIPADQGIAGHVATTGQILNIPDAYAHPLFYRGVDDSTGFRTRNILCFPIKNENQEVIGVAELVNKINGPWFSKFDEDLATAFSIYCGISIAHSLLYKKVNEAQYRSHLANEMMMYHMKVSDDEYTKLLHDGIQPVAAIDSNFASFTYTPRSLPEDDTSMAILSMLQDMNFINNYKIDCPTLARFCLMVKKGYRDPPYHNWMHAFSVSHFCYLLYKNLELTNYLEDIEIFALFISCMCHDLDHRGTNNSFQVASKSVLAALYSSEGSVMERHHFAQAIAILNTHGCNIFDHFSRKDYQRMLDLMRDIILATDLAHHLRIFKDLQKMAEVGYDRNNKQHHRLLLCLLMTSCDLSDQTKGWKTTRKIAELIYKEFFSQGDLEKAMGNRPMEMMDREKAYIPELQISFMEHIAMPIYKLLQDLFPKAAELYERVASNREHWTKVSHKFTIRGLPSNNSLDFLDEEYEVPDLDGTRAPINGCCSLDAE

SEQ ID NO: 10158 - protein, 92 aa, Homo sapiens
MSYILKMPGTCLPGEGTTYELPPSSLHPSSAPVTSGGTCPALLTEAGWEAPIMAFTEAASAVGPSWTHSGASRSSSSRTSRRRRRSHAPTAC

SEQ ID NO: 10159 - protein, 106 aa, Homo sapiens
MVLVLHHILIAVVQFLRRGQQVFLKPDEPPPPPQPCADSLQDALLSLGSVIDISGLQRAVKEALSAVLPRVETVYTYLLDGESQLVCEDPPHELPQEGKVRCTVAS

SEQ ID NO: 10160 - protein, 934 aa, Homo sapiens
MVLVLHHILIAVVQFLRRGQQVFLKPDEPPPPPQPCADSLQDALLSLGSVIDISGLQRAVKEALSAVLPRVETVYTYLLDGESQLVCEDPPHELPQEGKVREAIISQKRLGCNGLGFSDLPGKPLARLVAPLAPDTQVLVMPLADKEAGAVAAVILVHCGQLSDNEEWSLQAVEKHTLVALRRVQVLQQRGPREAPRAVQNPPEGTAEDQKGGAAYTDRDRKILQLCGELYDLDASSLQLKVLQYLQQETRASRCCLLLVSEDNLQLSCKVIGDKVLGEEVSFPLTGCLGQVVEDKKSIQLKDLTSEDVQQLQSMLGCELQAMLCVPVISRATDQVVALACAFNKLEGDLFTDEDEHVIQHCFHYTSTVLTSTLAFQKEQKLKCECQALLQVAKNLFTHLDDVSVLLQEIITEARNLSNAEICSVFLLDQNELVAKVFDGGVVDDESYEIRIPADQGIAGHVATTGQILNIPDAYAHPLFYRGVDDSTGFRTRNILCFPIKNENQEVIGVAELVNKINGPWFSKFDEDLATAFSIYCGISIAHSLLYKKVNEAQYRSHLANEMMMYHMKVSDDEYTKLLHDGIQPVAAIDSNFASFTYTPRSLPEDDTSMAILSMLQDMNFINNYKIDCPTLARFCLMVKKGYRDPPYHNWMHAFSVSHFCYLLYKNLELTNYLEDIEIFALFISCMCHDLDHRGTNNSFQVASKSVLAALYSSEGSVMERHHFAQAIAILNTHGCNIFDHFSRKDYQRMLDLMRDIILATDLAHHLRIFKDLQKMAEVGYDRNNKQHHRLLLCLLMTSCDLSDQTKGWKTTRKIAELIYKEFFSQGDLEKAMGNRPMEMMDREKAYIPELQISFMEHIAMPIYKLLQDLFPKAAELYERVASNREHWTKVSHKFTIRGLPSNNSLDFLDEEYEVPDLDGTRAPINGCCSLDAE

SEQ ID NO: 10161 - protein, 685 aa, Homo sapiens
MVLVLHHILIAVVQFLRRGQQVFLKPDEPPPPPQPCADSLQDALLSLGSVIDISGLQRAVKEALSAVLPRVETVYTYLLDGESQLVCEDPPHELPQEGKVRFTDEDEHVIQHCFHYTSTVLTSTLAFQKEQKLKCECQALLQVAKNLFTHLDDVSVLLQEIITEARNLSNAEICSVFLLDQNELVAKVFDGGVVDDESYEIRIPADQGIAGHVATTGQILNIPDAYAHPLFYRGVDDSTGFRTRNILCFPIKNENQEVIGVAELVNKINGPWFSKFDEDLATAFSIYCGISIAHSLLYKKVNEAQYRSHLANEMMMYHMKVSDDEYTKLLHDGIQPVAAIDSNFASFTYTPRSLPEDDTSMAILSMLQDMNFINNYKIDCPTLARFCLMVKKGYRDPPYHNWMHAFSVSHFCYLLYKNLELTNYLEDIEIFALFISCMCHDLDHRGTNNSFQVASKSVLAALYSSEGSVMERHHFAQAIAILNTHGCNIFDHFSRKDYQRMLDLMRDIILATDLAHHLRIFKDLQKMAEVGYDRNNKQHHRLLLCLLMTSCDLSDQTKGWKTTRKIAELIYKEFFSQGDLEKAMGNRPMEMMDREKAYIPELQISFMEHIAMPIYKLLQDLFPKAAELYERVASNREHWTKVSHKFTIRGLPSNNSLDFLDEEYEVPDLDGTRAPINGCCSLDAE

SEQ ID NO: 10162 - protein, 92 aa, Homo sapiens
MVLVLHHILIAVVQFLRRGQQVFLKPDEPPPPPQPCADSLQETVYTYLLDGRLSSPRSGWAAMGWASQTCQGSPWPGWWLHWLLIPKCWSCR

SEQ ID NO: 10163 - protein, 65 aa, Homo sapiens
MVLVLHHILIAVVQFLRRGQQVFLKPDEPPPPPQPCADSLQPAWTPLQRSQDPQGVETTDWRTPC

SEQ ID NO: 10164 - protein, 65 aa, Homo sapiens; identical to SEQ ID NO: 10163

SEQ ID NO: 10165 - protein, 65 aa, Homo sapiens; identical to SEQ ID NO: 10163

SEQ ID NO: 10166 - protein, 336 aa, Homo sapiens
PGLDRSRGRGRAELGGEVGGLGDPGSRRRARRGAERRLRDPDTEVRRGPLSDRRLALAGELYDLDASSLQLKVLQYLQQETRASRCCLLLVSEDNLQLSCKVIGDKVLGEEVSFPLTGCLGQVVEDKKSIQLKDLTSEDVQQLQSMLGCELQAMLCVPVISRATDQVVALACAFNKLEGDLFTDEDEHVIQHCFHYTSTVLTSTLAFQKEQKLKCECQALLQVAKNLFTHLDDVSVLLQEIITEARNLSNAEICSVFLLDQNELVAKVFDGGVVDDESYEIRIPADQGIAGHVATTGQILNIPDAYAHPLFYRGVDDSTGFRTRNILCFPIKNENQ

SEQ ID NO: 10167 - protein, 75 aa, Homo sapiens
  SITE 1: note = misc_feature - Xaa can be any naturally occurring amino acid
XLWLVASGGRHSAFPVSHPKGVGLACLPSTVASTGGCHWETGRAWEFRELRPAWTPLQRSQDPQGVETTDWRTPC

SEQ ID NO: 10168 - protein, 172 aa, Homo sapiens
  SITE 1: note = misc_feature - Xaa can be any naturally occurring amino acid
XSAVTPSPCLSLSQLQQETRASRCCLLLVSEDNLQLSCKVIGDKVLGEEVSFPLTGCLGQVVEDKKSIQLKDLTSEDVQQLQSMLGCELQAMLCVPVISRATDQVVALACAFNKLEGDLFTDEDEHVIQHCFHYTSTVLTSTLAFQKEQKLKCECQALLQVAKNLFTHLDDV

SEQ ID NO: 10169 - protein, 482 aa, Homo sapiens
MEVCYQLPVLPLDRPVPQHVLSRRGAISFSSSSALFGCPNPRQLSQRRGAISYDSSDQTALYIRMLGDVRVRSRAGFESERRGSHPYIDFRIFHSQSEIEVSVSARNIRRLLSFQRYLRSSRFFRGTAVSNSLNILDDDYNGQAKCMLEKVGNWNFDIFLFDRLTNGNSLVSLTFHLFSLHGLIEYFHLDMMKLRRFLVMIQEDYHSQNPYHNAVHAADVTQAMHCYLKEPKLANSVTPWDILLSLIAAATHDLDHPGVNQPFLIKTNHYLATLYKNTSVLENHHWRSAVGLLRESGLFSHLPLESRQQMETQIGALILATDISRQNEYLSLFRSHLDRGDLCLEDTRHRHLVLQMALKCADICNPCRTWELSKQWSEKVTEEFFHQGDIEKKYHLGVSPLCDRHTESIANIQIGFMTYLVEPLFTEWARFSNTRLSQTMLGHVGLNKASWKGLQREQSSSEDTDAAFELNSQLLPQENRLS

SEQ ID NO: 10170 - protein, 424 aa, Homo sapiens
MEVCYQLPVLPLDRPVPQHVLSRRGAISFSSSSALFGCPNPRQLSQRRGAISYDSSDQTALYIRMLGDVRVRSRAGFESERRGSHPYIDFRIFHSQSEIEVSVSARNIRRLLSFQRYLRSSRFFRGTAVSNSLNILDDDYNGQAKCMLEKVGNWNFDIFLFDRLTNGNSLVSLTFHLFSLHGLIEYFHLDMMKLRRFLVMIQEDYHSQNPYHNAVHAADVTQAMHCYLKEPKLANSVTPWDILLSLIAAATHDLDHPGVNQPFLIKTNHYLATLYKNTSVLENHHWRSAVGLLRESGLFSHLPLESRQQMETQIGALILATDISRQNEYLSLFRSHLDRGDLCLEDTRHRHLVLQMALKCADICNPCRTWELSKQWSEKVTEEFFHQGDIEKKYHLGVSPLCDRHTESIANIQIGNYTYLDIAG

SEQ ID NO: 10171 - protein, 86 aa, Homo sapiens
MGITLIWCLALVLIKWITSKRRGAISYDSSDQTALYIRMLGDVRVRSRAGFESERRGSHPYIDFRIFHSQSEIEVSVSARNIRRLL

SEQ ID NO: 10172 - protein, 456 aa, Homo sapiens
MGITLIWCLALVLIKWITSKRRGAISYDSSDQTALYIRMLGDVRVRSRAGFESERRGSHPYIDFRIFHSQSEIEVSVSARNIRRLLSFQRYLRSSRFFRGTAVSNSLNILDDDYNGQAKCMLEKVGNWNFDIFLFDRLTNGNSLVSLTFHLFSLHGLIEYFHLDMMKLRRFLVMIQEDYHSQNPYHNAVHAADVTQAMHCYLKEPKLANSVTPWDILLSLIAAATHDLDHPGVNQPFLIKTNHYLATLYKNTSVLENHHWRSAVGLLRESGLFSHLPLESRQQMETQIGALILATDISRQNEYLSLFRSHLDRGDLCLEDTRHRHLVLQMALKCADICNPCRTWELSKQWSEKVTEEFFHQGDIEKKYHLGVSPLCDRHTESIANIQIGFMTYLVEPLFTEWARFSNTRLSQTMLGHVGLNKASWKGLQREQSSSEDTDAAFELNSQLLPQENRLS

SEQ ID NO: 10173 - protein, 243 aa, Homo sapiens
MARLWGALSLWPLWAAVPWGGAAAVGVRACSSTAAPDGVEGPALRRSYWRHLRRLVLGPPEPPFSHVCQVGDPVLRGVAAPVERAQLGGPELQRLTQRLVQVMRRRRCVGLSAPQLGVPRQVLALELPEALCRECPPRQRALRQMEPFPLRVFVNPSLRVLDSRLVTFPEGCESVAGFLACVPRFQAVQISGLDPNGEQVVWQASGWAARIIQHEMDHLQGCLFIDKMDSRTFTNVYWMKVND

SEQ ID NO: 10174 - protein, 86 aa, Homo sapiens
MRTLACLLLLGCGYLAHVLAEEAEIPREVIERLARSQIHSIRDLQRLLEIDSVGSEDSLDTSLRAHGVHATKHVPEKRPLPIRRKR

SEQ ID NO: 10175 - protein, 196 aa, Homo sapiens
MRTLACLLLLGCGYLAHVLAEEAEIPREVIERLARSQIHSIRDLQRLLEIDSVGSEDSLDTSLRAHGVHATKHVPEKRPLPIRRKRSIEEAVPAVCKTRTVIYEIPRSQVDPTSANFLIWPPCVEVKRCTGCCNTSSVKCQPSRVHHRSVKVAKVEYVRKKPKLKEVQVRLEEHLECACATTSLNPDYREEDTDVR

SEQ ID NO: 10176 - protein, 211 aa, Homo sapiens [sequence omitted]

SEQ ID NO: 10177 - protein, 205 aa, Homo sapiens
QRQAAALGSQSPSPAGLRAGAVPPARACLQEAEIPREVIERLARSQIHSIRDLQRLLEIDSVGSEDSLDTSLRAHGVHATKHVPEKRPLPIRRKRSIEEAVPAVCKTRTVIYEIPRSQVDPTSANFLIWPPCVEVKRCTGCCNTSSVKCQPSRVHHRSVKVAKVEYVRKKPKLKEVQVRLEEHLECACATTSLNPDYREEDTDVR

SEQ ID NO: 10178 - protein, 226 aa, Homo sapiens
MFIMGLGDPIPEELYEMLSDHSIRSFDDLQRLLHGDPGEEDGAELDLNMTRSHSGGELESLARGRRSLGSLTIAEPAMIAECKTRTEVFEISRRLIDRTNANFLVWPPCVEVQRCSGCCNNRNVQCRPTQVQLRPVQVRKIEIVRKKPIFKKATVTLEDHLACKCETVAAARPVTRSPGGSQEQRAKTPQTRVTIRTVRVRRPPKGKHRKFKHTHDKTALKETLGA

SEQ ID NO: 10179 - protein, 136 aa, Homo sapiens
MLSDHSIRSFDDLQRLLHGDPGEEDGAELDLNMTRSHSGGELESLARGRRSLGSLTIAEPAMIAECKTRTEVFEISRRLIDRTNANFLVWPPCVEVQRCSGCCNNRNVQCRPTQVQLRPVQVRKIEIVRKKPIFKK

SEQ ID NO: 10180 - protein, 144 aa, Homo sapiens
MLSDHSIRSFDDLQRLLHGDPGEEDGAELDLNMTRSHSGGELESLARGRRSLGSLTIAEPAMIAECKTRTEVFEISRRLIDRTNANFLVWPPCVEVQRCSGCCNNRNVQCRPTQVQLRPVQVRKIEIVRKKPIFKKATVTLEDH

SEQ ID NO: 10181 - protein, 241 aa, Homo sapiens
MNRCWALFLSLCCYLRLVSAEGDPIPEELYEMLSDHSIRSFDDLQRLLHGDPGEEDGAELDLNMTRSHSGGELESLARGRRSLGSLTIAEPAMIAECKTRTEVFEISRRLIDRTNANFLVWPPCVEVQRCSGCCNNRNVQCRPTQVQLRPVQVRKIEIVRKKPIFKKATVTLEDHLACKCETVAAARPVTRSPGGSQEQRAKTPQTRVTIRTVRVRRPPKGKHRKFKHTHDKTALKETLGA

SEQ ID NO: 10182 - protein, 50 aa, Homo sapiens
MSLFGLLLLTSALAGQRQGTQAESNLSSKFQFSSNKEQNGRNYIQASGLA

SEQ ID NO: 10183 - protein, 282 aa, Homo sapiens
MSLFGLLLLTSALAGQRQGTQAESNLSSKFQFSSNKEQNGVQDPQHERIITVSTNGSIHSPRFPHTYPRNTVLVWRLVAVEENVWIQLTFDERFGLEDPEDDICKYDFVEVEEPSDGTILGRWCGSGTVPGKQISKGNQIRIRFVSDEYFPSEPGFCIHYNIVMPQFTEAVSPSVLPPSALPLDLLNNAITAFSTLEDLIRYLEPERWQLDLEDLYRPTWQLLGKAFVFGRKSRVVDLNLLTEEVLQLRPKTGVRGLHKSLTDVALEHHEECDCVCRGSTGG

SEQ ID NO: 10184 - protein, 345 aa, Homo sapiens
MSLFGLLLLTSALAGQRQGTQAESNLSSKFQFSSNKEQNGVQDPQHERIITVSTNGSIHSPRFPHTYPRNTVLVWRLVAVEENVWIQLTFDERFGLEDPEDDICKYDFVEVEEPSDGTILGRWCGSGTVPGKQISKGNQIRIRFVSDEYFPSEPGFCIHYNIVMPQFTEAVSPSVLPPSALPLDLLNNAITAFSTLEDLIRYLEPERWQLDLEDLYRPTWQLLGKAFVFGRKSRVVDLNLLTEEVRLYSCTPRNFSVSIREELKRTDTIFWPGCLLVKRCGGNCACCLHNCNECQCVPSKVTKKYHEVLQLRPKTGVRGLHKSLTDVALEHHEECDCVCRGSTGG

SEQ ID NO: 10185 - protein, 53 aa, Homo sapiens
  SITE 1: note = misc_feature - Xaa can be any naturally occurring amino acid
XTFDERFGLEDPEDDICKYDFVEVEEPSDGTILGRWCGSGFCIHYNIVMPNLP

SEQ ID NO: 10186 - protein, 206 aa, Homo sapiens
IFEAVGAQGTVVLDEESLHVDDLDLFDGDSGLRFAEDLEVSELKVGADLEREGDLGEVPPHAVHESNHLTDLYRRDETIQVKGNGYVQSPRFPNSYPRNLLLTWRLHSQENTRIQLVFDNQFGLEEAENDICRYDFVEVEDISETSTIIRGRWCGHKEVPPRIKSRTNQIKITFKSDDYFVAKPGFKIYYSLLEDFQPAAASETNW

SEQ ID NO: 10187 - protein, 364 aa, Homo sapiens
MHRLIFVYTLICANFCSCRDTSATPQSASIKALRNANLRRDDLYRRDETIQVKGNGYVQSPRFPNSYPRNLLLTWRLHSQENTRIQLVFDNQFGLEEAENDICRYDFVEVEDISETSTIIRGRWCGHKEVPPRIKSRTNQIKITFKSDDYFVAKPGFKIYYSLLEDFQPAAASETNWESVTSSISGVSYNSPSVTDPTLIADALDKKIAEFDTVEDLLKYFNPESWQEDLENMYLDTPRYRGRSYHDRKSKVDLDRLNDDAKRYSCTPRNYSVNIREELKLANVVFFPRCLLVQRCGGNCGCGTVNWRSCTCNSGKTVKKYHEVLQFEPGHIKRRGRAKTMALVDIQLDHHERCDCICSSRPPR

SEQ ID NO: 10188 - protein, 370 aa, Homo sapiens
MHRLIFVYTLICANFCSCRDTSATPQSASIKALRNANLRRDESNHLTDLYRRDETIQVKGNGYVQSPRFPNSYPRNLLLTWRLHSQENTRIQLVFDNQFGLEEAENDICRYDFVEVEDISETSTIIRGRWCGHKEVPPRIKSRTNQIKITFKSDDYFVAKPGFKIYYSLLEDFQPAAASETNWESVTSSISGVSYNSPSVTDPTLIADALDKKIAEFDTVEDLLKYFNPESWQEDLENMYLDTPRYRGRSYHDRKSKVDLDRLNDDAKRYSCTPRNYSVNIREELKLANVVFFPRCLLVQRCGGNCGCGTVNWRSCTCNSGKTVKKYHEVLQFEPGHIKRRGRAKTMALVDIQLDHHERCDCICSSRPPR

SEQ ID NO: 10189 - protein, 154 aa, Homo sapiens
MGTSHPAFLVLGCLLTGLSLILCQLSLPSILPNENEKVVQLNSSFSLRCFGESEVSWQYPMSEEESSDVEIRNEENNSGLFVTVLEVSSASAAHTGLYTCYYNHTQTEENELEGRHIYIYVPDPDVAFVPLGMTDYLVIVEDDDSAIIPCRTTD

SEQ ID NO: 10190 - protein, 158 aa, Homo sapiens
MGTSHPAFLVLGCLLTGLSLILCQLSLPSILPNENEKVVQLNSSFSLRCFGESEVSWQYPMSEEESSDVEIRNEENNSGLFVTVLEVSSASAAHTGLYTCYYNHTQTEENELEGRHIYIYVPDPDVAFVPLGMTDYLVIVEDDDSAIIPCRTTDPETP

SEQ ID NO: 10191 - protein, 159 aa, Homo sapiens
MGTSHPAFLVLGCLLTGLSLILCQLSLPSILPNENEKVVQLNSSFSLRCFGESEVSWQYPMSEEESSDVEIRNEENNSGLFVTVLEVSSASAAHTGLYTCYYNHTQTEENELEGRHIYIYVPDPDVAFVPLGMTDYLVIVEDDDSAIIPCRTTDPETPV

SEQ ID NO: 10192 - protein, 1089 aa, Homo sapiens
MGTSHPAFLVLGCLLTGLSLILCQLSLPSILPNENEKVVQLNSSFSLRCFGESEVSWQYPMSEEESSDVEIRNEENNSGLFVTVLEVSSASAAHTGLYTCYYNHTQTEENELEGRHIYIYVPDPDVAFVPLGMTDYLVIVEDDDSAIIPCRTTDPETPVTLHNSEGVVPASYDSRQGFNGTFTVGPYICEATVKGKKFQTIPFNVYALKATSELDLEMEALKTVYKSGETIVVTCAVFNNEVVDLQWTYPGEVKGKGITMLEEIKVPSIKLVYTLTVPEATVKDSGDYECAARQATREVKEMKKVTISVHEKGFIEIKPTFSQLEAVNLHEVKHFVVEVRAYPPPRISWLKNNLTLIENLTEITTDVEKIQEIRYRSKLKLIRAKEEDSGHYTIVAQNEDAVKSYTFELLTQVPSSILDLVDDHHGSTGGQTVRCTAEGTPLPDIEWMICKDIKKCNNETSWTILANNVSNIITEIHSRDRSTVEGRVTFAKVEETIAVRCLAKNLLGAENRELKLVAPTLRSELTVAAAVLVLLVIVIISLIVLVVIWKQKPRYEIRWRVIESISPDGHEYIYVDPMQLPYDSRWEFPRDGLVLGRVLGSGAFGKVVEGTAYGLSRSQPVMKVAVKMLKPTARSSEKQALMSELKIMTHLGPHLNIVNLLGACTKSGPIYIITEYCFYGDLVNYLHKNRDSFLSHHPEKPKKELDIFGLNPADESTRSYVILSFENNGDYMDMKQADTTQYVPMLERKEVSKYSDIQRSLYDRPASYKKKSMLDSEVKNLLSDDNSEGLTLLDLLSFTYQVARGMEFLASKNCVHRDLAARNVLLAQGKIVKICDFGLARDIMHDSNYVSKGSTFLPVKWMAPESIFDNLYTTLSDVWSYGILLWEIFSLGGTPYPGMMVDSTFYNKIKSGYRMAKPDHATSEVYEIMVKCWNSEPEKRPSFYHLSEIVENLLPGQYKKSYEKIHLDFLKSDHPAVARMRVDSDNAYIGVTYKNEEDKLKDWEGGLDEQRLSADSGYIIPLPDIDPVPEEEDLGKRNRHSSQTSEESAIETGSSSSTFIKREDETIEDIDMMDDIGIDSSDLVEDSFL

SEQ ID NO: 10193 - protein, 743 aa, Homo sapiens
MGTSHPAFLVLGCLLTGLSLILCQLSLPSILPNENEKVVQLNSSFSLRCFGESEVSWQYPMSEEESSDVEIRNEENNSGLFVTVLEVSSASAAHTGLYTCYYNHTQTEENELEGRHIYIYVPDPDVAFVPLGMTDYLVIVEDDDSAIIPCRTTDPETPVTLHNSEGVVPASYDSRQGFNGTFTVGPYICEATVKGKKFQTIPFNVYALKATSELDLEMEALKTVYKSGETIVVTCAVFNNEVVDLQWTYPGEVKGKGITMLEEIKVPSIKLVYTLTVPEATVKDSGDYECAARQATREVKEMKKVTISVHEKGFIEIKPTFSQLEAVNLHEVKHFVVEVRAYPPPRISWLKNNLTLIENLTEITTDVEKIQEIRYRSKLKLIRAKEEDSGHYTIVAQNEDAVKSYTFELLTQVPSSILDLVDDHHGSTGGQTVRCTAEGTPLPDIEWMICKDIKKCNNETSWTILANNVSNIITEIHSRDRSTVEGRVTFAKVEETIAVRCLAKNLLGAENRELKLVAPTLRSELTVAAAVLVLLVIVIISLIVLVVIWKQKPRYEIRWRVIESISPDGHEYIYVDPMQLPYDSRWEFPRDGLVLGRVLGSGAFGKVVEGTAYGLSRSQPVMKVAVKMLKPTARSSEKQALMSELKIMTHLGPHLNIVNLLGACTKSGPIYIITEYCFYGDLVNYLHKNRDSFLSHHPEKPKKELDIFGLNPADESTRSSGQGCLSSGTLQELSVDLQARGPC

SEQ ID NO: 10194 - protein, 218 aa, Homo sapiens
MGTSHPAFLVLGCLLTGLSLILCQLSLPSILPNENEKVVQLNSSFSLRCFGESEVSWQYPMSEEESSDVEIRNEENNSGLFVTVLEVSSASAAHTGLYTCYYNHTQTEENELEGRHIYIYVPDPDVAFVPLGMTDYLVIVEDDDSAIIPCRTTDPETPVTLHNSEGVVPASYDSRQGFNGTFTVGPYICEATVKGKKFQTIPFNVYALKGTCIISFLL

SEQ ID NO: 10195 - protein, 147 aa, Homo sapiens
MLPRLVLNSWAQMICLPQLPKFPRAMGTSHPAFLVLGCLLTGLSLILCQLSLPSILPNENEKVVQLNSSFSLRCFGESEVSWQYPMSEEESSDVEIRNEENNSGLFVTVLEVSSASAAHTGLYTCYYNHTQTEENELEGRHIYIYVP

SEQ ID NO: 10196 - protein, 174 aa, Homo sapiens
MRLPGAMPALALKGELLLLSLLLLLEPQISQGLVVTPPGPELVLNVSSTFVLTCSGSAPVVWERMSQEPPQEMAKAQDGTFSSVLTLTNLTGLDTGEYFCTHNDSRGLETDERKRLYIFVPDPTVGFLPNDAEELFIFLTEITEITIPCRVTDPQLVVTLHEKKGDVALPVPYD

SEQ ID NO: 10197 - protein, 239 aa, Homo sapiens
MRLPGAMPALALKGELLLLSLLLLLEPQISQGLVVTPPGPELVLNVSSTFVLTCSGSAPVVWERMSQEPPQEMAKAQDGTFSSVLTLTNLTGLDTGEYFCTHNDSRGLETDERKRLYIFVPDPTVGFLPNDAEELFIFLTEITEITIPCRVTDPQLVVTLHEKKGDVALPVPYDHQRGFSGIFEDRSYICKTTIGDREVDSDAYYVYRLQGEPPFWPDAQQSVIHQRLCERSADCGPPG

SEQ ID NO: 10198 - protein, 1106 aa, Homo sapiens
MRLPGAMPALALKGELLLLSLLLLLEPQISQGLVVTPPGPELVLNVSSTFVLTCSGSAPVVWERMSQEPPQEMAKAQDGTFSSVLTLTNLTGLDTGEYFCTHNDSRGLETDERKRLYIFVPDPTVGFLPNDAEELFIFLTEITEITIPCRVTDPQLVVTLHEKKGDVALPVPYDHQRGFSGIFEDRSYICKTTIGDREVDSDAYYVYRLQVSSINVSVNAVQTVVRQGENITLMCIVIGNEVVNFEWTYPRKESGRLVEPVTDFLLDMPYHIRSILHIPSAELEDSGTYTCNVTESVNDHQDEKAINITVVESGYVRLLGEVGTLQFAELHRSRTLQVVFEAYPPPTVLWFKDNRTLGDSSAGEIALSTRNVSETRYVSELTLVRVKVAEAGHYTMRAFHEDAEVQLSFQLQINVPVRVLELSESHPDSGEQTVRCRGRGMPQPNIIWSACRDLKRCPRELPPTLLGNSSEEESQLETNVTYWEEEQEFEVVSTLRLQHVDRPLSVRCTLRNAVGQDTQEVIVVPHSLPFKVVVISAILALVVLTIISLIILIMLWQKKPRYEIRWKVIESVSSDGHEYIYVDPMQLPYDSTWELPRDQLVLGRTLGSGAFGQVVEATAHGLSHSQATMKVAVKMLKSTARSSEKQALMSELKIMSHLGPHLNVVNLLGACTKGGPIYIITEYCRYGDLVDYLHRNKHTFLQHHSDKRRPPSAELYSNALPVGLPLPSHVSLTGESDGGYMDMSKDESVDYVPMLDMKGDVKYADIESSNYMAPYDNYVPSAPERTCRATLINESPVLSYMDLVGFSYQVANGMEFLASKNCVHRDLAARNVLICEGKLVKICDFGLARDIMRDSNYISKGSTFLPLKWMAPESIFNSLYTTLSDVWSFGILLWEIFTLGGTPYPELPMNEQFYNAIKRGYRMAQPAHASDEIYEIMQKCWEEKFEIRPPFSQLVLLLERLLGEGYKKKYQQVDEEFLRSDHPAILRSQARLPGFHGLRSPLDTSSVLYTAVQPNEGDNDYIIPLPDPKPEVADEGPLEGSPSLASSTLNEVNTSSTISCDSPLEPQDEPEPEPQLELQVEPEPELEQLPDSGCPAPRAEAEDSFL

SEQ ID NO: 10199 - protein, 146 aa, Homo sapiens
MSQEPPQEMAKAQDGTFSSVLTLTNLTGLDTGEYFCTHNDSRGLETDERKRLYIFVPDPTVGFLPNDAEELFIFLTEITEITIPCRVTDPQLVVTLHEKKGDVALPVPYDHQRGFSGIFEDRSYICKTTIGDREVDSDAYYVYRLQ

SEQ ID NO: 10200 - protein, 375 aa, Homo sapiens
MKVWLLLGLLLVHEALEDVTGQHLPKNKRPKEPGENRIKPTNKKVKPKIPKMKDRDSANSAPKTQSIMMQVLDKGRFQKPAATLSLLAGQTVELRCKGSRIGWSYPAYLDTFKDSRLSVKQNERYGQLTLVNSTSADTGEFSCWVQLCSGYICRKDEAKTGSTYIFFTEKGELFVPSPSYFDVVYLNPDRQAVVPCRVTVLSAKVTLHREFPAKEIPANGTDIVYDMKRGFVYLQPHSEHQGVVYCRAEAGGRSQISVKYQLLYVAVPSGPPSTTILASSNKVKSGDDISVLCTVLGEPDVEVEFTWIFPGQKDERPVTIQDTWRLIHRGLGHTTRISQSVITVEDFETIDAGYYICTAQNLQGQTTVATTVEFS

SEQ ID NO: 10201 - protein, 375 aa, Homo sapiens; identical to SEQ ID NO: 10200

SEQ ID NO: 10202 - protein, 109 aa, Homo sapiens
MELQTYRYHGHSMSDPGVSYRTREEIQEVRSKSDPIMLLKDRMVNSNLASVEELKEIDVEVRKEIEDAAQFATADPEPPLEELGYHIYSSDPPFEVRGANQWIKFKSVS

SEQ ID NO: 10203 - protein, 359 aa, Homo sapiens
MRKMLAAVSRVLSGASQKPASRVLVASRNFANDATFEIKKCDLHRLEEGPPVTTVLTREDGLKYYRMMQTVRRMELKADQLYKQKIIRGFCHLCDGQEACCVGLEAGINPTDHLITAYRAHGFTFTRGLSVREILAELTGRKGGCAKGKGGSMHMYAKNFYGGNGIVGAQGQIFEAYNMAALWKLPCIFICENNRYGMGTSVERAAASTDYYKRGDFIPGLRVDGMDILCVREATRFAAAYCRSGKGPILMELQTYRYHGHSMSDPGVSYRTREEIQEVRSKSDPIMLLKDRMVNSNLASVEELKEIDVEVRKEIEDAAQFATADPEPPLEELGYHIYSSDPPFEVRGANQWIKFKSVS

SEQ ID NO: 10204 - protein, 390 aa, Homo sapiens
MRKMLAAVSRVLSGASQKPASRVLVASRNFANDATFEIKKCDLHRLEEGPPVTTVLTREDGLKYYRMMQTVRRMELKADQLYKQKIIRGFCHLCDGQEACCVGLEAGINPTDHLITAYRAHGFTFTRGLSVREILAELTGRKGGCAKGKGGSMHMYAKNFYGGNGIVGAQVPLGAGIALACKYNGKDEVCLTLYGDGAANQGQIFEAYNMAALWKLPCIFICENNRYGMGTSVERAAASTDYYKRGDFIPGLRVDGMDILCVREATRFAAAYCRSGKGPILMELQTYRYHGHSMSDPGVSYRTREEIQEVRSKSDPIMLLKDRMVNSNLASVEELKEIDVEVRKEIEDAAQFATADPEPPLEELGYHIYSSDPPFEVRGANQWIKFKSVS

SEQ ID NO: 10205 - protein, 180 aa, Homo sapiens
MRKMLAAVSRVLSGASQKPASRVLVASRNFANDATFEIKKCDLHRLEEGPPVTTVLTREDGLKYYRMMQTVRRMELKADQLYKQKIIRGFCHLCDGQEACCVGLEAGINPTDHLITAYRAHGFTFTRGLSVREILAELTGRKGGCAKGKGGSMHMYAKNFYGGNGIVGAQVVKDEDCVLL

SEQ ID NO: 10206 - protein, 204 aa, Homo sapiens
MRKMLAAVSRVLSGASQKPASRVLVASRNFANDATFEIKKCDLHRLEEGPPVTTVLTREDGLKYYRMMQTVRRMELKADQLYKQKIIRGFCHLCDGQFLLPLTQEACCVGLEAGINPTDHLITAYRAHGFTFTRGLSVREILAELTGRKGGCAKGKGGSMHMYAKNFYGGNGIVGAQVPLGAGIALACKYNGKDEVCLTLYGDG

SEQ ID NO: 10207 - protein, 397 aa, Homo sapiens
MRKMLAAVSRVLSGASQKPASRVLVASRNFANDATFEIKKCDLHRLEEGPPVTTVLTREDGLKYYRMMQTVRRMELKADQLYKQKIIRGFCHLCDGQFLLPLTQEACCVGLEAGINPTDHLITAYRAHGFTFTRGLSVREILAELTGRKGGCAKGKGGSMHMYAKNFYGGNGIVGAQVPLGAGIALACKYNGKDEVCLTLYGDGAANQGQIFEAYNMAALWKLPCIFICENNRYGMGTSVERAAASTDYYKRGDFIPGLRVDGMDILCVREATRFAAAYCRSGKGPILMELQTYRYHGHSMSDPGVSYRTREEIQEVRSKSDPIMLLKDRMVNSNLASVEELKEIDVEVRKEIEDAAQFATADPEPPLEELGYHIYSSDPPFEVRGANQWIKFKSVS

SEQ ID NO: 10208 - protein, 121 aa, Homo sapiens
MRKMLAAVSRVLSGASQKPFAGSPPPRHLTVGRKLSSRYEVTFESAQASRVLVASRNFANDATFEIKKCDLHRLEEGPPVTTVLTREDGLKYYRMMQTVRRMELKADQLYKQKIIRGFCHL

SEQ ID NO: 10209 - protein, 205 aa, Homo sapiens
MRKMLAAVSRVLSGASQKPRHGLATLPSLVSISRLKQSSHLGLPKCWDYSHSLKTRQASRVLVASRNFANDATFEIKKCDLHRLEEGPPVTTVLTREDGLKYYRMMQTVRRMELKADQLYKQKIIRGFCHLCDGQEACCVGLEAGINPTDHLITAYRAHGFTFTRGLSVREILAELTGRKGGCAKGKGGSMHMYAKNFYGGNGIV

SEQ ID NO: 10210 - protein, 428 aa, Homo sapiens
MRKMLAAVSRVLSGASQKPRHGLATLPSLVSISRLKQSSHLGLPKCWDYSHSLKTRQASRVLVASRNFANDATFEIKKCDLHRLEEGPPVTTVLTREDGLKYYRMMQTVRRMELKADQLYKQKIIRGFCHLCDGQEACCVGLEAGINPTDHLITAYRAHGFTFTRGLSVREILAELTGRKGGCAKGKGGSMHMYAKNFYGGNGIVGAQVPLGAGIALACKYNGKDEVCLTLYGDGAANQGQIFEAYNMAALWKLPCIFICENNRYGMGTSVERAAASTDYYKRGDFIPGLRVDGMDILCVREATRFAAAYCRSGKGPILMELQTYRYHGHSMSDPGVSYRTREEIQEVRSKSDPIMLLKDRMVNSNLASVEELKEIDVEVRKEIEDAAQFATADPEPPLEELGYHIYSSDPPFEVRGANQWIKFKSVS

SEQ ID NO: 10211 - protein, 154 aa, Homo sapiens
AVLNGQVKEIPPDWDQRPVKTLVGKNFEQVAFDETKNVFVKFYAPWCTHCKEMAPAWEALAEKYQDHEDIIIAELDATANELDAFAVHGFPTLKYFPAGPGRKVIEYKSTRDLETFSKFLDNGGVLPTEEPPEEPAAPFPEPPANSTMGSKEEL

SEQ ID NO: 10212 - protein, 522 aa, Homo sapiens
MSRQLLPVLLLLLLRASCPWGQEQGARSPSEEPPEEEIPKEDGILVLSRHTLGLALREHPALLVEFYAPWCGHCQALAPEYSKAAAVLAAESMVVTLAKVDGPAQRELAEEFGVTEYPTLKFFRNGNRTHPEEYTGPRDAEGIAEWLRRRVGPSAMRLEDEAAAQALIGGRDLVVIGFFQDEDVATFLALAQDALDMTFGLTDRPRLFQQFGLTKDTVVLFKKFDEGRADFPVDEELGLDLGDLSRFLVTHSMRLVTEFNSQTSAKIFAARILNHLLLFVNQTLAAHRELLAGFGEAAPRFRGQVLFVVVDVAADNEHVLQYFGLKAEAAPTLRLVNLETTKKYAPVDGGPVTAASITAFCHAVLNGQVKPYLLSQEIPPDWDQRPVKTLVGKNFEQVAFDETKNVFVKFYAPWCTHCKEMAPAWEALAEKYQDHEDIIIAELDATANELDAFAVHGFPTLKYFPAGPGRKVIEYKSTRDLETFSKFLDNGGVLPTEEPPEEPAAPFPEPPANSTMGSKEEL

SEQ ID NO: 10213 - protein, 525 aa, Homo sapiens
MSRQLLPVLLLLLLRASCPWGQEQGARSPSEEPPEEEIPKEDGILVLSRHTLGLALREHPALLVEFYAPWCGHCQALAPEYSKAAAVLAAESMVVTLAKVDGPAQRELAEEFGVTEYPTLKFFRNGNRTHPEEYTGPRDAEGIAEWLRRRVGPSAMRLEDEAAAQALIGGRDLVVIGFFQDLQDEDVATFLALAQDALDMTFGLTDRPRLFQQFGLTKDTVVLFKKFDEGRADFPVDEELGLDLGDLSRFLVTHSMRLVTEFNSQTSAKIFAARILNHLLLFVNQTLAAHRELLAGFGEAAPRFRGQVLFVVVDVAADNEHVLQYFGLKAEAAPTLRLVNLETTKKYAPVDGGPVTAASITAFCHAVLNGQVKPYLLSQEIPPDWDQRPVKTLVGKNFEQVAFDETKNVFVKFYAPWCTHCKEMAPAWEALAEKYQDHEDIIIAELDATANELDAFAVHGFPTLKYFPAGPGRKVIEYKSTRDLETFSKFLDNGGVLPTEEPPEEPAAPFPEPPANSTMGSKEEL

SEQ ID NO: 10214 - protein, 227 aa, Homo sapiens
  SITE 1: note = misc_feature - Xaa can be any naturally occurring amino acid
XLLPVLLLLLLRASCPWGQEQGARSPSEEPPEEEIPKEDGILVLSRHTLGLALREHPALLVEFYAPWCGHCQALAPEYSKAAAVLAAESMVVTLAKVDGPAQRELAEEFGVTEYPTLKFFRNGNRTHPEEYTGPRDAEGIAEWLRRRVGPSAMRLEDEAAAQALIGGRDLVVIGFFQDALDMTFGLTDRPRLFQQFGLTKDTVVLFKKFDEGRADFPVDEELGLDLG

SEQ ID NO: 10215 - protein, 71 aa, Homo sapiens
MRLRRLALFPGVALLLAAARLAAASDVLELTDDNFESRISDTGSAGLMLVEFFAPCSIPAGFEEESLLQPH

SEQ ID NO: 10216 - protein, 505 aa, Homo sapiens
MRLRRLALFPGVALLLAAARLAAASDVLELTDDNFESRISDTGSAGLMLVEFFAPWCGHCKRLAPEYEAAATRLKGIVPLAKVDCTANTNTCNKYGVSGYPTLKIFRDGEEAGAYDGPRTADGIVSHLKKQAGPASVPLRTEEEFKKFISDKDASIVGFFDDSFSEAHSEFLKAASNLRDNYRFAHTNVESLVNEYDDNGEGIILFRPSHLTNKFEDKTVAYTEQKMTSGKIKKFIQENIFGICPHMTEDNKDLIQGKDLLIAYYDVDYEKNAKGSNYWRNRVMMVAKKFLDAGHKLNFAVASRKTFSHELSDFGLESTAGEIPVVAIRTAKGEKFVMQEEFSRDGKALERFLQDYFDGNLKRYLKSEPIPESNDGPVKVVVAENFDEIVNNENKDVLIEFYAPWCGHCKNLEPKYKELGEKLSKDPNIVIAKMDATANDVPSPYEVRGFPTIYFSPANKKLNPKKYEGGRELSDFISYLQREATNPPVIQEEKPKKKKKAQEDL

SEQ ID NO: 10217 - protein, 75 aa, Homo sapiens
MRLRRLALFPGVALLLAAARLAAASDVLELTDDNFESRISDTGSAGLMLVEFFAPWLQNSPSQRDPSATLWLLKR

SEQ ID NO: 10218 - protein, 123 aa, Homo sapiens
SDVLELTDDNFESRISDTGSAGLMLVEFFAPWCGHCKRLAPEYEAAATRLKGIVPLAKVDCTANTNTCNKYGVSGYPTLKIFRDGEEAGAYDGPRTAGVSSYFVLHISLTSLRTRLWHIQSKK

SEQ ID NO: 10219 - protein, 163 aa, Homo sapiens
MRPRKAFLLLLLLGLVQLLAVAGAEGPDEDFRQVQANSRRTRPGSGKGEGEPLERRGEGVKKQVRVLWNSKHSFSKCDSSNRENAIEDEEEEEEEDDDEEEDDLEVKEENGVLVLNDANFDNFVADKDTVLLEFYAPWCGHCKQFAPEYEKIANILKDKDPPI

SEQ ID NO: 10220 - protein, 645 aa, Homo sapiens
MRPRKAFLLLLLLGLVQLLAVAGAEGPDEDSSNRENAIEDEEEEEEEDDDEEEDDLEVKEENGVLVLNDANFDNFVADKDTVLLEFYAPWCGHCKQFAPEYEKIANILKDKDPPIPVAKIDATSASVLASRFDVSGYPTIKILKKGQAVDYEGSRTQEEIVAKVREVSQPDWTPPPEVTLVLTKENFDEVVNDADIILVEFYAPWCGHCKKLAPEYEKAAKELSKRSPPIPLAKVDATAETDLAKRFDVSGYPTLKIFRKGRPYDYNGPREKYGIVDYMIEQSGPPSKEILTLKQVQEFLKDGDDVIIIGVFKGESDPAYQQYQDAANNLREDYKFHHTFSTEIAKFLKVSQGQLVVMQPEKFQSKYEPRSHMMDVQGSTQDSAIKDFVLKYALPLVGHRKVSNDAKRYTRRPLVVVYYSVDFSFDYRAATQFWRSKVLEVAKDFPEYTFAIADEEDYAGEVKDLGLSESGEDVNAAILDESGKKFAMEPEEFDSDTLREFVTAFKKGKLKPVIKSQPVPKNNKGPVKVVVGKTFDSIVMDPKKDVLIEFYAPWCGHCKQLEPVYNSLAKKYKGQKGLVIAKMDATANDVPSDRYKVEGFPTIYFAPSGDKKNPVKFEGGDRDLEHLSKFIEEHATKLSRTKEEL

SEQ ID NO: 10221 - protein, 519 aa, Homo sapiens
MARAGPAWLLLAIWVVLPSWLSSAKVSSLIERISDPKDLKKLLRTRNNVLVLYSKSEVAAENHLRLLSTVAQAVKGQGTICWVDCGDAESRKLCKKMKVDLSPKDKKVELFHYQDGAFHTEYNRAVTFKSIVAFLKDPKGPPLWEEDPGAKDVVHLDSEKDFRRLLKKEEKPLLIMFYAPWCSMCKRMMPHFQKAATQLRGHAVLAGMNVYSSEFENIKEEYSVRGFPTICYFEKGRFLFQYDNYGSTAEDIVEWLKNPQPPQPQVPETPWADEGGSVYHLTDEDFDQFVKEHSSVLVMFHAPWCGHCKKMKPEFEKAAEALHGEADSSGVLAAVDATVNKALAERFHISEFPTLKYFKNGEKYAVPVLRTKKKFLEWMQNPEAPPPPEPTWEEQQTSVLHLVGDNFRETLKKKKHTLVMFYAPWCPHCKKVIPHFTATADAFKDDRKIACAAVDCVKDKNQDLCQQEAVKGYPTFHYYHYGKFAEKYDSDRTELGFTNYIRALREGDHERLGKKKEEL

SEQ ID NO: 10222 - protein, 262 aa, Homo sapiens
MARAGPAWLLLAIWVVLPSWLSSAKVSSLIERISDPKDLKKLLRTRNNVLVLYSKSEVAAENHLRLLSTVAQAVKGQGTICWVDCGDAESRKLCKKMKVDLSPKDKKVELFHYQDGAFHTEYNRAVTFKSIVAFLKDPKGPPLWEEDPGAKDVVHLDSEKDFRRLLKKEEKPLLIMFYAPWCSMCKRMMPHFQKAATQLRGHAVLAGMNVYSSEFENIKEEYSVRGFPTICYFEKGRFLFQYDNYGSTAEDIVEWLKKVWPL

SEQ ID NO: 10223 - protein, 64 aa, Homo sapiens
MKVDLSPKDKKVELFHYQDGAFHTEYNRAVTFKSIVAFLKDPKGPPLWEEDPGAKDVVHLDSEK

SEQ ID NO: 10224 - protein, 83 aa, Homo sapiens
  SITE 1: note = misc_feature - Xaa can be any naturally occurring amino acid
XTLVMFYAPWCPHCKKVIPHFTATADAFKDDRKIACAAVDCVKDKNQDLCQQEAVKGYPTFHYYHYGKFAEKYDSDRTVFSVG

SEQ ID NO: 10225 - protein, 440 aa, Homo sapiens
MALLVLGLVSCTFFLAVNGLYSSSDDVIELTPSNFNREVIQSDSLWLVEFYAPWCGHCQRLTPEWKKAATALKDVVKVGAVDADKHHSLGGQYGVQGFPTIKIFGSNKNRPEDYQGGRTGEAIVDAALSALRQLVKDRLGGRSGGYSSGKQGRSDSSSKKDVIELTDDSFDKNVLDSEDVWMVEFYAPWCGHCKNLEPEWAAAASEVKEQTKGKVKLAAVDATVNQVLASRYGIRGFPTIKIFQKGESPVDYDGGRTRSDIVSRALDLFSDNAPPPELLEIINEDIAKRTCEEHQLCVVAVLPHILDTGAAGRNSYLEVLLKLADKYKKKMWGWLWTEAGAQSELETALGIGGFGYPAMAAINARKMKFALLKGSFSEQGINEFLRELSFGRGSTAPVGGGAFPTIVEREPWDGRDGELPVEDDIDLSDVELDDLGKDEL

SEQ ID NO: 10226 - protein, 437 aa, Homo sapiens
MILGLVSCTFFLAVNGLYSSSDDVIELTPSNFNREVIQSDSLWLVEFYAPWCGHCQRLTPEWKKAATALKDVVKVGAVDADKHHSLGGQYGVQGFPTIKIFGSNKNRPEDYQGGRTGEAIVDAALSALRQLVKDRLGGRSGGYSSGKQGRSDSSSKKDVIELTDDSFDKNVLDSEDVWMVEFYAPWCGHCKNLEPEWAAAASEVKEQTKGKVKLAAVDATVNQVLASRYGIRGFPTIKIFQKGESPVDYDGGRTRSDIVSRALDLFSDNAPPPELLEIINEDIAKRTCEEHQLCVVAVLPHILDTGAAGRNSYLEVLLKLADKYKKKMWGWLWTEAGAQSELETALGIGGFGYPAMAAINARKMKFALLKGSFSEQGINEFLRELSFGRGSTAPVGGGAFPTIVEREPWDGRDGELPVEDDIDLSDVELDDLGKDEL

SEQ ID NO: 10227 - protein, 488 aa, Homo sapiens
MRIITAPASKVSRGSNELMILARRSDRGSPTSPAHSLSRKSPIMYPSTTMANAPGLVSCTFFLAVNGLYSSSDDVIELTPSNFNREVIQSDSLWLVEFYAPWCGHCQRLTPEWKKAATALKDVVKVGAVDADKHHSLGGQYGVQGFPTIKIFGSNKNRPEDYQGGRTGEAIVDAALSALRQLVKDRLGGRSGGYSSGKQGRSDSSSKKDVIELTDDSFDKNVLDSEDVWMVEFYAPWCGHCKNLEPEWAAAASEVKEQTKGKVKLAAVDATVNQVLASRYGIRGFPTIKIFQKGESPVDYDGGRTRSDIVSRALDLFSDNAPPPELLEIINEDIAKRTCEEHQLCVVAVLPHILDTGAAGRNSYLEVLLKLADKYKKKMWGWLWTEAGAQSELETALGIGGFGYPAMAAINARKMKFALLKGSFSEQGINEFLRELSFGRGSTAPVGGGAFPTIVEREPWDGRDGELPVEDDIDLSDVELDDLGKDEL

SEQ ID NO: 10228 - protein, 492 aa, Homo sapiens
MRRDLREKLVWVCRPLAPVEVPANISSDFQPCSPTSPAHSLSRKSPIMYPSTTMANAPGLVSCTFFLAVNGLYSSSDDVIELTPSNFNREVIQSDSLWLVEFYAPWCGHCQRLTPEWKKAATALKDVVKVGAVDADKHHSLGGQYGVQGFPTIKIFGSNKNRPEDYQGGRTGEAIVDAALSALRQLVKDRLGGRSGGYSSGKQGRSDSSSKKDVIELTDDSFDKNVLDSEDVWMVEFYAPWCGHCKNLEPEWAAAASEVKEQTKGKVKLAAVDATVNQVLASRYGIRGFPTIKIFQKGESPVDYDGGRTRSDIVSRALDLFSDNAPPPELLEIINEDIAKRTCEEHQLCVVAVLPHILDTGAAGRNSYLEVLLKLADKYKKKMWGWLWTEAGAQSELETALGIGGFGYPAMAAINARKMKFALLKGSFSEQGINEFLRELSFGRGSTAPVGGGAFPTIVEREPWDGRDGELPVEDDIDLSDVELDDLGKDEL

SEQ ID NO: 10229 - protein, 492 aa, Homo sapiens; identical to SEQ ID NO: 10228

SEQ ID NO: 10230 - protein, 11 aa, Homo sapiens
MYPSTTMANAP

SEQ ID NO: 10231 - protein, 445 aa, Homo sapiens
MYPSTTMANAPGLVSCTFFLAVNGLYSSSDDVIELTPSNFNREVIQSDSLWLVEFYAPWCGHCQRLTPEWKKAATALKDVVKVGAVDADKHHSLGGQYGVQGFPTIKIFGSNKNRPEDYQGGRTGEAIVDAALSALRQLVKDRLGGRSGGYSSGKQGRSDSSSKKDVIELTDDSFDKNVLDSEDVWMVEFYAPWCGHCKNLEPEWAAAASEVKEQTKGKVKLAAVDATVNQVLASRYGIRGFPTIKIFQKGESPVDYDGGRTRSDIVSRALDLFSDNAPPPELLEIINEDIAKRTCEEHQLCVVAVLPHILDTGAAGRNSYLEVLLKLADKYKKKMWGWLWTEAGAQSELETALGIGGFGYPAMAAINARKMKFALLKGSFSEQGINEFLRELSFGRGSTAPVGGGAFPTIVEREPWDGRDGELPVEDDIDLSDVELDDLGKDEL

SEQ ID NO: 10232 - protein, 177 aa, Homo sapiens
MDLLWMPLLLVAACVSAVHSSPEVNAGVSSIHITKPVHILEERSLLVLTPAGLTQMLNQTRFLMVLFHEVLLLLPRLKYNGAILAHRNLHLPGSSDSPASASQVAGITDNPSSKQSRNLAEELGKAVEIMGKGKNGIGFGKVDITIEKELQQEFGITKAPELKLFFEGNRSEPISCK

SEQ ID NO: 10233 - protein, 584 aa, Homo sapiens
MDLLWMPLLLVAACVSAVHSSPEVNAGVSSIHITKPVHILEERSLLVLTPAGLTQMLNQTRFLMVLFHNPSSKQSRNLAEELGKAVEIMGKGKNGIGFGKVDITIEKELQQEFGITKAPELKLFFEGNRSEPISCKGVVESAALVVWLRRQISQKAFLFNSSEQVAEFVISRPLVIVGFFQDLEEEVAELFYDVIKDFPELTFGVITIGNVIGRFHVTLDSVLVFKKGKIVNRQKLINDSTNKQELNRVIKQHLTDFVIEYNTENKDLISELHIMSHMLLFVSKSSESYGIIIQHYKLASKEFQNKILFILVDADEPRNGRVFKYFRVTEVDIPSVQILNLSSDARYKMPSDDITYESLKKFGRSFLSKNATKHQSSEEIPKYWDQGLVKQLVGKNFNVVVFDKEKDVFVMFYAPWSKKCKMLFPLLEELGRKYQNHSTIIIAKIDVTANDIQLMYLDRYPFFRLFPSGSQQAVLYKGEHTLKGFSDFLESHIKTKIEDEDELLSVEQNEVIEEEVLAEEKEVPMMRKGLPEQQSPELENMTKYVSKLEEPAGKKKTSEEVVVVVAKPKGPPVQKKKPKVKEEL

SEQ ID NO: 10234 - protein, 254 aa, Homo sapiens [sequence omitted]

SEQ ID NO: 10235 - protein, 254 aa, Homo sapiens [sequence omitted]

SEQ ID NO: 10236 - protein, 254 aa, Homo sapiens [sequence omitted]

SEQ ID NO: 10237 - protein, 1154 aa, Homo sapiens
MGLLLMILASAVLGSFLTLLAQFFLLYRRQPEPPADEAARAGEGFRYIKPVPGLLLREYLYGGGRDEEPSGAAPEGGATPTAAPETPAPPTRETCYFLNATILFLFRELRDTALTRRWVTKKIKVEFEELLQTKTAGRLLEGLSLRDVFLGETVPFIKTIRLVRPVVPSATGEPDGPEGEALPAACPEELAFEAEVEYNGGFHLAIDVDLVFGKSAYLFVKLSRVVGRLRLVFTRVPFTHWFFSFVEDPLIDFEVRSQFEGRPMPQLTSIIVNQLKKIIKRKHTLPNYKIRFKPFFPYQTLQGFEEDEEHIHIQQWALTEGRLKVTLLECSRLLIFGSYDREANVHCTLELSSSVWEEKQRSSIKTVELIKGNLQSVGLTLRLVQSTDGYAGHVIIETVAPNSPAAIADLQRGDRLIAIGGVKITSTLQVLKLIKQAGDRVLVYYERPVGQSNQGAVLQDNFGQLEENFLSSSCQSGYEEEAAGLTVDTESRELDSEFEDLASDVRAQNEFKDEAQSLSHSPKRVPTTLSIKPLGAISPVLNRKLAVGSHPLPPKIQSKDGNKPPPLKTSEITDPAQVSKPTQGSAFKPPVPPRPQAKVPLPSADAPNQAEPDVLVEKPEKVVPPPLVDKSAEKQAKNVDAIDDAAAPKQFLAKQEVAKDVTSETSCPTKDSSDDRQTWESSEILYRNKLGKWTRTRASCLFDIEACHRYLNIALWCRDPFKLGGLICLGHVSLKLEDVALGCLATSNTEYLSKLRLEAPSPKAIVTRTALRNLSMQKGFNDKFCYGDITIHFKYLKEGESDHHVVTNVEKEKEPHLVEEVSVLPKEEQFVGQMGLTENKHSFQDTQFQNPTWCDYCKKKVWTKAASQCMFCAYVCHKKCQEKCLAETSVCGATDRRIDRTLKNLRLEGQETLLGLPPRVDAEASKSVNKTTGLTRHIINTSSRLLNLRQVSKTRLSEPGTDLVEPSPKHTPNTSDNEGSDTEVCGPNSPSKRGNSTGIKLVRKEGGLDDSVFIAVKEIGRDLYRGLPTEERIQKLEFMLDKLQNEIDQELEHNNSLVREEKETTDTRKKSLLSAALAKSGERLQALTLLMIHYRAGIEDIETLESLSLDQHSKKISKYTDDTEEDLDNEISQLIDSQPFSSISDDLFGPSESV

SEQ ID NO: 10238 - protein, 778 aa, Homo sapiens
MGCNLCTFQKREEHYKLLYEVSQVNGKDLSKATHEEAVEAFRNAKEPIVVQVLRRTPLSRPAYGMASEVQLMNASTQTDITFEHIMALAKLRPPTPPVPDICPFLLSDSCHSLHPMEHEFYEDNEYISSLPADADRTEDFEYEEVELCRVSSQEKLGLTVCYRTDDEEDTGIYVSEVDPNSIAAKDGRIREGDRILQINGEDVQNREEAVALLSNDECKRIVLLVARPEIQLDEGWLEDERNEFLEELNLEMLEEEHNEAMQPTANEVEQPKKQEEEEGTTDTATSSSNNHEKDSGVGRTDESLRNDESSEQENAAEDPNSTSLKSKRDLGQSQDTLGSVELQYNESLVSGEYIDSDCIGNPDEDCERFRQLLELKCKIRNHGEYDLYYSSSTIECNQGEQEGVEHELQLLNEELRNIELECQNIMQAHRLQKVTDQYGDIWTLHDGGFRNYNTSIDMQRGKLDDIMEHPEKSDKDSSSAYNTAESCRSTPLTVDRSPDSSLPRVINLTNKKNLRSTMAATQSSSGQSSKESTSTKAKTTEQGCSAESKEKVLEGSKLPDQEKAVSEHIPYLSPYHSSSYRYANIPAHARHYQSYMQLIQQKSAVEYAQSQLSLVSMCKESQKCSEPKMEWKVKIRSDGTRYITKRPVRDRILKERALKIKEERSGMTTDDDTMSEMKMGRYWSKEERKQHLVRAKEQRRRREFMMRSRLECLKESPQSGSEGKKEINIIELSHKKMMKKRNKKILDNWMTIQELMTHGAKSPDGTRVHNAFLSVTTV

SEQ ID NO: 10239 - protein, 1036 aa, Homo sapiens
MGFALERFAEAVDPALECKLCGQVLEEPLCTPCGHVFCASCLLPWAVRRRRCPLQCQPLAPGELYRVLPLRSLIQKLRVQCDYRARGCGHSVRLHELEAHVEHCDFGPARRLRSRGGCASGLGGGEVPARGGCGPTPRAGRGGGARGGPPGGRWGRGRGPGPRVLAWRRREKALLAQLWALQGEVQLTARRYQEKFTQYMAHVRNFVGDLGGGHRRDGEHKPFTIVLERENDTLGFNIIGGRPNQNNQEGTSTEGIYVSKILENGPADRADGLEIHDKIMEVNGKDLSKATHEEAVEAFRNAKEPIVVQVLRRTPLSRPAYGMASEVQLMNASTQTDITFEHIMALAKLRPPTPPVPDICPFLLSDSCHSLHPMEHEFYEDNEYISSLPADADRTEDFEYEEVELCRVSSQEKLGLTVCYRTDDEEDTGIYVSEVDPNSIAAKDGRIREGDRILQINGEDVQNREEAVALLSNDECKRIVLLVARPEIQLDEGWLEDERNEFLEELNLEMLEEEHNEAMQPTANEVEQPKKQEEEEGTTDTATSSSNNHEKDSGVGRTDESLRNDESSEQENAAEDPNSTSLKSKRDLGQSQDTLGSVELQYNESLVSGEYIDSDCIGNPDEDCERFRQLLELKCKIRNHGEYDLYYSSSTIECNQGEQEGVEHELQLLNEELRNIELECQNIMQAHRLQKVTDQYGDIWTLHDGGFRNYNTSIDMQRGKLDDIMEHPEKSDKDSSSAYNTAESCRSTPLTVDRSPDSSLPRVINLTNKKNLRSTMAATQSSSGQSSKESTSTKAKTTEQGCSAESKEKVLEGSKLPDQEKAVSEHIPYLSPYHSSSYRYANIPAHARHYQSYMQLIQQKSAVEYAQSQLSLVSMCKESQKCSEPKMEWKVKIRSDGTRYITKRPVRDRILKERALKIKEERSGMTTDDDTMSEMKMGRYWSKEERKQHLVRAKEQRRRREFMMRSRLECLKESPQSGSEGKKEINIIELSHKKMMKKRNKKILDNWMTIQELMTHGAKSPDGTRVHNAFLSVTTV

SEQ ID NO: 10240 - protein, 776 aa, Homo sapiens
MSGKRQFFLKPLALLTCWPSTVNGKDLSKATHEEAVEAFRNAKEPIVVQVLRRTPLSRPAYGMASEVQLMNASTQTDITFEHIMALAKLRPPTPPVPDICPFLLSDSCHSLHPMEHEFYEDNEYISSLPADADRTEDFEYEEVELCRVSSQEKLGLTVCYRTDDEEDTGIYVSEVDPNSIAAKDGRIREGDRILQINGEDVQNREEAVALLSNDECKRIVLLVARPEIQLDEGWLEDERNEFLEELNLEMLEEEHNEAMQPTANEVEQPKKQEEEEGTTDTATSSSNNHEKDSGVGRTDESLRNDESSEQENAAEDPNSTSLKSKRDLGQSQDTLGSVELQYNESLVSGEYIDSDCIGNPDEDCERFRQLLELKCKIRNHGEYDLYYSSSTIECNQGEQEGVEHELQLLNEELRNIELECQNIMQAHRLQKVTDQYGDIWTLHDGGFRNYNTSIDMQRGKLDDIMEHPEKSDKDSSSAYNTAESCRSTPLTVDRSPDSSLPRVINLTNKKNLRSTMAATQSSSGQSSKESTSTKAKTTEQGCSAESKEKVLEGSKLPDQEKAVSEHIPYLSPYHSSSYRYANIPAHARHYQSYMQLIQQKSAVEYAQSQLSLVSMCKESQKCSEPKMEWKVKIRSDGTRYITKRPVRDRILKERALKIKEERSGMTTDDDTMSEMKMGRYWSKEERKQHLVRAKEQRRRREFMMRSRLECLKESPQSGSEGKKEINIIELSHKKMMKKRNKKILDNWMTIQELMTHGAKSPDGTRVHNAFLSVTTV

SEQ ID NO: 10241 - protein, 77 aa, Homo sapiens
MSPPLCPLLLLAVGLRLAGTLNPSDPNTCSFWESFTTTTKESHSRPFSLLPSEPCERPWEGPHTCPQPTNSEETPGF

SEQ ID NO: 10242 - protein, 173 aa, Homo sapiens
MSPPLCPLLLLAVGLRLAGTLNPSDPNTCSFWESFTTTTKESHSRPFSLLPSEPCERPWEGPHTCPQPTVVYRTVYRQVVKTDHRQRLQCCHGFYESRGFCVPLCAQECVHGRCVAPNQCQCVPGWRGDDCSSECAPGMWGPQCDKPCSCGNNSSCDPKSGVCSCPSGLQPPN

SEQ ID NO: 10243 - protein, 1037 aa, Homo sapiens
MSPPLCPLLLLAVGLRLAGTLNPSDPNTCSFWESFTTTTKESHSRPFSLLPSEPCERPWEGPHTCPQPTVVYRTVYRQVVKTDHRQRLQCCHGFYESRGFCVPLCAQECVHGRCVAPNQCQCVPGWRGDDCSSECAPGMWGPQCDKPCSCGNNSSCDPKSGVCSCPSGLQPPNCLQPCTPGYYGPACQFRCQCHGAPCDPQTGACFCPAERTGPSCDVSCSQGTSGFFCPSTHSCQNGGVFQTPQGSCSCPPGWMGTICSLPCPEGFHGPNCSQECRCHNGGLCDRFTGQCRCAPGYTGDRCREECPVGRFGQDCAETCDCAPDARCFPANGACLCEHGFTGDRCTDRLCPDGFYGLSCQAPCTCDREHSLSCHPMNGECSCLPGWAGLHCNESCPQDTHGPGCQEHCLCLHGGVCQATSGLCQCAPGYTGPHCASLCPPDTYGVNCSARCSCENAIACSPIDGECVCKEGWQRGNCSVPCPPGTWGFSCNASCQCAHEAVCSPQTGACTCTPGWHGAHCQLPCPKGQFGEGCASRCDCDHSDGCDPVHGRCQCQAGWMGARCHLSCPEGLWGVNCSNTCTCKNGGTCLPENGNCVCAPGFRGPSCQRSCQPGRYGKRCVPCKCANHSFCHPSNGTCYCLAGWTGPDCSQPCPPGHWGENCAQTCQCHHGGTCHPQDGSCICPLGWTGHHCLEGCPLGTFGANCSQPCQCGPGEKCHPETGACVCPPGHSGAPCRIGIQEPFTVMPTTPVAYNSLGAVIGIAVLGSLVVALVALFIGYRHWQKGKEHHHLAVAYSSGRLDGSEYVMPDVPPSYSHYYSNPSYHTLSQCSPNPPPPNKVPGPLFASLQNPERPGGAQGHDNHTTLPADWKHRREPPPGPLDRGSSRLDRSYSYSYSNGPGPFYNKGLISEEELGASVASLSSENPYATIRDLPSLPGGPRESSYMEMKGPPSGSPPRQPPQFWDSQRRRQPQPQRDSGTYEQPSPLIHDRDSVGSQPPLPPGLPPGHYDSPKNSHIPGHYDLPPVRHPPSPPLRRQDR

SEQ ID NO: 10244 - protein, 1037 aa, Homo sapiens; identical to SEQ ID NO: 10243

SEQ ID NO: 10245 - protein, 227 aa, Homo sapiens
MGWTMRLVTAALLLGLMMVVTGDEDENSPCAHEALLDEDTLFCQGLEVFYPELGNIGCKVVPDCNNYRQKITSWMEPIVKFPGAVDGATYILVMVDPDAPSRAEPRQRFWRHWLVTDIKGADLKKGKIQGQELSAYQAPSPPAHSGFHRYQFFVYLQEGKVISLLPKENKTRGSWKMDRFLNRFHLGEPEASTQFMTQNYQDSPTLQAPRERASEPKHKNQAEIAAC

SEQ ID NO: 10246 - protein, 93 aa, Homo sapiens
MSRRRAEPGCGGSGRRAGAPGEGRGRRRYAPGPAAKALPRRRLALQSQVPMGWTMRLVTAALLLGLMMVVTGDEDENSPCAHEALLDEDTLFC

SEQ ID NO: 10247 - protein, 135 aa, Homo sapiens
MQPRWAQGATMWLGVLLTLLLCSSLEGQENSFTINSVDMKSLPDWTVQNGKNLTLQCFADVSTTSHVKPQHQMLFYKDDVLFYNISSMKSTESYFIPEVRIYDSGTYKCTVIVNNKEKTTAEYQVLVEGVPSPRV

SEQ ID NO: 10248 - protein, 230 aa, Homo sapiens
MQPRWAQGATMWLGVLLTLLLCSSLEGQENSFTINSVDMKSLPDWTVQNGKNLTLQCFADVSTTSHVKPQHQMLFYKDDVLFYNISSMKSTESYFIPEVRIYDSGTYKCTVIVNNKEKTTAEYQVLVEGVPSPRVTLDKKEAIQGGIVRVNCSVPEEKAPIHFTIEKLELNEKMVKLKREKNSRDQNFVILEFPVEEQDRVLSFRCQARIISGIHMQTSESTKSELVTVT

SEQ ID NO: 10249 - protein, 738 aa, Homo sapiens
MQPRWAQGATMWLGVLLTLLLCSSLEGQENSFTINSVDMKSLPDWTVQNGKNLTLQCFADVSTTSHVKPQHQMLFYKDDVLFYNISSMKSTESYFIPEVRIYDSGTYKCTVIVNNKEKTTAEYQVLVEGVPSPRVTLDKKEAIQGGIVRVNCSVPEEKAPIHFTIEKLELNEKMVKLKREKNSRDQNFVILEFPVEEQDRVLSFRCQARIISGIHMQTSESTKSELVTVTESFSTPKFHISPTGMIMEGAQLHIKCTIQVTHLAQEFPEIIIQKDKAIVAHNRHGNKAVYSVMAMVEHSGNYTCKVESSRISKVSSIVVNITELFSKPELESSFTHLDQGERLNLSCSIPGAPPANFTIQKEDTIVSQTQDFTKIASKSDSGTYICTAGIDKVVKKSNTVQIVVCEMLSQPRISYDAQFEVIKGQTIEVRCESISGTLPISYQLLKTSKVLENSTKNSNDPAVFKDNPTEDVEYQCVADNCHSHAKMLSEVLRVKVIAPVDEVQISILSSKVVESGEDIVLQCAVNEGSGPITYKFYREKEGKPFYQMTSNATQAFWTKQKASKEQEGEYYCTAFNRANHASSVPRSKILTVRVILAPWKKGLIAVVIIGVIIALLIIAAKCYFLRKAKAKQMPVEMSRPAVPLLNSNNEKMSDPNMEANSHYGHNDDVRNHAMKPINDNKEPLNSDVQYTEVQVSSAESHKDLGKKDTETVYSEVRKAVPDAVESRYSRTEGSLDGT

SEQ ID NO: 10250 - protein, 184 aa, Homo sapiens [sequence omitted]

SEQ ID NO: 10251 - protein, 88 aa, Homo sapiens
FLTLCTWLLLLGPGLLATVRAECSQDCATCSYRLVRPADINFLKHPRIDQFIHSTNEYLMEEAPDGGKSQCNASKWRHGVLMEKQQDL

SEQ ID NO: 10252 - protein, 105 aa, Homo sapiens
MARFLTLCTWLLLLGPGLLATVRAECSQDCATCSYRLVRPADINFLACVMECEGKLPSLKIWETCKELLQLSKPELPQDGTSTLRENSKPEESHLLAKRYGGFMK

SEQ ID NO: 10253 - protein, 267 aa, Homo sapiens
MARFLTLCTWLLLLGPGLLATVRAECSQDCATCSYRLVRPADINFLACVMECEGKLPSLKIWETCKELLQLSKPELPQDGTSTLRENSKPEESHLLAKRYGGFMKRYGGFMKKMDELYPMEPEEEANGSEILAKRYGGFMKKDAEEDDSLANSSDLLKELLETGDNRERSHHQDGSDNEEEVSKRYGGFMRGLKRSPQLEDEAKELQKRYGGFMRRVGRPEWWMDYQKRYGGFLKRFAEALPSDEEGESYSKEVPEMEKRYGGFMRF

SEQ ID NO: 10254 - protein, 267 aa, Homo sapiens; identical to SEQ ID NO: 10253

SEQ ID NO: 10255 - protein, 79 aa, Homo sapiens
MARFLTLCTWLLLLGPGLLATVRAECSQDCATCSYRLVRPADINFLDCGGGEEEGCSFQNFPYCFLCSCCYHLLLLSLL

SEQ ID NO: 10256 - protein, 92 aa, Homo sapiens
MARFLTLCTWLLLLGPGLLATVRAECSQDCATCSYRLVRPADINFLVSVARGECCAPCETEFPQQYADCLRPTARRVWRFAPGRSRSGASPW

SEQ ID NO: 10257 - protein, 81 aa, Homo sapiens
MSRSSKVVLGLSVLLTAATVAGVHVKQQWDQQRLRDGVIRDIERQIRKKENIRLLGEQIILTEQLEAEREKMLLAKGSQKS

SEQ ID NO: 10258 - protein, 101 aa, Homo sapiens
MSSAAGFCASRPGLLFLGLLLLPLVVAFASAEAEEDGDLQCLCVKTTSQVRPRHITSLEVIKAGPHCPTAQLIATLKNGRKICLDLQAPLYKKIIKKLLES

SEQ ID NO: 10259 - protein, 104 aa, Homo sapiens
MSSAARSRLTRATRQEMLFLALLLLPVVVAFARAEAEEDGDLQCLCVKTTSQVRPRHITSLEVIKAGPHCPTAQLIATLKNGRKICLDLQALLYKKIIKEHLES

SEQ ID NO: 10260 - protein, 776 aa, Homo sapiens
MCGYERCRPCRGAHGYLRGGQGVLHLRGLPGHGGRRLKHRRGRLGECLQHPASGAVRGDWREKPGCWSHRFPCPGRHALVGGTIIGSARCQAFRTREGRLKAACNLLQRGITNLCVIGGDGSLTGANLFRKEWSGLLEELARNGQIDKEAVQKYAYLNVVGMVGSIDNDFCGTDMTIGTDSALHRIIEVVDAIMTTAQSHQRTFVLEVMGRHCGYLALVSALACGADWVFLPESPPEEGWEEQMCVKLSENRARKKRLNIIIVAEGAIDTQNKPITSEKIKELVVTQLGYDTRVTILGHVQRGGTPSAFDRILASRMGVEAVIALLEATPDTPACVVSLNGNHAVRLPLMECVQMTQDVQKAMDERRFQDAVRLRGRSFAGNLNTYKRLAIKLPDDQIPKTNCNVAVINVGAPAAGMNAAVRSAVRVGIADGHRMLAIYDGFDGFAKGQIKEIGWTDVGGWTGQGGSILGTKRVLPGKYLEEIATQMRTHSINALLIIGGFEAYLGLLELSAAREKHEEFCVPMVMVPATVSNNVPGSDFSIGADTALNTITDTCDRIKQSASGTKRRVFIIETMGGYCGYLANMGGLAAGADAAYIFEEPFDIRDLQSNVEHLTEKMKTTIQRGLVLRNESCSENYTTDFIYQLYSEEGKGVFDCRKNVLGHMQQGGAPSPFDRNFGTKISARAMEWITAKLKEARGRGKKFTTDDSICVLGISKRNVIFQPVAELKKQTDFEHRIPKEQWWLKLRPLMKILAKYKASYDVSDSGQLEHVQPWSV

SEQ ID NO: 10261 - protein, 784 aa, Homo sapiens
MDADDSRAPKGSLRKFLEHLSGAGKAIGVLTSGGDAQGMNAAVRAVVRMGIYVGAKVYFIYEGYQGMVDGGSNIAEADWESVSSILQVGGTIIGSARCQAFRTREGRLKAACNLLQRGITNLCVIGGDGSLTGANLFRKEWSGLLEELARNGQIDKEAVQKYAYLNVVGMVGSIDNDFCGTDMTIGTDSALHRIIEVVDAIMTTAQSHQRTFVLEVMGRHCGYLALVSALACGADWVFLPESPPEEGWEEQMCVKLSENRARKKRLNIIIVAEGAIDTQNKPITSEKIKELVVTQLGYDTRVTILGHVQRGGTPSAFDRILASRMGVEAVIALLEATPDTPACVVSLNGNHAVRLPLMECVQMTQDVQKAMDERRFQDAVRLRGRSFAGNLNTYKRLAIKLPDDQIPKTNCNVAVINVGAPAAGMNAAVRSAVRVGIADGHRMLAIYDGFDGFAKGQIKEIGWTDVGGWTGQGGSILGTKRVLPGKYLEEIATQMRTHSINALLIIGGFEAYLGLLELSAAREKHEEFCVPMVMVPATVSNNVPGSDFSIGADTALNTITDTCDRIKQSASGTKRRVFIIETMGGYCGYLANMGGLAAGADAAYIFEEPFDIRDLQSNVEHLTEKMKTTIQRGLVLRNESCSENYTTDFIYQLYSEEGKGVFDCRKNVLGHMQQGGAPSPFDRNFGTKISARAMEWITAKLKEARGRGKKFTTDDSICVLGISKRNVIFQPVAELKKQTDFEHRIPKEQWWLKLRPLMKILAKYKASYDVSDSGQLEHVQPWSV

SEQ ID NO: 10262 - protein, 202 aa, Homo sapiens
MGGYCGYLANMGGLAAGADAAYIFEEPFDIRDLQSNVEHLTEKMKTTIQRGLVLRNESCSENYTTDFIYQLYSEEGKGVFDCRKNVLGHMQQGGAPSPFDRNFGTKISARAMEWITAKLKEARGRGKKFTTDDSICVLGISKRNVIFQPVAELKKQTDFEHRIPKEQWWLKLRPLMKILAKYKASYDVSDSGQLEHVQPWSV

SEQ ID NO: 10263 - protein, 118 aa, Homo sapiens
MGRHCGYLALVSALACGADWVFLPESPPEEGWEEQMCVKLSENRARKKRLNIIIVAEGAIDTQNKPITSEKIKELVVTQLGYDTRVTILGHVQRGGTPSAFDRILASRMGVEAVIALL

SEQ ID NO: 10264 - protein, 240 aa, Homo sapiens
MGRHCGYLALVSALACGADWVFLPESPPEEGWEEQMCVKLSENRARKKRLNIIIVAEGAIDTQNKPITSEKIKELVVTQLGYDTRVTILGHVQRGGTPSAFDRILASRMGVEAVIALLEATPDTPACVVSLNGNHAVRLPLMECVQMTQDVQKAMDERRFQDAVRLRGRSFAGNLNTYKRLAIKLPDDQIPKTNCNVAVINVGAPAAGMNAAVRSAVRVGIADGHRMLAIYDGFDGFAKG

SEQ ID NO: 10265 - protein, 113 aa, Homo sapiens
MNAAVRAVVRMGIYVGAKVYFIYEGYQGMVDGGSNIAEADWESVSSILQVGGTIIGSARCQAFRTREGRLKAACNLLQRGITNLCVIGGDGSLTGANLFRKEWSGLLEELARN

SEQ ID NO: 10266 - protein, 210 aa, Homo sapiens
MNAAVRAVVRMGIYVGAKVYFIYEGYQGMVDGGSNIAEADWESVSSILQVGGTIIGSARCQAFRTREGRLKAACNLLQRGITNLCVIGGDGSLTGANLFRKEWSGLLEELARNGQIDKEAVQKYAYLNVVGMVGSIDNDFCGTDMTIGTDSALHRIIEVVDAIMTTAQSHQRTFVLEVMGRHCGYLALVSALACGADWVFLPESPPEEGW

SEQ ID NO: 10267 - protein, 166 aa, Homo sapiens
  SITE 1: note = misc_feature - Xaa can be any naturally occurring amino acid
XADGHRMLAIYDGFDGFAKGQIKEIGWTDVGGWTGQGGSILGTKRVLPGKYLEEIATQMRTHSINALLIIGGFEAYKSACDMAEARGRHQELCIPLCVVPATISNNVPGTEISLGSDTGLNAVVETCDRIKQSASGTKRRVFIIETMGGYCGYLANMGGLAAGADA

SEQ ID NO: 10268 - protein, 103 aa, Homo sapiens
  SITE 1: note = misc_feature - Xaa can be any naturally occurring amino acid
XFIYQLYSEEGKGVFDCRKNVLGHMQQGGAPSPFDRNFGTKISARAMEWITAKLKEARGRGKKFTTDDSICVLGISKRNVIFQPVAELKKQTDFETVSMQPPR

SEQ ID NO: 10269 - protein, 140 aa, Homo sapiens
MAGWNAYIDNLMADGTCQDAAIVGYKDSPSVWAAVPGKTFVNITPAEVGVLVGKDRSSFYVNGLTLGGQKCSVIRDSLLQDGEFSMDLRTKSTGGAPTFNVTVTKTDKTLVLLMGKEGVHGGLINKKCYEMASHLRRSQY

SEQ ID NO: 10270 - protein, 104 aa, Homo sapiens
MGAWFLFQPAEVGVLVGKDRSSFYVNGLTLGGQKCSVIRDSLLQDGEFSMDLRTKSTGGAPTFNVTVTKTDKTLVLLMGKEGVHGGLINKKCYEMASHLRRSQY

SEQ ID NO: 10271 - protein, 165 aa, Homo sapiens
MHSRPRRRRRRGHTRRRPPVLPFGGGSGGARAAAQRAEPRSGRQRVPRALRLPPPASRGSSSPVRGPSSSAESSPSSSAMAGWNAYIDNLMADGTCQDAAIVGYKDSPSVWAAVPGKTFVNITPAEVGVLVGKDRSSFYVNGLTLGGQKCSVIRDSLLQDGEFSM

SEQ ID NO: 10272 - protein, 265 aa, Homo sapiens
MEYFGTIGIGTPAQDFTVVFDTGSSNLWVPSVYCSSLACTNHNRFNPEDSSTYQSTSETVSITYGTGSMTGILGYDTVQVGGISDTNQIFGLSETEPGSFLYYAPFDGILGLAYPSISSSGATPVFDNIWNQGLVSQDLFSVYLSADDQSGSVVIFGGIDSSYYTGSLNWVPVTVEGYWQITVDSITMNGEAIACAEGCQAIVDTGTSLLTGPTSPIANIQSDIGASENSDGDMVVSCSAISSLPDIVFTINGVQYPVPPSAYIL

SEQ ID NO: 10273 - protein, 388 aa, Homo sapiens
MKWLLLLGLVALSECIMYKVPLIRKKSLRRTLSERGLLKDFLKKHNLNPARKYFPQWKAPTLVDEQPLENYLDMEYFGTIGIGTPAQDFTVVFDTGSSNLWVPSVYCSSLACTNHNRFNPEDSSTYQSTSETVSITYGTGSMTGILGYDTVQVGGISDTNQIFGLSETEPGSFLYYAPFDGILGLAYPSISSSGATPVFDNIWNQGLVSQDLFSVYLSADDQSGSVVIFGGIDSSYYTGSLNWVPVTVEGYWQITVDSITMNGEAIACAEGCQAIVDTGTSLLTGPTSPIANIQSDIGASENSDGDMVVSCSAISSLPDIVFTINGVQYPVPPSAYILQSEGSCISGFQGMNLPTESGELWILGDVFIRQYFTVFDRANNQVGLAPVA

SEQ ID NO: 10274 - protein, 128 aa, Homo sapiens
MNGEAIACAEGCQAIVDTGTSLLTGPTSPIANIQSDIGASENSDGDMVVSCSAISSLPDIVFTINGVQYPVPPSAYILQSEGSCISGFQGMNLPTESGELWILGDVFIRQYFTVFDRANNQVGLAPVA

SEQ ID NO: 10275 - protein, 234 aa, Homo sapiens
MVSGNNSDSAHCIGTGLRGKETTLVTPQDSPRKCPIKGSPEEATADGHTNGRTKKFMSSPLTFHSDDQSGSVVIFGGIDSSYYTGSLNWVPVTVEGYWQITVDSITMNGEAIACAEGCQAIVDTGTSLLTGPTSPIANIQSDIGASENSDGDMVVSCSAISSLPDIVFTINGVQYPVPPSAYILQSEGSCISGFQGMNLPTESGELWILGDVFIRQYFTVFDRANNQVGLAPVA

SEQ ID NO: 10276 - protein, 388 aa, Homo sapiens
MKWLLLLGLVALSECIMYKVPLIRKKSLRRTLSERGLLKDFLKKHNLNPARKYFPQWEAPTLVDEQPLENYLDMEYFGTIGIGTPAQDFTVVFDTGSSNLWVPSVYCSSLACTNHNRFNPEDSSTYQSTSETVSITYGTGSMTGILGYDTVQVGGISDTNQIFGLSETEPGSFLYYAPFDGILGLAYPSISSSGATPVFDNIWNQGLVSQDLFSVYLSADDQSGSVVIFGGIDSSYYTGSLNWVPVTVEGYWQITVDSITMNGEAIACAEGCQAIVDTGTSLLTGPTSPIANIQSDIGASENSDGDMVVSCSAISSLPDIVFTINGVQYPVPPSAYILQSEGSCISGFQGMNLPTESGELWILGDVFIRQYFTVFDRANNQVGLAPVA

SEQ ID NO: 10277 - protein, 128 aa, Homo sapiens; identical to SEQ ID NO: 10274

SEQ ID NO: 10278 - protein, 234 aa, Homo sapiens; identical to SEQ ID NO: 10275

SEQ ID NO: 10279 - protein, 388 aa, Homo sapiens
MKWLLLLGLVALSECIMYKVPLIRKKSLRRTLSERGLLKDFLKKHNLNPARKYFPQWEAPTLVDEQPLENYLDMEYFGTIGIGTPAQDFTVVFDTGSSNLWVPSVYCSSLACTNHNRFNPEDSSTYQSTSETVSITYGTGSMTGILGYDTVQVGGISDTNQIFGLSETEPGSFLYYAPFDGILGLAYPSISSSGATPVFDNIWNQGLVSQDLFSVYLSADDKSGSVVIFGGIDSSYYTGSLNWVPVTVEGYWQITVDSITMNGETIACAEGCQAIVDTGTSLLTGPTSPIANIQSDIGASENSDGDMVVSCSAISSLPDIVFTINGVQYPVPPSAYILQSEGSCISGFQGMNVPTESGELWILGDVFIRQYFTVFDRANNQVGLAPVA

SEQ ID NO: 10280 - protein, 128 aa, Homo sapiens
MNGETIACAEGCQAIVDTGTSLLTGPTSPIANIQSDIGASENSDGDMVVSCSAISSLPDIVFTINGVQYPVPPSAYILQSEGSCISGFQGMNVPTESGELWILGDVFIRQYFTVFDRANNQVGLAPVA

SEQ ID NO: 10281 - protein, 234 aa, Homo sapiens
MVSGNNSDGAHCMGPGLRGKETTLVTPQDSPGKCPINGRSEEATADGHTNGRTKKFMSSPLTFHSDDKSGSVVIFGGIDSSYYTGSLNWVPVTVEGYWQITVDSITMNGETIACAEGCQAIVDTGTSLLTGPTSPIANIQSDIGASENSDGDMVVSCSAISSLPDIVFTINGVQYPVPPSAYILQSEGSCISGFQGMNVPTESGELWILGDVFIRQYFTVFDRANNQVGLAPVA

SEQ ID NO: 10282 - protein, 289 aa, Homo sapiens
MAFRQALQLAACGLAGGSAAVLFSAVAVGKPRAGGDAEPRPAEPPAWAGGARPGPGVWDPNWDRREPLSLINVRKRNVESGEEELASKLDHYKAKATRHIFLIRHSQYHVDGSLEKDRTLTPLGREQAELTGLRLASLGLKFNKIVHSSMTRAIETTDIISRHLPGVCKVSTDLLREGAPIEPDPPVSHWKPEAVQYYEDGARIEAAFRNYIHRADARQEEDSYEIFICHANVIRYIVCRALQFPPEGWLRLSLNNGSITHLVIRPNGRVALRTLGDTGFMPPDKITRS

SEQ ID NO: 10283 - protein, 255 aa, Homo sapiens
MAFRQALQLAACGLAGGSAAVLFSAVAVGKPRAGGDAEPRPAEPPAWAGGARPGPGVWDPNWDRREPLSLINVRKRNVESGEEELASKLDHYKAKATRHIFLIRHSQYHVDGSLEKDRTLTPLGREQAELTGLRLASLGLKFNKIVHSSMTRAIETTDIISRHLPGVCKVSTDLLREGAPIEPDPPVSHWKPEAVQYYEDGARIEAAFRNYIHRADARQEEDSYEIFICHANVIRYIVCSIPPLLSAGDFVLLGS

SEQ ID NO: 10284 - protein, 140 aa, Homo sapiens
MTRAIETTDIISRHLPGVCKVSTDLLREGAPIEPDPPVSHWKPEAVQYYEDGARIEAAFRNYIHRADARQEEDSYEIFICHANVIRYIVCRALQFPPEGWLRLSLNNGSITHLVIRPNGRVALRTLGDTGFMPPDKITRS

SEQ ID NO: 10285 - protein, 140 aa, Homo sapiens; identical to SEQ ID NO: 10284

SEQ ID NO: 10286 - protein, 269 aa, Homo sapiens
MAGLAARLVLLAGAAALASGSQGDREPVYRDCVLQCEEQNCSGGALNHFRSRQPIYMSLAGWTCRDDCKYECMWVTVGLYLQEGHKVPQFHGKVSLNAWFWSTVFHTRDTDLTEKMDYFCASTVILHSIYLCCVRTVGLQHPAVVSAFRALLLLMLTVHVSYLSLIRFDYGYNLVANVAIGLVNVVWWLAWCLWNQRRLPHVRKCVVVVLLLQGLSLLELLDFPPLFWVLDAHAIWHISTIPVHVLFFSFLEDDSLYLLKESEDKFKLD

SEQ ID NO: 10287 - protein, 299 aa, Homo sapiens
MAGLAARLVLLAGAAALASGSQGDREPVYRDCVLQCEEQNCSGGALNHFRSRQPIYMSLAGWTCRDDCKYECMWVTVGLYLQEGHKVPQFHGKWPFSRFLFFQEPASAVASFLNGLASLVMLCRYRTFVPASSPMYHTCVAFAWKMDYFCASTVILHSIYLCCVRTVGLQHPAVVSAFRALLLLMLTVHVSYLSLIRFDYGYNLVANVAIGLVNVVWWLAWCLWNQRRLPHVRKCVVVVLLLQGLSLLELLDFPPLFWVLDAHAIWHISTIPVHVLFFSFLEDDSLYLLKESEDKFKLD

SEQ ID NO: 10288 - protein, 148 aa, Homo sapiens
MAGLAARLVLLAGAAALASGSQGDREPVYRDCVLQCEEQNCSGGALNHFRSRQPIYMSLAGWTCRDDCKYECMWVTVGLYLQEGHKVPQFHGKWPFSRFLFFQEPASAVASFLNGLASLVMLCRYRTFVPASSPMYHTCVAFAWLSGR

SEQ ID NO: 10289 - protein, 320 aa, Homo sapiens
MAGLAARLVLLAGAAALASGSQGDREPVYRDCVLQCEEQNCSGGALNHFRSRQPIYMSLAGWTCRDDCKYECMWVTVGLYLQEGHKVPQFHGKWPFSRFLFFQEPASAVASFLNGLASLVMLCRYRTFVPASSPMYHTCVAFAWVSLNAWFWSTVFHTRDTDLTEKMDYFCASTVILHSIYLCCVRTVGLQHPAVVSAFRALLLLMLTVHVSYLSLIRFDYGYNLVANVAIGLVNVVWWLAWCLWNQRRLPHVRKCVVVVLLLQGLSLLELLDFPPLFWVLDAHAIWHISTIPVHVLFFSFLEDDSLYLLKESEDKFKLD

SEQ ID NO: 10290 - protein, 240 aa, Homo sapiens
MKDVGPESCGQPTPCWPSPALESVLGKASQHLGLESGQPLYLLELNWGGTECALSSTGRTAACFLPISLLPTSPAAWLGPEALCLPGRPGTTGLRDTGGPLLLPPPTLLQDTTRWCWMLVLWPAKVHGDSPHGILRDQAAGIGKEFHPDHCPSQVPRRPHHTPFQGQGSSKPRARILCCCLVESLPPCVGSVGQAECIGDRAVSMGLGVCELRPRCAVWRRVLSGKRCGFKVCVCRGWVC

SEQ ID NO: 10291 - protein, 70 aa, Homo sapiens
MWVTVGLYLQEGHKVPQFHGKWPFSRFLFFQEPASAVASFLNGLASLVMLCRYRTFVPASSPMYHTCVAF

SEQ ID NO: 10292 - protein, 44 aa, Homo sapiens
SFLNGLASLVMLCRYRTFVPASSPMYHTCVAFAWMRKLRHSKAK

SEQ ID NO: 10293 - protein, 150 aa, Homo sapiens
  SITE 1: note = misc_feature - Xaa can be any naturally occurring amino acid
XARLVLLAGAAALASGSQGDREPVYRDCVLQCEEQNCSGGALNHFRSRQPIYMSLAGWTCRDDCKYECMWVTVGLYLQEGHKVPQFHGKWPFSRFLFFQEPASAVASFLNGLASLVMLCRYRTFVPASSPMYHTCVAFAWMRKLRHSKAK

SEQ ID NO: 10294 - protein, 86 aa, Homo sapiens
MCLHPSSTPPFHQPRKEAVICKQRVPLKKFKSIRETMKEKGLLGEFLRTHKYDPAWKYRFGDLSVTYEPMAYMDAAYFGEISIGTP

SEQ ID NO: 10295 - protein, 315 aa, Homo sapiens
MKWMVVVLVCLQLLEAAVVKVPLKKFKSIRETMKEKGLLGEFLRTHKYDPAWKYRFGDLSVTYEPMAYMDAAYFGEISIGTPPQNFLVLFDTGSSNLWVPSVYCQSQACTSHSRFNPSESSTYSTNGQTFSLQYGSGSLTGFFGYDTLTVQSIQVPNQEFGLSENEPGTNFVYAQFDGIMGLAYPALSVDEATTAMQGMVQEGALTSPVFSVYLSNLVLESSGLGPLLTPSRAAPPSSTLQLPEKPLEQTWNILTPFTKTLPVSNLSRKVTSWAGVGIPVTCLPEAGSGGERRAECGLGVPTTRGPPRSQHHSGA

SEQ ID NO: 10296 - protein, 388 aa, Homo sapiens
MKWMVVVLVCLQLLEAAVVKVPLKKFKSIRETMKEKGLLGEFLRTHKYDPAWKYRFGDLSVTYEPMAYMDAAYFGEISIGTPPQNFLVLFDTGSSNLWVPSVYCQSQACTSHSRFNPSESSTYSTNGQTFSLQYGSGSLTGFFGYDTLTVQSIQVPNQEFGLSENEPGTNFVYAQFDGIMGLAYPALSVDEATTAMQGMVQEGALTSPVFSVYLSNQQGSSGGAVVFGGVDSSLYTGQIYWAPVTQELYWQIGIEEFLIGGQASGWCSEGCQAIVDTGTSLLTVPQQYMSALLQATGAQEDEYGQFLVNCNSIQNLPSLTFIINGVEFPLPPSSYILSNNGYCTVGVEPTYLSSQNGQPLWILGDVFLRSYYSVYDLGNNRVGFATAA

SEQ ID NO: 10297 - protein, 140 aa, Homo sapiens [sequence omitted]

SEQ ID NO: 10298 - protein, 221 aa, Homo sapiens
MPVMRLFPCFLQLLAGLALPAVPPQQWALSAGNGSSEVEVVPFQEVWGRSYCRALERLVDVVSEYPSEVEHMFSPSCVSLLRCTGCCGDENLHCVPVETANVTMQLLKIRSGDRPSYVELTFSQHVRCECRHSPGRQSPDMPGDFRADAPSFLPPRRSLPMLFRMEWGCALTGSQSAVWPSSPVPEEIPRMHPGRNGKKQQRKPLREKMKPERCGDAVPRR

SEQ ID NO: 10299 - protein, 149 aa, Homo sapiens
MPVMRLFPCFLQLLAGLALPAVPPQQWALSAGNGSSEVEVVPFQEVWGRSYCRALERLVDVVSEYPSEVEHMFSPSCVSLLRCTGCCGDENLHCVPVETANVTMQLLKIRSGDRPSYVELTFSQHVRCECRPLREKMKPERCGDAVPRR

SEQ ID NO: 10300 - protein, 170 aa, Homo sapiens
MPVMRLFPCFLQLLAGLALPAVPPQQWALSAGNGSSEVEVVPFQEVWGRSYCRALERLVDVVSEYPSEVEHMFSPSCVSLLRCTGCCGDENLHCVPVETANVTMQLLKIRSGDRPSYVELTFSQHVRCECRPLREKMKPERRRPKGRGKRRREKQRPTDCHLCGDAVPRR

SEQ ID NO: 10301 - protein, 169 aa, Homo sapiens
MPVMRLFPCFLQLLAGLALPAVPPQWALSAGNGSSEVEVVPFQEVWGRSYCRALERLVDVVSEYPSEVEHMFSPSCVSLLRCTGCCGDENLHCVPVETANVTMQLLKIRSGDRPSYVELTFSQHVRCECRPLREKMKPERRRPKGRGKRRREKQRPTDCHLCGDAVPRR

SEQ ID NO: 10302 - protein, 196 aa, Homo sapiens
MSRRSMLLAWALPSLLRLGAAQETEDPACCSPIVPRNEWKALASECAQHLSLPLRYVVVSHTAGSSCNTPASCQQQARNVQHYHMKTLGWCDVGYNFLIGEDGLVYEGRGWNFTGAHSGHLWNPMSIGISFMGNYMDRVPTPQAIRAAQGLLACGVAQGALRSNYVLKGHRDVQRTLSPGNQLYHLIQNWPHYRSP

SEQ ID NO: 10303 - protein, 105 aa, Homo sapiens
MAQGVLWILLGLLLWSDPGTASLPLLMDSVIQALAELEQKVPAAKTRHTASAWLMSAPNSGPHNRLYHFLLGAWSLNATELDPCPLSPELLGLTKEVARHDVREG

SEQ ID NO: 10304 - protein, 634 aa, Homo sapiens
MAQGVLWILLGLLLWSDPGTASLPLLMDSVIQALAELEQKVPAAKTRHTASAWLMSAPNSGPHNRLYHFLLGAWSLNATELDPCPLSPELLGLTKEVARHDVREGKEYGVVLAPDGSTVAVEPLLAGLEAGLQGRRVINLPLDSMAAPWETGDTFPDVVAIAPDVRATSSPGLRDGSPDVTTADIGANTPDATKGCPDVQASLPDAKAKSPPTMVDSLLAVTLAGNLGLTFLRGSQTQSHPDLGTEGCWDQLSAPRTFTLLDPKASLLTMAFLNGALDGVILGDYLSRTPEPRPSLSHLLSQYYGAGVARDPGFRSNFRRQNGAALTSASILAQQVWGTLVLLQRLEPVHLQLQCMSQEQLAQVAANATKEFTEAFLGCPAIHPRCRWGAAPYRGRPKLLQLPLGFLYVHHTYVPAPPCTDFTRCAANMRSMQRYHQDTQGWGDIGYSFVVGSDGYVYEGRGWHWVGAHTLGHNSRGFGVAIVGNYTAALPTEAALRTVRDTLPSCAVRAGLLRPDYALLGHRQLVRTDCPGDALFDLLRTWPHFTAVSLRSLHYTARRPSVYTSSTRPLPPACNSCARTASARPPTSRRHVYSGNLGPAFAGHSAGNIPDPVTSAYAASAQPQTQPACPFPSS

SEQ ID NO: 10305 - protein, 576 aa, Homo sapiens
MAQGVLWILLGLLLWSDPGTASLPLLMDSVIQALAELEQKVPAAKTRHTASAWLMSAPNSGPHNRLYHFLLGAWSLNATELDPCPLSPELLGLTKEVARHDVREGKEYGVVLAPDGSTVAVEPLLAGLEAGLQGRRVINLPLDSMAAPWETGDTFPDVVAIAPDVRATSSPGLRDGSPDVTTADIGANTPDATKGCPDVQASLPDAKAKSPPTMVDSLLAVTLAGNLGLTFLRGSQTQSHPDLGTEGCWDQLSAPRTFTLLDPKASLLTMAFLNGALDGVILGDYLSRTPEPRPSLSHLLSQYYGAGVARDPGFRSNFRRQNGAALTSASILAQQVWGTLVLLQRLEPVHLQLQCMSQEQLAQVAANATKEFTEAFLGCPAIHPRCRWGAAPYRGRPKLLQLPLGFLYVHHTYVPAPPCTDFTRCAANMRSMQRYHQDTQGWGDIGYSFVVGSDGYVYEGRGWHWVGAHTLGHNSRGFGVAIVGNYTAALPTEAALRTVRDTLPSCAVRAGLLRPDYALLGHRQLVRTDCPGDALFDLLRTWPHFTATVKPRPARSVSKRSRREPPPRTLPATDLQ

SEQ ID NO: 10306 - protein, 181 aa, Homo sapiens
MGTRRRGRTFHCQPSTAEVLCRGQPEIPLGSWNPATMAQGVLWILLGLLLWSDPGTASLPLLMDSVIQALAELEQKVPAAKTRHTASAWLMSAPNSGPHNRLYHFLLGAWSLNATELDPCPLSPELLGLTKEVARHDVREGKEYGVVLAPDGSTVAVEPLLAGLEAGLQGRRVINLPLDSM

SEQ ID NO: 10307 - protein, 341 aa, Homo sapiens
MGTLPWLLAFFILGLQAWDTPTIVSRKEWGARPLACRALLTLPVAYIITDQLPGMQCQQQSVCSQMLRGLQSHSVYTIGWCDVAYNFLVGDDGRVYEGVGWNIQGLHTQGYNNISLGIAFFGNKIGSSPSPAALSAAEGLISYAIQKGHLSPRYIQPLLLKEETCLDPQHPVMPRKVCPNIIKRSAWEARETHCPKMNLPAKYVIIIHTAGTSCTVSTDCQTVVRNIQSFHMDTRNFCDIGYHFLVGQDGGVYEGVGWHIQGSHTYGFNDIALGIAFIGYFVEKPPNAAALEAAQDLIQCAVVEGYLTPNYLLMGHSDVVNILSPGQALYNIISTWPHFKH

SEQ ID NO: 10308 - protein, 369 aa, Homo sapiens
MLPWLLVFSALGIQAWGDSSWNKTQAKQVSEGLQYLFENISQLTEKDVSTTVSRKAWGAEAVGCSIQLTTPVNVLVIHHVPGLECHDQTVCSQRLRELQAHHVHNNSGCDVAYNFLVGDDGRVYEGVGWNIQGVHTQGYNNISLGFAFFGTKKGHSPSPAALSAMENLITYAVQKGHLSSSYVQPLLGKGENCLAPRQKTSLKKACPGVVPRSVWGARETHCPRMTLPAKYGIIIHTAGRTCNISDECRLLVRDIQSFYIDRLKSCDIGYNFLVGQDGAIYEGVGWNVQGSSTPGYDDIALGITFMGTFTGIPPNAAALEAAQDLIQCAMVKGYLTPNYLLVGHSDVARTLSPGQALYNIISTWPHFKH

SEQ ID NO: 10309 - protein, 373 aa, Homo sapiens
MLPWLLVFSALGIQAWGDSSWNKTQAKQVSEGLQYLFENISQLTEKGLPTDVSTTVSRKAWGAEAVGCSIQLTTPVNVLVIHHVPGLECHDQTVCSQRLRELQAHHVHNNSGCDVAYNFLVGDDGRVYEGVGWNIQGVHTQGYNNISLGFAFFGTKKGHSPSPAALSAMENLITYAVQKGHLSSSYVQPLLGKGENCLAPRQKTSLKKACPGVVPRSVWGARETHCPRMTLPAKYGIIIHTAGRTCNISDECRLLVRDIQSFYIDRLKSCDIGYNFLVGQDGAIYEGVGWNVQGSSTPGYDDIALGITFMGTFTGIPPNAAALEAAQDLIQCAMVKGYLTPNYLLVGHSDVARTLSPGQALYNIISTWPHFKH

SEQ ID NO: 10310 - protein, 580 aa, Homo sapiens
MDYPKMDYFLDVESAHRLLDVESAQRFFYSQGAQARRATLLLPPTLMAASSEDDIDRRPIRRVRSKSDTPYLAEARISFNLGAAEEVERLAAMRSDSLVPGTHTPPIRRRSKFANLGRIFKPWKWRKKKSEKFKHTSAALERKISMRQSREELIKRGVLKEIYDKDGELSISNEEDSLENGQSLSSSQLSLPALSEMEPVPMPRDPCSYEVLQPSDIMDGPDPGAPVKLPCLPVKLSPPLPPKKVMICMPVGGPDLSLVSYTAQKSGQQGVAQHHHTVLPSQIQHQLQYGSHGQHLPSTTGSLPMHPSGCRMIDELNKTLAMTMQRLESSEQRVPCSTSYHSSGLHSGDGVTKAGPMGLPEIRQVPTVVIECDDNKENVPHESDYEDSSCLYTREEEEEEEDEDDDSSLYTSSLAMKVCRKDSLAIKLSNRPSKRELEEKNILPRQTDEERLELRQQIGTKLTRRLSQRPTAEELEQRNILKPRNEQEEQEEKREIKRRLTRKLSQRPTVEELRERKILIRFSDYVEVADAQDYDRRADKPWTRLTAADKAAIRKELNEFKSTEMEVHELSRHLTRFHRP

SEQ ID NO: 10311 - protein, 484 aa, Homo sapiens
MDYPKMDYFLDVESAHRLLDVESAQRFFYSQGAQARRATLLLPPTLMAASSEDDIDRRPIRRVRSKSDTPYLAEARISFNLGAAEEVERLAAMRSDSLVPGTHTPPIRRRSKFANLGRIFKPWKWRKKKSEKFKHTSAALERKISMRQSREELIKRGVLKEIYDKDGELSISNEEDSLENGQSLSSSQLSLPALSEMEPVPMPRDPCSYEVLQPSDIMDGPDPGAPVKLPCLPVKLSPPLPPKKVMICMPVGGPDLSLVSYTAQKSGQQGVAQHHHTVLPSQIQHQLQYGSHGQHLPSTTGSLPMHPSGCRMIDELNKTLAMTMQRLESSEQRVPCSTSYHSSGLHSGDGVTKAGPMGLPEIRQVPTVVIECDDNKENVPHESDYEDSSCLYTREEEEEEEDEDDDSSLYTSSLAMKVCRKDSLAIKLSNRPSKRELEEKNILPRQTDEERLELRQQIGTKLTRRLSQRPTAEELEQRNILKRK

SEQ ID NO: 10312 - protein, 169 aa, Homo sapiens
MDYPKMDYFLDVESAHRLLDVESAQRFFYSQGAQARRATLLLPPTLMAASSEDDIDRRPIRRVRSKSDTPYLAEARISFNLGAGVSLFGDMDEARMGPAVPTLGRPLGLELCSLENHGLLKTAPTYTTSAHICSGPSTGGQFSTQGMSPVQGAKRRRVVWLPLEGEEFG

SEQ ID NO: 10313 - protein, 144 aa, Homo sapiens
MYLQGPRKLMTQGGYDMVQKLFLDFFRRRLSQRPTAEELEQRNILKPRNEQEEQEEKREIKRRLTRKLSQRPTVEELRERKILIRFSDYVEVADAQDYDRRADKPWTRLTAADKAAIRKELNEFKSTEMEVHELSRHLTRFHRP

SEQ ID NO: 10314 - protein, 140 aa, Homo sapiens
MYLQGPRKLMTQGGYDMVQKLFLDFFRRRLSQRPTAEELEQRNILKPRNEQEEQEEKREIKRRLTRKLSQRPTVEELRERKILIRFSDYVEVADAQDYDRRADKPWTRLTAADKVSRGECWRVGGRTVCWVSLGSPLGSV

SEQ ID NO: 10315 - protein, 230 aa, Homo sapiens
NLGRIFKPWKWRKKKSEKFKHTSAALERKISMRQSREELIKRGVLKEIYDKDGELSISNEEDSLENGQSLSSSQLSLPALSEMEPVPMPRDPCSYEVLQPSDIMDGPVSEESPSASESGVLLSQDPSAKPVLLLPPKKPAAFPGDHEETPVKQLPLLKQPPALPPKPTTRIANHLTDWHQAHQVGQRHPLPPWQWAFSSPGSSKRIQSRPGAVAYACNPSTLGGRGRWIT

SEQ ID NO: 10316 - protein, 265 aa, Homo sapiens
  SITE 1: note = misc_feature - Xaa can be any naturally occurring amino acid
XSPFTPFSPLLSFFLSPFFFLFPSLSHSLPTPSLPLPSPFPSPSPVREPLPLPSSPFRLSPSPSVSFSLSARRATLLLPPTLMAASSEDDIDRRPIRRVRSKSDTPYLAEARISFNLGAAEEVERLAAMRSDSLVPGTHTPPIRRRSKFANLGRIFKPWKWRKKKSEKFKHTSAALERKISMRQSREELIKRGVLKEIYDKDGELSISNEEDSLENGQSLSSSQLSLPALSEMEPVPMPRDPCSYEVLQPSDIMDGPVSEESPSA

SEQ ID NO: 10317 - protein, 124 aa, Homo sapiens
MAAKVFESIGKFGLALAVAGGVVNSALYNVDAGHRAVIFDRFRGVQDIVVGEGTHFLIPWVQKPIIFDCRSRPRNVPVITGSKDLQNVNITLRILFRPVASQLPRIFTSIGEDYDERVLPSITT

SEQ ID NO: 10318 - protein, 201 aa, Homo sapiens
MAAKVFESIGKFGLALAVAGGVVNSALYNVDAGHRAVIFDRFRGVQDIVVGEGTHFLIPWVQKPIIFDCRSRPRNVPVITGSKDLQNVNITLRILFRPVASQLPRIFTSIGEDYDERVLPSITTEILKSVVARFDAGELITQRELVSRQVSDDLTERAATFGLILDDVSLTHLTFGKEFTEAVEAKQVAQQEAERARFVVE

SEQ ID NO: 10319 - protein, 202 aa, Homo sapiens
MAAKVFESIGKFGLALAVAGGVVNSALYNVDAGHRAVIFDRFRGVQDIVVGEGTHFLIPWVQKPIIFDCRSRPRNVPVITGSKDLQNVNITLRILFRPVASQLPRIFTSIGEDYDERVLPSITTEILKSVVARFDAGELITQRELVSRQVSDDLTERAATFGLILDDVSLTHLTFGKEFTEAVEAKQVAQQEAERARFVVEK

SEQ ID NO: 10320 - protein, 216 aa, Homo sapiens
MAAKVFESIGKFGLALAVAGGVVNSALYNVDAGHRAVIFDRFRGVQDIVVGEGTHFLIPWVQKPIIFDCRSRPRNVPVITGSKDLQNVNITLRILFRPVASQLPRIFTSIGEDYDERVLPSITTEILKSVVARFDAGELITQRELVSRQVSDDLTERAATFGLILDDVSLTHLTFGKEFTEAVEAKQVAQQEAERARFVVEKAEQQKKAAIISAEG

SEQ ID NO: 10321 - protein, 246 aa, Homo sapiens
MAAKVFESIGKFGLALAVAGGVVNSALYNVDAGHRAVIFDRFRGVQDIVVGEGTHFLIPWVQKPIIFDCRSRPRNVPVITGSKDLQNVNITLRILFRPVASQLPRIFTSIGEDYDERVLPSITTEILKSVVARFDAGELITQRELVSRQVSDDLTERAATFGLILDDVSLTHLTFGKEFTEAVEAKQVAQQEAERARFVVEKAEQQKKAAIISAEGDSKAAELIANSLATAGDGLIELRKLEAAED

SEQ ID NO: 10322 - protein, 272 aa, Homo sapiens
MAAKVFESIGKFGLALAVAGGVVNSALYNVDAGHRAVIFDRFRGVQDIVVGEGTHFLIPWVQKPIIFDCRSRPRNVPVITGSKDLQNVNITLRILFRPVASQLPRIFTSIGEDYDERVLPSITTEILKSVVARFDAGELITQRELVSRQVSDDLTERAATFGLILDDVSLTHLTFGKEFTEAVEAKQVAQQEAERARFVVEKAEQQKKAAIISAEGDSKAAELIANSLATAGDGLIELRKLEAAEDIAYQLSRSRNITYLPAGQSVLLQLPQ

SEQ ID NO: 10323 - protein, 272 aa, Homo sapiens; identical to SEQ ID NO: 10322

SEQ ID NO: 10324 - protein, 272 aa, Homo sapiens; identical to SEQ ID NO: 10322

SEQ ID NO: 10325 - protein, 155 aa, Homo sapiens
MAAKVFESIGKFGLALAVAGGVVNSALYNVDAGHRAVIFDRFRGVQDIVVGEGTHFLIPWVQKPIIFDCRSRPRNVPVITGSKDLQNVNITLRILFRPVASQLPRIFTSIGEDYDERVLPSITTEILKSVVARFDAGELITYLPAGQSVLLQLPQ

SEQ ID NO: 10326 - protein, 258 aa, Homo sapiens
MIAISAVSSALLFSLLCEASTVVLLNSTDSSPPTNNFTDIEAALKAQLDSADIPKARRKRYISQNDMIAILDYHNQVRGKVFPPAANMEYMVWDENLAKSAEAWAATCIWDHGPSYLLRFLGQNLSVRTGRYRSILQLVKPWYDEVKDYAFPYPQDCNPRCPMRCFGPMCTHYTQMVWATSNRIGCAIHTCQNMNVWGSVWRRAVYLVCNYAPKGNWIGEAPYKVGVPCSSCPPSYGGSCTDNLCFPGVTSNYLYWFK

SEQ ID NO: 10327 - protein, 258 aa, Homo sapiens; identical to SEQ ID NO: 10326

SEQ ID NO: 10328 - protein, 117 aa, Homo sapiens
MRASSFLIVVVFLIAGTLVLEAAVTGVPVKGQDTVKGRVPFNGQDPVKGQVSVKGQDKVKAQEPVKGPVSTKPGSCPIILIRCAMLNPPNRCLKDTDCPGIKKCCEGSCGMACFVPQ

SEQ ID NO: 10329 - protein, 77 aa, Homo sapiens [sequence omitted]

SEQ ID NO: 10330 - protein, 111 aa, Homo sapiens
MESRMWPALLLSHLLPLWPLLLLPLPPPAQGSSSSPRTPPAPARPPCARGGPSAPRHVCVWERAPPPSRSPRVPRSRRQVLPGTAPPATPSGFEEGPPSSQYPWAIVWGPT

SEQ ID NO: 10331 - protein, 172 aa, Homo sapiens
MESRMWPALLLSHLLPLWPLLLLPLPPPAQGSSSSPRTPPAPARPPCARGGPSAPRHVCVWERAPPPSRSPRVPRSRRQVLPGTAPPATPSGFEEGPPSSQYPWAIVWGPTVSREDGGDPNSANPGFLDYGFAAPHGLATPHPNSDSMRGDGDGLILGEAPATLRPFLFGGR

SEQ ID NO: 10332 - protein, 282 aa, Homo sapiens
MESRMWPALLLSHLLPLWPLLLLPLPPPAQGSSSSPRTPPAPARPPCARGGPSAPRHVCVWERAPPPSRSPRVPRSRRQVLPGTAPPATPSGFEEGPPSSQYPWAIVWGPTVSREDGGDPNSANPGFLDYGFAAPHGLATPHPNSDSMRGDGDGLILGEAPATLRPFLFGGRGEGVDPQLYVTITISIIIVLVATGIIFKFCWDRSQKRRRPSGQQGALRQEESQQPLTDLSPAGVTVLGAFGDSPTPTPDHEEPRGGPRPGMPHPKGAPAFQLNRIPLVNL

SEQ ID NO: 10333 - protein, 282 aa, Homo sapiens; identical to SEQ ID NO: 10332

SEQ ID NO: 10334 - protein, 276 aa, Homo sapiens
MESRMWPALLLSHLLPLWPLLLLPLPPPAQGSSSSPRTPPAPARPPCARGGPSAPRHVCVWERAPPPSRSPRVPRSRRQVLPGTAPPATPSGFEEGPPSSQYPWAIVWGPTVSREDGGDPNSANPGFLDYGFAAPHGLATPHPNSDSMRGDGDGLILGEAPATLRPFLFGGRGEGVDPQLYVTITISIIIVLVATGIIFKFCWDRSQKRRRPSGQQGALRQEESQQPLTDLSPAGVTVLGAFGDSPTPTPDHEEPRGGPRPGMPHPKGAPAFQLNR

SEQ ID NO: 10335 - protein, 27 aa, Homo sapiens
KNMELNVYGDDVEVDYRSYEGMVEMVS

SEQ ID NO: 10336 - protein, 395 aa, Homo sapiens
MAVTDSLSRAATVLATVLLLSFGSVAASHIEDQAEQFFRSGHTNNWAVLVCTSRFWFNYRHVANTLSVYRSVKRLGIPDSHIVLMLADDMACNPRNPKPATVFSHKNMELNVYGDDVEVDYRSYEVTVENFLRVLTGRIPPSTPRSKRLLSDDRSNILIYMTGHGGNGFLKFQDSEEITNIELADAFEQMWQKRRYNELLFIIDTCQGASMYERFYSPNIMALASSQVGEDSLSHQPDPAIGVHLMDRYTFYVLEFLEEINPASQTNMNDLFQVCPKSLCVSTPGHRTDLFQRDPKNVLITDFFGSVRKVEITTETIKLQQDSEIMESSYKEDQMDEKLMEPLKYAEQLPVAQIIHQKPKLKDWHPPGGFILGLWALIIMVFFKTYGIKHMKFIF

SEQ ID NO: 10337 - protein, 332 aa, Homo sapiens
MAVTDSLSRAATVLATVLLLSFGSVAASHIEDQAEQFFRSGHTNNWAVLVCTSRFWFNYRHVANTLSVYRSVKRLGIPDSHIVLMLADDMACNPRNPKPATVFSHKNMELNVYGDDVEVDYRSYEVTVENFLRVLTGRIPPSTPRSKRLLSDDRSNILIYMTGHGGNGFLKFQDSEEITNIELADAFEQMWQKRRYNELLFIIDTCQGASMYERFYSPNIMALASSQVGEDSLSHQPDPAIGVHLMDRYTFYVLEFLEEINPASQTNMNDLFQVCPKSLCVSTPGHRTDLFQRDPKNVLITDFFGSVRKVEITTETIKLQQDSEIMESRYSS

SEQ ID NO: 10338 - protein, 301 aa, Homo sapiens
MAVTDSLSRAATVLATVLLLSFGSVAASHIEVTVENFLRVLTGRIPPSTPRSKRLLSDDRSNILIYMTGHGGNGFLKFQDSEEITNIELADAFEQMWQKRRYNELLFIIDTCQGASMYERFYSPNIMALASSQVGEDSLSHQPDPAIGVHLMDRYTFYVLEFLEEINPASQTNMNDLFQVCPKSLCVSTPGHRTDLFQRDPKNVLITDFFGSVRKVEITTETIKLQQDSEIMESSYKEDQMDEKLMEPLKYAEQLPVAQIIHQKPKLKDWHPPGGFILGLWALIIMVFFKTYGIKHMKFIF

SEQ ID NO: 10339 - protein, 101 aa, Homo sapiens
MEAMWLLCVALAVLAWGFLWVWDSSERMKSREQGGRLGAESRTLLVIAHPDDEAMFFAPTVLGLARLRHWVYLLCFSAGISQMTQACSGTQSTWPESSFST

SEQ ID NO: 10340 - protein, 150 aa, Homo sapiens
MEAMWLLCVALAVLAWGFLWVWDSSERMKSREQGGRLGAESRTLLVIAHPDDEAMFFAPTVLGLARLRHWVYLLCFSAGNYYNQGETRKKELLQSCDVLGIPLSSVMIIDNRDFPDDPGMQWDTEHVARVLLQHIEVNGINLKDRANSRL

SEQ ID NO: 10341 - protein, 188 aa, Homo sapiens
MEAMWLLCVALAVLAWGFLWVWDSSERMKSREQGGRLGAESRTLLVIAHPDDEAMFFAPTVLGLARLRHWVYLLCFSAGNYYNQGETRKKELLQSCDVLGIPLSSVMIIDNRDFPDDPGMQWDTEHVARVLLQHIEVNGINLVVTFDAGGVSGHSNHIALYAAVRALHSEGKLPKESCPQPSRGSGWG

SEQ ID NO: 10342 - protein, 252 aa, Homo sapiens
MEAMWLLCVALAVLAWGFLWVWDSSERMKSREQGGRLGAESRTLLVIAHPDDEAMFFAPTVLGLARLRHWVYLLCFSAGNYYNQGETRKKELLQSCDVLGIPLSSVMIIDNRDFPDDPGMQWDTEHVARVLLQHIEVNGINLVVTFDAGGVSGHSNHIALYAAVRALHSEGKLPKGCSVLTLQSVNVLRKYISLLDLPLSLLHTQDVLFVLNSKEVAQAKKAMSCHRSQLLWFRRLYIIFSRYMRINSLSFL

SEQ ID NO: 10343 - protein, 244 aa, Homo sapiens
MEAMWLLCVALAVLAWGFLWVWDSSERMKSREQGGRLGAESRTLLVIAHPDDEAMFFAPTVLGLARLRHWVYLLCFSAGNYYNQGETRKKELLQSCDVLGIPLSSVMIIDNRDFPDDPGMQWDTEHVARVLLQHIEVNGINLVVTFDAGGVSGHSNHIALYAAVRVLCAHASVCECAAQVHLPSGSALVSASYAGCPLRAQQQRSGTGQESHVLPPQPAPLVPPPLHYLLPVHENQLTELPLKP

SEQ ID NO: 10344 - protein, 145 aa, Homo sapiens
MEAMWLLCVALAVLAWGFLWVWDSSERMKSREQGGRLGAESRTLLVIAHPDDEAMFFAPTVLGLARLRHWVYLLCFSAGNYYNQGETRKKELLQSCDVLGIPLSSVMIIDNRLSYLRLMCLSEAQGPQQHTPVSQSSDYSSLGMG

SEQ ID NO: 10345 - protein, 102 aa, Homo sapiens
VVTFDAGGVSGHSNHIALYAAVRVLCAHASVCECAAQVHLPSGSALVSASYAGCPLRAQQQRSGTGQESHVLPPQPAPLVPPPLHYLLPVHENQLTELPLKP

SEQ ID NO: 10346 - protein, 92 aa, Homo sapiens
  SITE 1: note = misc_feature - Xaa can be any naturally occurring amino acid
XCVALAVLAWGFLWVWDSSERMKSREQGGRLGAESRTLLVIAHPDDEAMFFAPTVLGLARLRHWVYLLCFSAVFRRELSEYTEGLTSEPLTA

SEQ ID NO: 10347 - protein, 580 aa, Homo sapiens
LALLVLLLLGPGGWCLAEPPRDSLREELVITPLPSGDVAATFQFRTRWDSELQREGVSHYRLFPKALGQLISKYSLRELHLSFTQGFWRTRYWGPPFLQAPSGAELWVWFQDTVTEREGSPTPSWDCPDCGARGGVGSRRVIPISGMWIPRGQSPRPTPDRPLSPSDTDHYFLRYAVLPREVVCTENLTPWKKLLPCSSKAGLSVLLKADRLFHTSYHSQAVHIRPVCRNARCTSISWELRQTLSVVFDAFITGQGKKDWSLFRMFSRTLTEPCPLASESRVYVDITTYNQDNETLEVHPPPTTTYQDVILGTRKTYAIYDLLDTAMINNSRNLNIQLKWKRPPENEAPPVPFLHAQRYVSGYGLQKGELSTLLYNTHPYRAFPVLLLDTVPWYLRLYVHTLTITSKGKENKPSYIHYQPAQDRLQPHLLEMLIQLPANSVTKVSIQFERALLKWTEYTPDPNHGFYVSPSVLSALVPSMVAAKPVDWEESPLFNSLFPVSDGSNYFVRLYTEPLLVNLPTPDFSMPYNVICLTCTVVAVCYGSFYNLLTRTFHIEEPRTGGLAKRLANLIRRARGVPPL

SEQ ID NO: 10348 - protein, 329 aa, Homo sapiens
LRYAVLPREVVCTENLTPWKKLLPCSSKAGLSVLLKADRLFHTSYHSQAVHIRPVCRNARCTSISWELRQTLSVVFDAFITGQGKKDWSLFRMFSRTLTEPCPLASESRVYVDITTYNQDNETLEVHPPPTTTYQDVILGTRKTYAIYDLLDTAMINNSRNLNIQLKWKRPPENEAPPVPFLHAQRYVSGYGLQKGELSTLLYNTHPYRAFPVLLLDTVPWYLRLYVHTLTITSKGKENKPSYIHYQPAQDRLQPHLLEMLIQLPANSVTKVSIQFERALLKWTEYTPDPNHGFYVSPSVLSALVPSMVAAKPVDWEESPLFNSLLPWT

SEQ ID NO: 10349 - protein, 476 aa, Homo sapiens
MAAAMPLALLVLLLLGPGGWCLAEPPRDSLREELVITPLPSGDVAATFQFRTRWDSELQREGDTDHYFLRYAVLPREVVCTENLTPWKKLLPCSSKAGLSVLLKADRLFHTSYHSQAVHIRPVCRNARCTSISWELRQTLSVVFDAFITGQGKKDWSLFRMFSRTLTEPCPLASESRVYVDITTYNQDNETLEVHPPPTTTYQDVILGTRKTYAIYDLLDTAMINNSRNLNIQLKWKRPPENEAPPVPFLHAQRYVSGYGLQKGELSTLLYNTHPYRAFPVLLLDTVPWYLRLYVHTLTITSKGKENKPSYIHYQPAQDRLQPHLLEMLIQLPANSVTKVSIQFERALLKWTEYTPDPNHGFYVSPSVLSALVPSMVAAKPVDWEESPLFNSLFPVSDGSNYFVRLYTEPLLVNLPTPDFSMPYNVICLTCTVVAVCYGSFYNLLTRTFHIEEPRTGGLAKRLANLIRRARGVPPL

SEQ ID NO: 10350 - protein, 275 aa, Homo sapiens
MAAAMPLALLVLLLLGPGGWCLAEPPRDSLREELVITPLPSGDVAATFQFRTRWDSELQREGDTDHYFLRYAVLPREVVCTENLTPWKKLLPCSSKAGLSVLLKADRLFHTSYHSQAVHIRPVCRNARCTSISWELRQTLSVVFDAFITGQGKKDWSLFRMFSRTLTEPCPLASESRVYVDITTYNQDNETLEVHPPPTTTYQDVILGTRKTYAIYDLLDTAMINNSRNLNIQLKWKRPPENGYIHYQPAQDRLQPHLLEMLIQLPANSVTKVSI

SEQ ID NO: 10351 - protein, 101 aa, Homo sapiens
MAAAMPLALLVLLLLGPGGWCLAEPPRDSLREELVITPLPSGDVAATFQFRTRWDSELQREGDTDHYFLRYAVLPREVVCTENLTPWKKLLPCSSKASLCC

SEQ ID NO: 10352 - protein, 384 aa, Homo sapiens
MAAAMPLALLVLLLLGPGGWCLAEPPRDSLREELVITPLPSGDVAATFQFRTRWDSELQREGDWSLFRMFSRTLTEPCPLASESRVYVDITTYNQDNETLEVHPPPTTTYQDVILGTRKTYAIYDLLDTAMINNSRNLNIQLKWKRPPENEAPPVPFLHAQRYVSGYGLQKGELSTLLYNTHPYRAFPVLLLDTVPWYLRLYVHTLTITSKGKENKPSYIHYQPAQDRLQPHLLEMLIQLPANSVTKVSIQFERALLKWTEYTPDPNHGFYVSPSVLSALVPSMVAAKPVDWEESPLFNSLFPVSDGSNYFVRLYTEPLLVNLPTPDFSMPYNVICLTCTVVAVCYGSFYNLLTRTFHIEEPRTGGLAKRLANLIRRARGVPPL

SEQ ID NO: 10353 - protein, 441 aa, Homo sapiens
MAAAMPLALLVLLLLGPGGWCLAEPPRDSLREELVITPLPSGDVAATFQFRTRWDSELQREGGLSVLLKADRLFHTSYHSQAVHIRPVCRNARCTSISWELRQTLSVVFDAFITGQGKKDWSLFRMFSRTLTEPCPLASESRVYVDITTYNQDNETLEVHPPPTTTYQDVILGTRKTYAIYDLLDTAMINNSRNLNIQLKWKRPPENEAPPVPFLHAQRYVSGYGLQKGELSTLLYNTHPYRAFPVLLLDTVPWYLRLYVHTLTITSKGKENKPSYIHYQPAQDRLQPHLLEMLIQLPANSVTKVSIQFERALLKWTEYTPDPNHGFYVSPSVLSALVPSMVAAKPVDWEESPLFNSLFPVSDGSNYFVRLYTEPLLVNLPTPDFSMPYNVICLTCTVVAVCYGSFYNLLTRTFHIEEPRTGGLAKRLANLIRRARGVPPL

SEQ ID NO: 10354 - protein, 96 aa, Homo sapiens
MAAAMPLALLVLLLLGPGGWCLAEPPRDSLREELVITPLPSGDVAATFQFRTRWDSELQREGGRPLCAAEGRSLVPHQLPLPGSAYPPCLQKCTLY

SEQ ID NO: 10355 - protein, 522 aa, Homo sapiens
MAAAMPLALLVLLLLGPGGWCLAEPPRDSLREELVITPLPSGDVAATFQFRTRWDSELQREGVSHYRLFPKALGQLISKYSLRELHLSFTQGFWRTRYWGPPFLQAPSDTDHYFLRYAVLPREVVCTENLTPWKKLLPCSSKAGLSVLLKADRLFHTSYHSQAVHIRPVCRNARCTSISWELRQTLSVVFDAFITGQGKKDWSLFRMFSRTLTEPCPLASESRVYVDITTYNQDNETLEVHPPPTTTYQDVILGTRKTYAIYDLLDTAMINNSRNLNIQLKWKRPPENEAPPVPFLHAQRYVSGYGLQKGELSTLLYNTHPYRAFPVLLLDTVPWYLRLYVHTLTITSKGKENKPSYIHYQPAQDRLQPHLLEMLIQLPANSVTKVSIQFERALLKWTEYTPDPNHGFYVSPSVLSALVPSMVAAKPVDWEESPLFNSLFPVSDGSNYFVRLYTEPLLVNLPTPDFSMPYNVICLTCTVVAVCYGSFYNLLTRTFHIEEPRTGGLAKRLANLIRRARGVPPL

SEQ ID NO: 10356 - protein, 314 aa, Homo sapiens
MAAAMPLALLVLLLLGPGGWCLAEPPRDSLREELVITPLPSGDVAATFQFRTRWDSELQREGVSHYRLFPKALGQLISKYSLRELHLSFTQGFWRTRYWGPPFLQAPSGAELVDKSWKELSNVLSGIFCASLNFIDSTNTVTPTASFKPLGLANDTDHYFLRYAVLPREVVCTENLTPWKKLLPCSSKAGLSVLLKADRLFHTSYHSQAVHIRPVCRNARCTSISWELRQTLSVVFDAFITGQGKKDWSLFRMFSRTLTEPCPLASESRVYVDITTYNQDNETLEVHPPPTTTYQDVILGTRKTYAIYDLLDTA

SEQ ID NO: 10357 - protein, 240 aa, Homo sapiens
MAAAMPLALLVLLLLGPGGWCLAEPPRDSLREELVITPLPSGDVAATFQFRTRWDSELQREGVSHYRLFPKALGQLISKYSLRELHLSFTQGFWRTRYWGPPFLQAPSGAELWVWFQDTVTDVDKSWKELSNVLSGIFCASLNFIDSTNTVTPTASFKPLGLANDTDHYFLRYAVLPREVVCTENLTPWKKLLPCSSKAGLSVLLKADRLFHTSYHSQAVHIRPVCRHLLGAEADPVSCI

SEQ ID NO: 10358 - protein, 578 aa, Homo sapiens
MAAAMPLALLVLLLLGPGGWCLAEPPRDSLREELVITPLPSGDVAATFQFRTRWDSELQREGVSHYRLFPKALGQLISKYSLRELHLSFTQGFWRTRYWGPPFLQAPSGAELWVWFQDTVTDVDKSWKELSNVLSGIFCASLNFIDSTNTVTPTASFKPLGLANDTDHYFLRYAVLPREVVCTENLTPWKKLLPCSSKAGLSVLLKADRLFHTSYHSQAVHIRPVCRNARCTSISWELRQTLSVVFDAFITGQGKKDWSLFRMFSRTLTEPCPLASESRVYVDITTYNQDNETLEVHPPPTTTYQDVILGTRKTYAIYDLLDTAMINNSRNLNIQLKWKRPPENEAPPVPFLHAQRYVSGYGLQKGELSTLLYNTHPYRAFPVLLLDTVPWYLRLYVHTLTITSKGKENKPSYIHYQPAQDRLQPHLLEMLIQLPANSVTKVSIQFERALLKWTEYTPDPNHGFYVSPSVLSALVPSMVAAKPVDWEESPLFNSLFPVSDGSNYFVRLYTEPLLVNLPTPDFSMPYNVICLTCTVVAVCYGSFYNLLTRTFHIEEPRTGGLAKRLANLIRRARGVPPL

SEQ ID NO: 10359 - protein, 511 aa, Homo sapiens
MAAAMPLALLVLLLLGPGGWCLAEPPRDSLREELVITPLPSGDVAATFQFRTRWDSELQREGVSHYRLFPKALGQLISKYSLRELHLSFTQGFWRTRYWGPPFLQAPSGAELWVWFQDTVTDVDKSWKELSNVLSGIFCASLNFIDSTNTVTPTASFKPLGLANDTDHYFLRYAVLPREVVCTENLTPWKKLLPCSSKAGLSVLLKADRLFHTSYHSQAVHIRPVCRNARCTSISWELRQTLSVVFDAFITGQGKKDWSLFRMFSRTLTEPCPLASESRVYVDITTYNQDNETLEVHPPPTTTYQDVILGTRKTYAIYDLLDTAMINNSRNLNIQLKWKRPPENGYIHYQPAQDRLQPHLLEMLIQLPANSVTKVSIQFERALLKWTEYTPDPNHGFYVSPSVLSALVPSMVAAKPVDWEESPLFNSLFPVSDGSNYFVRLYTEPLLVNLPTPDFSMPYNVICLTCTVVAVCYGSFYNLLTRTFHIEEPRTGGLAKRLANLIRRARGVPPL

SEQ ID NO: 10360 - protein, 331 aa, Homo sapiens
MAAAMPLALLVLLLLGPGGWCLAEPPRDSLREELVITPLPSGDVAATFQFRTRWDSELQREGVSHYRLFPKALGQLISKYSLRELHLSFTQGFWRTRYWGPPFLQAPSGAELWVWFQDTVTDVDKSWKELSNVLSGIFCASLNFIDSTNTVTPTASFKPLGLANDTDHYFLRYAVLPREVVCTENLTPWKKLLPCSSKAGLSVLLKADRLFHTSYHSQAVHIRPVCRNARCTSISWELRQTLSVVFDAFITGQGKKALRSVSQTGPSSGCSPEPSRSPAPWLQRAESMWTSPPTTSPAFVSPGQRDIRGAPTPDHYISGRHPRHSEDLCHL

SEQ ID NO: 10361 - protein, 300 aa, Homo sapiens
MAAAMPLALLVLLLLGPGGWCLAEPPRDSLREELVITPLPSGDVAATFQFRTRWDSELQREGVSHYRLFPKALGQLISKYSLRELHLSFTQGFWRTRYWGPPFLQAPSGAELWVWFQDTVTDVDKSWKELSNVLSGIFCASLNFIDSTNTVTPTASFKPLGLANDTDHYFLRYAVLPREVVCTENLTPWKKLLPCSSKAGLSVLLKADRLFHTSYHSQAVHIRPVCRNARCTSISWELRQTLSVVFDAFITGQGKKDWSLFRMFSRTLTEPCPLASESRVYVDITTYNQPCLCVPRTTRH

SEQ ID NO: 10362 - protein, 505 aa, Homo sapiens
MAAAMPLALLVLLLLGPGGWCLAEPPRDSLREELVITPLPSGDVAATFQFRTRWDSELQREGVSHYRLFPKALGQLISKYSLRELHLSFTQGFWRTRYWGPPFLQAPSGAELWVWFQDTVTDVDKSWKELSNVLSGIFCASLNFIDSTNTVTPTASFKPLGLANDTDHYFLRYAVLPREVVCTENLTPWKKLLPCSSKAGLSVLLKADRLFHTSYHSQAVHIRPVCRNARCTSISWELRQTLSVVFDAFITGQGKKDWSLFRMFSRTLTEPCPLASESRVYVDITTYNQDNETLEVHPPPTTTYQDVILGTRKTYAIYDLLDTAMINNSRNLNIQLKWKRPPENEAPPVPFLHAQRYVSGYGLQKGELSTLLYNTHPYRAFPVLLLDTVPWYLRLYVHTLTITSKGKENKPSYIHYQPAQDRLQPHLLEMLIQLPANSVTKVSIQFERALLKWTEYTPDPNHGFYVSPSVLSALVPSMVAAKPVDWEESPLFNSLEPVTCAALRC

SEQ ID NO: 10363 - protein, 499 aa, Homo sapiens
MAAAMPLALLVLLLLGPGGWCLAEPPRDSLREELVITPLPSGDVAATFQFRTRWDSELQREGVSHYRLFPKALGQLISKYSLRELHLSFTQGFWRTRYWGPPFLQAPSGAELWVWFQDTVTDVDKSWKELSNVLSGIFCASLNFIDSTNTVTPTASFKPLGLANDTDHYFLRYAVLPREVVCTENLTPWKKLLPCSSKAGLSVLLKADRLFHTSYHSQAVHIRPVCRNARCTSISWELRQTLSVVFDAFITGQGKKDWSLFRMFSRTLTEPCPLASESRVYVDITTYNQDNETLEVHPPPTTTYQDVILGTRKTYAIYDLLDTAMINNSRNLNIQLKWKRPPENEAPPVPFLHAQRYVSGYGLQKGELSTLLYNTHPYRAFPVLLLDTVPWYLRLYVHTLTITSKGKENKPSYIHYQPAQDRLQPHLLEMLIQLPANSVTKVSIQFERALLKWTEYTPDPNHGFYVSPSVLSALVPSMVAAKPVDWEESPLFNSLLPWT

SEQ ID NO: 10364 - protein, 499 aa, Homo sapiens; identical to SEQ ID NO: 10363

SEQ ID NO: 10365 - protein, 300 aa, Homo sapiens; identical to SEQ ID NO: 10361

SEQ ID NO: 10366 - protein, 429 aa, Homo sapiens
MAAAMPLALLVLLLLGPGGWCLAEPPRDSLREELVITPLPSGDVAATFQFRTRWDSELQREGVSHYRLFPKALGQLISKYSLRELHLSFTQGFWRTRYWGPPFLQAPSGAELWVWFQDTVTDVDKSWKELSNVLSGIFCASLNFIDSTNTVTPTASFKPLGLANDTDHYFLRYAVLPREVVCTENLTPWKKLLPCSSKAGLSVLLKADRLFHTSYHSQAVHIRPVCRNARCTSISWELRQTLSVVFDAFITGQGKKDWSLFRMFSRTLTEPCPLASESRVYVDITTYNQDNETLEVHPPPTTTYQDVILGTRKTYAIYDLLDTAMINNSRNLNIQLKWKRPPENEAPPVPFLHAQRYVSGYGLQKGELSTLLYNTHPYRAFPVLLLDTVPWYLRLLHPLPACPGPAATPPPGDADSAAGQLSHQGFHPV

SEQ ID NO: 10367 - protein, 432 aa, Homo sapiens
MAAAMPLALLVLLLLGPGGWCLAEPPRDSLREELVITPLPSGDVAATFQFRTRWDSELQREGVSHYRLFPKALGQLISKYSLRELHLSFTQGFWRTRYWGPPFLQAPSGAELWVWFQDTVTDVDKSWKELSNVLSGIFCASLNFIDSTNTVTPTASFKPLGLANDTDHYFLRYAVLPREVVCTENLTPWKKLLPCSSKAGLSVLLKADRLFHTSYHSQAVHIRPVCRNARCTSISWELRQTLSVVFDAFITGQGKKDWSLFRMFSRTLTEPCPLASESRVYVDITTYNQDNETLEVHPPPTTTYQDVILGTRKTYAIYDLLDTAMINNSRNLNIQLKWKRPPENGYIHYQPAQDRLQPHLLEMLIQLPANSVTKVSIQFERALLKWTEYTPDPNHGFYVSPSVLSALVPSMVAAKPVDWEESPLFNSLLPWT

SEQ ID NO: 10368 - protein, 495 aa, Homo sapiens
MAAAMPLALLVLLLLGPGGWCLAEPPRDSLREELVITPLPSGDVAATFQFRTRWDSELQREGVSHYRLFPKALGQLISKYSLRELHLSFTQGFWRTRYWGPPFLQAPSGAELWVWFQDTVTDVDKSWKELSNVLSGIFCASLNFIDSTNTVTPTASFKPLGLANDTDHYFLRYAVLPREVVCTENLTPWKKLLPCSSKAGLSVLLKADRLFHTSYHSQAVHIRPVCRNARCTSISWELRQTLSVVFDAFITGQGKKDWSLFRMFSRTLTEPCPLASESRVYVDITTYNQDNETLEVHPPPTTTYQDVILGTRKTYAIYDLLDTAMINNSRNLNIQLKWKRPPENEAPPVPFLHAQRYVSGYGLQKGELSTLLYNTHPYRAFPVLLLDTVPWYLRLYVHTLTITSKGKENKPSYIHYQPAQDRLQPHLLEMLIQLPANSVTKVSIQFERALLKWTEYTPDPNHGFYVSPSVLSALVPSMVAAKPVDWEESPLFNSL

SEQ ID NO: 10369 - protein, 232 aa, Homo sapiens
MAAAMPLALLVLLLLGPGGWCLAEPPRDSLREELVITPLPSGDVAATFQFRTRWDSELQREGVSHYRLFPKALGQLISKYSLRELHLSFTQGFWRTRYWGPPFLQAPSGAELWVWFQDTVTDVDKSWKELSNVLSGIFCASLNFIDSTNTVTPTASFKPLGLANDTDHYFLRYAVLPREVVCTENLTPWKKLLPCSSKAGLSVLLKADRLFHTSYHSQAVHIRPVCRVSHGE

SEQ ID NO: 10370 - protein, 203 aa, Homo sapiens
MAAAMPLALLVLLLLGPGGWCLAEPPRDSLREELVITPLPSGDVAATFQFRTRWDSELQREGVSHYRLFPKALGQLISKYSLRELHLSFTQGFWRTRYWGPPFLQAPSGAELWVWFQDTVTDVDKSWKELSNVLSGIFCASLNFIDSTNTVTPTASFKPLGLANDTDHYFLRYAVLPREVVCTENLTPWKKLLPCSSKASLCC

SEQ ID NO: 10371 - protein, 242 aa, Homo sapiens
MAAAMPLALLVLLLLGPGGWCLAEPPRDSLREELVITPLPSGDVAATFQFRTRWDSELQREGVSHYRLFPKALGQLISKYSLRELHLSFTQGFWRTRYWGPPFLQAPSGAELWVWFQDTVTDVDKSWKELSNVLSGIFCASLNFIDSTNTVTPTASFKPLGLANDTDHYFLRYAVLPREVVCTENLTPWKKLLPCSSKGFSYLFPSPPGRPLCAAEGRSLVPHQLPLPGSAYPPCLQKCTLY

SEQ ID NO: 10372 - protein, 355 aa, Homo sapiens [sequence omitted]

SEQ ID NO: 10373 - protein, 198 aa, Homo sapiens
MAAAMPLALLVLLLLGPGGWCLAEPPRDSLREELVITPLPSGDVAATFQFRTRWDSELQREGVSHYRLFPKALGQLISKYSLRELHLSFTQGFWRTRYWGPPFLQAPSGAELWVWFQDTVTDVDKSWKELSNVLSGIFCASLNFIDSTNTVTPTASFKPLGLANGRPLCAAEGRSLVPHQLPLPGSAYPPCLQKCTLY

SEQ ID NO: 10374 - protein, 140 aa, Homo sapiens
MAAAMPLALLVLLLLGPGGWCLAEPPRDSLREELVITPLPSGDVAATFQFRTRWDSELQREGVSHYRLFPKALGQLISKYSLRELHLSFTQGFWRTRYWGPPFLQAPSGAELWVWFQDTVTEFSSQLWTLKEGAEVAPGQ

SEQ ID NO: 10375 - protein, 140 aa, Homo sapiens; identical to SEQ ID NO: 10374

SEQ ID NO: 10376 - protein, 140 aa, Homo sapiens; identical to SEQ ID NO: 10374

SEQ ID NO: 10377 - protein, 140 aa, Homo sapiens; identical to SEQ ID NO: 10374

SEQ ID NO: 10378 - protein, 123 aa, Homo sapiens
MAAAMPLALLVLLLLGPGGWCLAEPPRDSLREELVITPLPSGDVAATFQFRTRWDSELQREGVSHYRLFPKALGQLISKYSLRELHLSFTQGFWRTRYWGPPFLQAPSGAELWVWFQDTVTEH

SEQ ID NO: 10379 - protein, 123 aa, Homo sapiens; identical to SEQ ID NO: 10378

SEQ ID NO: 10380 - protein, 123 aa, Homo sapiens; identical to SEQ ID NO: 10378

SEQ ID NO: 10381 - protein, 183 aa, Homo sapiens
MAAAMPLALLVLLLLGPGGWCLAEPPRDSLREELVITPLPSGDVAATFQFRTRWDSELQREGVSHYRLFPKALGQLISKYSLRELHLSFTQGFWRTRYWGPPFLQAPSGAELWVWFQDTVTELVPLPDVLPNPHGALPPGFREPSLCGHHHLQPGQRDIRGAPTPDHYISGRHPRHSEDLCHL

SEQ ID NO: 10382 - protein, 316 aa, Homo sapiens
MAAAMPLALLVLLLLGPGGWCLAEPPRDSLREELVITPLPSGDVAATFQFRTRWDSELQREGVSHYRLFPKALGQLISKYSLRELHLSFTQGFWRTRYWGPPFLQAPSGAELWVWFQDTVTEPLSPSDTDHYFLRYAVLPREVVCTENLTPWKKLLPCSSKAGLSVLLKADRLFHTSYHSQAVHIRPVCRNARCTSISWELRQTLSVVFDAFITGQGKKDWSLFRMFSRTLTEPCPLASESRVYVDITTYNQDNETLEVHPPPTTTYQDVILGTRKTYAIYDLLDTAMINNSRNLNIQLKWKRPPENEAPPVPFLH

SEQ ID NO: 10383 - protein, 128 aa, Homo sapiens
MAAAMPLALLVLLLLGPGGWCLAEPPRDSLREELVITPLPSGDVAATFQFRTRWDSELQREGVSHYRLFPKALGQLISKYSLRELHLSFTQGFWRTRYWGPPFLQAPSGAELWVWFQDTVTEQASLCC

SEQ ID NO: 10384 - protein, 116 aa, Homo sapiens
MAAAMPLALLVLLLLGPGGWCLAEPPRDSLREELVITPLPSGDVAATFQFRTRWDSELQREGVSHYRLFPKALGQLISKYSLRELHLSFTQGFWRTRYWGPPFLQAPSGLAASCGL

SEQ ID NO: 10385 - protein, 393 aa, Homo sapiens
MAAAMPLALLVLLLLGPGGWCLAEPPRDSLREELVITPLPSGDVAATFQFRTRWDSELQREGVSHYRLFPKALGQLISKYSLRELHLSFTQGFWRTRYWGPPFLQAPSVWINLGRSSVMSSQGSSAPLSTSSTPPTQSLPLPPSNPWVWPMAGLSVLLKADRLFHTSYHSQAVHIRPVCRNARCTSISWELRQTLSVVFDAFITGQGKKDWSLFRMFSRTLTEPCPLASESRVYVDITTYNQDNETLEVHPPPTTTYQDVILGTRKTYAIYDLLDTAMINNSRNLNIQLKWKRPPENEAPPVPFLHAQRYVSGYGLQKGELSTLLYNTHPYRAFPVLLLDTVPWYLRLYVHTLTITSKGKENKPSYIHYQPAQDRLQPHLLEMLIQLPANSVT

SEQ ID NO: 10386 - protein, 191 aa, Homo sapiens
MAAAMPLALLVLLLLGPGGWCLAEPPRDSLREELVITPLPSGDVAATFQFRTRWDSELQREGVSHYRLFPKALGQLISKYSLRELHLSFTQGFWRTRYWGPPFLQAPSVWINLGRSSVMSSQGSSAPLSTSSTPPTQSLPLPPSNPWVWPMTLTTTFCAMLCCRGRWSAPKTSPPGRSSCPVVPRQASLCC

SEQ ID NO: 10387 - protein, 318 aa, Homo sapiens
MAAAMPLALLVLLLLGPGGWCLAEPPRDSLREELVITPLPSGDVAATFQFRTRWDSELQREGVWINLGRSSVMSSQGSSAPLSTSSTPPTQSLPLPPSNPWVWPMAGLSVLLKADRLFHTSYHSQAVHIRPVCRNARCTSISWELRQTLSVVFDAFITGQGKKDWSLFRMFSRTLTEPCPLASESRVYVDITTYNQDNETLEVHPPPTTTYQDVILGTRKTYAIYDLLDTAMINNSRNLNIQLKWKRPPENEAPPVPFLHAQRYVSGYGLQKGELSTLLYNTHPYRAFPVLLLDTVPWYLRLYVHTLTITSKGKENKP

SEQ ID NO: 10388 - protein, 171 aa, Homo sapiens
MAAAMPLALLVLLLLGPGGWCLAEPPRDSLREELVITPLPSGDVAATFQFRTRWDSELQREGVWINLGRSSVMSSQGSSAPLSTSSTPPTQSLPLPPSNPWVWPMTLTTTFCAMLCCRGRWSAPKTSPPGRSSCPVVPRPLCAAEGRSLVPHQLPLPGSAYPPCLQKCTLY

SEQ ID NO: 10389 - protein, 145 aa, Homo sapiens
MAAAMPLALLVLLLLGPGGWCLAEPPRDSLREELVITPLPSGDVAATFQFRTRWDSELQREGVWINLGRSSVMSSQGSSAPLSTSSTPPTQSLPLPPSNPWVWPMTLTTTFCAMLCCRGRWSAPKTSPPGRSSCPVVPRQASLCC

SEQ ID NO: 10390 - protein, 145 aa, Homo sapiens; identical to SEQ ID NO: 10389

SEQ ID NO: 10391 - protein, 18 aa, Homo sapiens
RWDSELQREGGLAASCGL

SEQ ID NO: 10392 - protein, 77 aa, Homo sapiens
SHYRLFPKALGQLISKYSLRELHLSFTQGFWRTRYWGPPFLQAPSGAELWVWFQDTVTEFSSQLWTLKEGAEVAPGQ

SEQ ID NO: 10393 - protein, 61 aa, Homo sapiens
  SITE 1: note = misc_feature - Xaa can be any naturally occurring amino acid
XLIQLPANSVTKVSIQFERALLKWTEYTPDPNHGFYVRWEHGPSLCFSVAHLSSAPLCPAW

SEQ ID NO: 10394 - protein, 78 aa, Homo sapiens
  SITE 1: note = misc_feature - Xaa can be any naturally occurring amino acid
XLQPHLLEMLIQLPANSVTKVSIQFERALLKWTEYTPDPNHGFYVSPSVLSALVPSMVAAKPVDWEESPLFNSLLPWT

SEQ ID NO: 10395 - protein, 532 aa, Homo sapiens
  SITE 1: note = misc_feature - Xaa can be any naturally occurring amino acid
XQLISKYSLRELHLSFTQGFWRTRYWGPPFLQAPSGAELWVWFQDTVTDVDKSWKELSNVLSGIFCASLNFIDSTNTVTPTASFKPLGLANDTDHYFLRYAVLPREVVCTENLTPWKKLLPCSSKAGLSVLLKADRLFHTSYHSQAVHIRPVCRNARCTSISWELRQTLSVVFDAFITGQGKKDWSLFRMFSRTLTEPCPLASESRVYVDITTYNQDNETLEVHPPPTTTYQDVILGTRKTYAIYDLLDTAMINNSRNLNIQLKWKRPPENEAPPVPFLHAQRYVSGYGLQKGELSTLLYNTHPYRAFPVLLLDTVPWYLRLYVHTLTITSKGKENKPSEDLSPEPGPQPALSCPLQVPQTLISQGYIHYQPAQDRLQPHLLEMLIQLPANSVTKVSIQFERALLKWTEYTPDPNHGFYVSPSVLSALVPSMVAAKPVDWEESPLFNSLFPVSDGSNYFVRLYTEPLLVNLPTPDFSMPYNVICLTCTVVAVCYGSFYNLLTRTFHIEEPRTGGLAKRLANLIRRARGVPPL

SEQ ID NO: 10396 - protein, 12 aa, Homo sapiens
  SITE 1: note = misc_feature - Xaa can be any naturally occurring amino acid
XWVWFQDTVTEH

SEQ ID NO: 10397 - protein, 128 aa, Homo sapiens
  SITE 1: note = misc_feature - Xaa can be any naturally occurring amino acid
XYAIYDLLDTAMINNSRNLNIQLKWKRPPENEAPPVPFLHAQRYVSGYGLQKGELSTLLYNTHPYRAFPVLLLDTVPWYLRLYVHTLTITSKGKENKPSEDLSPEPGPQPALSCPLQVPQTLISQGSS

SEQ ID NO: 10398 - protein, 136 aa, Homo sapiens
  SITE 1: note = misc_feature - Xaa can be any naturally occurring amino acid
XYQPAQDRLQPHLLEMLIQLPANSVTKVSIQFERALLKWTEYTPDPNHGFYVRFPVSDGSNYFVRLYTEPLLVNLPTPDFSMPYNVICLTCTVVAVCYGSFYNLLTRTFHIEEPRTGGLAKRLANLIRRARGVPPL

SEQ ID NO: 10399 - protein, 144 aa, Homo sapiens
  SITE 1: note = misc_feature - Xaa can be any naturally occurring amino acid
XYVSGYGLQKGELSTLLYNTHPYRAFPVLLLDTVPWYLRLYVHTLTITSKGKENKPSYIHYQPAQDRLQPHLLEMLIQLPANSVTKVSIQFERALLKWTEYTPDPNHGFYVSPSVLSALVPSMVAAKPVDWEESPLFNSLLPWT

SEQ ID NO: 10400 - protein, 213 aa, Homo sapiens
YNQDNETLEVHPPPTTTYQDVILGTRKTYAIYDLLDTAMINNSRNLNIQLKWKRPPENEAPPVPFLHAQRYVSGYGLQKGELSTLLYNTHPYRAFPVLLLDTVPWYLRLYVHTLTITSKGKENKPSYIHYQPAQDRLQPHLLEMLIQLPANSVTKVSIQFERALLKWTEYTPDPNHGFYVSPSVLSALVPSMVAAKPVDWEESPLFNSLLPWT

SEQ ID NO: 10401 - protein, 579 aa, Homo sapiens
MQICGSSVASVAAGTSFQVLGPVCWQQLDLKMAVRVLWGGLSLLRVLWCLLPQTGYVHPDEFFQSPEVMAEDILGVQAARPWEFYPSSSCRSVLFPLLISGSTFWLLRLWEELGPWPGLVSGYALLVGPRLLLTALSFALDGAVYHLAPPMGADRWNALALLSGSYVTLVFYTRTFSNTIEGLLFTWLLVLVSSHVTWGPTRKEPAPGPRWRSWLLGGIVAAGFFNRPTFLAFAVVPLYLWGTRGATNPGLKSLTREALVLLPGAALTAAVFVATDSWYFSSPATSRNLVLTPVNFLHYNLNPQNLARHGTHARLTHLAVNGFLLFGVLHAQALQAAWQRLQVGLQASAQMGLLRALGARSLLSSPRSYLLLLYFMPLALLSAFSHQEARFLIPLLVPLVLLCSPQTQPVPWKGTVVLFNALGALLFGCLHQGGLVPGLEYLEQVVHAPVLPSTPTHYTLLFTHTYMPPRHLLHLPGLGAPVEVVDMGGTEDWALCQTLKSFTRQPACQVAGGPWLCRLFVVTPGTTRRAVEKCSFPFKNETLLFPHLTLEDPPALSSLLSGAWRDHLSLHIVELGEET

SEQ ID NO: 10402 - protein, 92 aa, Homo sapiens
MQICGSSVASVAAGTSFQVLGPVCWQQLDLKMAVRVLWGGLSLLRVLWCLLPQTGYVHPDEFFQSPEVMAGPSPTPLRDSSSRGCWCWYPPM

SEQ ID NO: 10403 - protein, 49 aa, Homo sapiens
  SITE 1: note = misc_feature - Xaa can be any naturally occurring amino acid
XRVLWGGLSLLRVLWCLLPQTGYVHPDEFFQSPEVMAGSGRSWGRGLAW

SEQ ID NO: 10404 - protein, 805 aa, Homo sapiens
MAASGVPRGCDILIVYSPDAEEWCQYLQTLFLSSRQVRSQKILTHRLGPEASFSAEDLSLFLSTRCVVVLLSAELVQHFHKPALLPLLQRAFHPPHRVVRLLCGVRDSEEFLDFFPDWAHWQELTCDDEPETYVAAVKKAISEDSGCDSVTDTEPEDEKVVSYSKQQNLPTVTSPGNLMVVQPDRIRCGAETTVYVIVRCKLDDRVATEAEFSPEDSPSVRMEAKVENEYTISVKAPNLSSGNVSLKIYSGDLVVCETVISYYTDMEEIGNLLSNAANPVEFMCQAFKIVPYNTETLDKLLTESLKNNIPASGLHLFGINQLEEEDMMTNQRDEELPTLLHFAAKYGLKNLTALLLTCPGALQAYSVANKHGHYPNTIAEKHGFRDLRQFIDEYVETVDMLKSHIKEELMHGEEADAVYESMAHLSTDLLMKCSLNPGCDEDLYESMAAFVPAATEDLYVEMLQASTSNPIPGDGFSRATKDSMIRKFLEGNSMGMTNLERDQCHLGQEEDVYHTVDDDEAFSVDLASRPPVPVPRPETTAPGAHQLPDNEPYIFKVFAEKSQERPGNFYVSSESIRKGPPVRPWRDRPQSSIYDPFAGMKTPGQRQLITLQEQVKLGIVNVDEAVLHFKEWQLNQKKRSESFRFQQENLKRLRDSITRRQREKQKSGKQTDLEITVPIRHSQHLPAKVEFGVYESGPRKSVIPPRTELRRGDWKTDSTSSTASSTSNRSSTRSLLSVSSGMEGDNEDNEVPEVTRSRSPGPPQVDGTPTMSLERPPRVPPRAASQRPPTRETFHPPPPVPPRGR

SEQ ID NO: 10405 - protein, 404 aa, Homo sapiens
MRFFTSVACYGSCLFASELLIRCKDWLKGRPALFTALLACVLYLCEWTGAKHVPGSSYVEMLQASTSNPIPGDGFSRATKDSMIRKFLEGNSMGMTNLERDQCHLGQEEDVYHTVDDDEAFSVDLASRPPVPVPRPETTAPGAHQLPDNEPYIFKVFAEKSQERPGNFYVSSESIRKGPPVRPWRDRPQSSIYDPFAGMKTPGQRQLITLQEQVKLGIVNVDEAVLHFKEWQLNQKKRSESFRFQQENLKRLRDSITRRQREKQKSGKQTDLEITVPIRHSQHLPAKVEFGVYESGPRKSVIPPRTELRRGDWKTDSTSSTASSTSNRSSTRSLLSVSSGMEGDNEDNEVPEVTRSRSPGPPQVDGTPTMSLERPPRVPPRAASQRPPTRETFHPPPPVPPRGR

SEQ ID NO: 10406 - protein, 627 aa, Homo sapiens
MVVQPDRIRCGAETTVYVIVRCKLDDRVATEAEFSPEDSPSVRMEAKVENEYTISVKAPNLSSGNVSLKIYSGDLVVCETVISYYTDMEEIGNLLSNAANPVEFMCQAFKIVPYNTETLDKLLTESLKNNIPASGLHLFGINQLEEEDMMTNQRDEELPTLLHFAAKYGLKNLTALLLTCPGALQAYSVANKHGHYPNTIAEKHGFRDLRQFIDEYVETVDMLKSHIKEELMHGEEADAVYESMAHLSTDLLMKCSLNPGCDEDLYESMAAFVPAATEDLYVEMLQASTSNPIPGDGFSRATKDSMIRKFLEGNSMGMTNLERDQCHLGQEEDVYHTVDDDEAFSVDLASRPPVPVPRPETTAPGAHQLPDNEPYIFKVFAEKSQERPGNFYVSSESIRKGPPVRPWRDRPQSSIYDPFAGMKTPGQRQLITLQEQVKLGIVNVDEAVLHFKEWQLNQKKRSESFRFQQENLKRLRDSITRRQREKQKSGKQTDLEITVPIRHSQHLPAKVEFGVYESGPRKSVIPPRTELRRGDWKTDSTSSTASSTSNRSSTRSLLSVSSGMEGDNEDNEVPEVTRSRSPGPPQVDGTPTMSLERPPRVPPRAASQRPPTRETFHPPPPVPPRGR

SEQ ID NO: 10407 - protein, 173 aa, Homo sapiens
MLLAWVQAFLVSNMLLAEAYGSGGCFWDNGHLYREDQTSPAPGLRCLNWLDAQSGLASAPVSGAGNHSYCRNPDEDPRGPWCYVSGEAGVPEKRPCEDLRCPETTSQALPAFTTEIQEASEGPGADEVQVFAPANALPARSEAAAVQPVIGISQRVRMNSKEKKDLGTLGGRI

SEQ ID NO: 10408 - protein, 263 aa, Homo sapiens
MLLAWVQAFLVSNMLLAEAYGSGGCFWDNGHLYREDQTSPAPGLRCLNWLDAQSGLASAPVSGAGNHSYCRNPDEDPRGPWCYVSGEAGVPEKRPCEDLRCPETTSQALPAFTTEIQEASEGPGADEVQVFAPANALPARSEAAAVQPVIGISQRVRMNSKEKKDLGTLGYVLGITMMVIIIAIGAGIILGYSYKRGKDLKEQHDQKVCEREMQRITLPLSAFTNPTCEIVDEKTVVVHTSQTPVDPQEGTTPLMGQAGTPGA

SEQ ID NO: 10409 - protein, 234 aa, Homo sapiens
MLLAWVQAFLVSNMLLAEAYGSGGCFWDNGHLYREDQTSPAPGLRCLNWLDAQSGLASAPVSGAGNHSYCRNPDEDPRGPWCYVSGEAGVPEKRPCEDLRCPETTSQALPAFTTEIQEASEGPGADEVQVFAPANALPARSEAAAVQPVIGISQRVRMNSKEKKDLGTLGYVLGITMMVIIIAIGAGIILGYSYKRSVASLLGPLRRRGGRYTKSNFVAFLPKRKQDVENQLKM

SEQ ID NO: 10410 - protein, 145 aa, Homo sapiens [sequence omitted]

SEQ ID NO: 10411 - protein, 303 aa, Homo sapiens
MGRPLLLPLLPLLLPPAFLQPSGSTGSGPSYLYGVTQPKHLSASMGGSVEIPFSFYYPWELATAPDVRISWRRGHFHRQSFYSTRPPSIHKDYVNRLFLNWTEGQKSGFLRISNLQKQDQSVYFCRVELDTRSSGRQQWQSIEGTKLSITQAVTTTTQRPSSMTTTWRLSSTTTTTGLRVTQGKRRSDSWHISLETAVGVAVAVTVLGIMILGLICLLRWRRRKGQQRTKATTPAREPFQNTEEPYENIRNEGQNTDPKLNPKDDGIVYASLALSSSTSPRAPPSHRPLKSPQNETLYSVLKA

SEQ ID NO: 10412 - protein, 175 aa, Homo sapiens
MGRPLLLPLLPLLLPPAFLQPSGSTGSGPSYLYGVTQPKHLSASMGGSVEIPFSFYYPWELATAPDVRISWRRGHFHRQSFYSTRPPSIHKDYVNRLFLNWTEGQKSGFLRISNLQKQDQSVYFCRVELDTRSSGRQQWQSIEGTKLSITQGNPSKTQRSHMRISGMKDKIQIPS

SEQ ID NO: 10413 - protein, 166 aa, Homo sapiens
MGRPLLLPLLPLLLPPAFLQPSGSTGSGPSYLYGVTQPKHLSASMGGSVEIPFSFYYPWELATAPDVRISWRRGHFHRQSFYSTRPPSIHKDYVNRLFLNWTEGQKSGFLRISNLQKQDQSVYFCRVELDTRSSGRQQWQSIEGTKLSITQGQQRTKATTPAREPF

SEQ ID NO: 10414 - protein, 230 aa, Homo sapiens
MGRPLLLPLLPLLLPPAFLQPSGSTGSGPSYLYGVTQPKHLSASMGGSVEIPFSFYYPWELATAPDVRISWRRGHFHRQSFYSTRPPSIHKDYVNRLFLNWTEGQKSGFLRISNLQKQDQSVYFCRVELDTRSSGRQQWQSIEGTKLSITQGQQRTKATTPAREPFQNTEEPYENIRNEGQNTDPKLNPKDDGIVYASLALSSSTSPRAPPSHRPLKSPQNETLYSVLKA

SEQ ID NO: 10415 - protein, 226 aa, Homo sapiens
MGRPLLLPLLPLLLPPAFLQPSGSTGSGPSYLYGVTQPKHLSASMGGSVEIPFSFYYPWELATAPDVRISWRRGHFHRQSFYSTRPPSIHKDYVNRLFLNWTEGQKSGFLRISNLQKQDQSVYFCRVELDTRSSGRQQWQSIEGTKLSITQGQQRTKATTPAREPFQNTEEPYENIRNEGQNTDPKLNPKLHLTQSTSQPPSPQEPPERDPVLCLKGLTNGQPSQD

SEQ ID NO: 10416 - protein, 108 aa, Homo sapiens
MGRASYGGSPVGHQSSSDHPRAKTCRSPVRDGPRTLCGVPTVALSLHFLREASSGSRTCGRRTSLCTSAKSSWTYRSGRLSWQSIKGTHLTITQALRQPLHRAPLLPG

SEQ ID NO: 10417 - protein, 271 aa, Homo sapiens
MGRASYGGSPVGHQSSSDHPRAKTCRSPVRDGPRTLCGVPTVALSLHFLREASSGSRTCGRRTSLCTSAKSSWTYRSGRLSWQSIKGTHLTITQALRQPLHRAPLLPGQLCWSPRPLEKNKAMGRPLLLPLLLLLQPPAFLQPGLCEPALSELDRGSGERLPQDLKPAEGGPVCVFLPSRAGHPEIREAAVAVHQGDQTHHHPGCHNHHHLEAQQHNHHSRPQGHRKQRALRIMAPKSGHCHQGCIGCRCAQNCHFGTAVPPPPVVEEKER

SEQ ID NO: 10418 - protein, 46 aa, Homo sapiens
MGRPLLLPLLLLLQPPAFLQPEGQESGFLRISNLRKEDQSVYFCRV

SEQ ID NO: 10419 - protein, 121 aa, Homo sapiens
MGRPLLLPLLLLLQPPAFLQPGGSTGSGPSYLYGVTQPKHLSASMGGSVEIPFSFYYPWELAIVPNVRISWRRGHFHGQSFYSTRPPSIHKDYVNRLFLNWTEGQESGFLRISNLRKEDQS

SEQ ID NO: 10420 - protein, 127 aa, Homo sapiens
MGRPLLLPLLLLLQPPAFLQPGGSTGSGPSYLYGVTQPKHLSASMGGSVEIPFSFYYPWELAIVPNVRISWRRGHFHGQSFYSTRPPSIHKDYVNRLFLNWTEGQESGFLRISNLRKEDQSVYFCRV

SEQ ID NO: 10421 - protein, 127 aa, Homo sapiens; identical to SEQ ID NO: 10420

SEQ ID NO: 10422 - protein, 127 aa, Homo sapiens; identical to SEQ ID NO: 10420

SEQ ID NO: 10423 - protein, 127 aa, Homo sapiens; identical to SEQ ID NO: 10420

SEQ ID NO: 10424 - protein, 138 aa, Homo sapiens
MGRPLLLPLLLLLQPPAFLQPGGSTGSGPSYLYGVTQPKHLSASMGGSVEIPFSFYYPWELAIVPNVRISWRRGHFHGQSFYSTRPPSIHKDYVNRLFLNWTEGQESGFLRISNLRKEDQSVYFCRVELDTRRSGRQQ

SEQ ID NO: 10425 - protein, 227 aa, Homo sapiens
MGRPLLLPLLLLLQPPAFLQPGGSTGSGPSYLYGVTQPKHLSASMGGSVEIPFSFYYPWELAIVPNVRISWRRGHFHGQSFYSTRPPSIHKDYVNRLFLNWTEGQESGFLRISNLRKEDQSVYFCRVELDTRRSGRQQLQSIKGTKLTITQAVTTTTTWRPSSTTTIAGLRVTESKGHSESWHLSLDTAIRVALAVAVLKTVILGLLCLLLLWWRRRKGSRAPSSDF

SEQ ID NO: 10426 - protein, 227 aa, Homo sapiens; identical to SEQ ID NO: 10425

SEQ ID NO: 10427 - protein, 60 aa, Homo sapiens
MGRPLLLPLLLLLQPPAFLQPGLCEPALSELDRGSGERLPQDLKPAEGGPVCVFLPSRAG

SEQ ID NO: 10428 - protein, 116 aa, Homo sapiens
MGPKDHMVTSSFCCQSDGCNSAFLSVPLTNLTENGLMCPACTASFRDKCMGPMTHCTGKENHCVSLSGHVQAGIFKPRFAMRGCATESMCFTKPGAEVPTGTNVLFLHHIECTHSP

SEQ ID NO: 10429 - protein, 116 aa, Homo sapiens; identical to SEQ ID NO: 10428

SEQ ID NO: 10430 - protein, 116 aa, Homo sapiens; identical to SEQ ID NO: 10428

SEQ ID NO: 10431 - protein, 204 aa, Homo sapiens
MRLSRRPETFLLAFVLLCTLLGLGCPLHCEICTAAGSRCHGQMKTCSSDKDTCVLLVGKATSKGKELVHTYKGCIRSQDCYSGVISTTMGPKDHMVTSSFCCQSDGCNSAFLSVPLTNLTENGLMCPACTASFRDKCMGPMTHCTGKENHCVSLSGHVQAGIFKPRFAMRGCATESMCFTKPGAEVPTGTNVLFLHHIECTHSP

SEQ ID NO: 10432 - protein, 228 aa, Homo sapiens
MWVQTHPSSASYKSWGPGTADTHTMRLSRRPETFLLAFVLLCTLLGLGCPLHCEICTAAGSRCHGQMKTCSSDKDTCVLLVGKATSKGKELVHTYKGCIRSQDCYSGVISTTMGPKDHMVTSSFCCQSDGCNSAFLSVPLTNLTENGLMCPACTASFRDKCMGPMTHCTGKENHCVSLSGHVQAGIFKPRFAMRGCATESMCFTKPGAEVPTGTNVLFLHHIECTHSP

SEQ ID NO: 10433 - protein, 146 aa, Homo sapiens
MRLLQLLFRASPATLLLVLCLQLGANKAQDNTRKIIIKNFDIPKSVRPNDEVTAVLAVQTELKECMVVKTYLISSIPLQGAFNYKYTACLCDDNPKTFYWDFYTNRTVQIAAVVDVIRELGICPDDAAVIPIKNNRFYTIEILKVE

SEQ ID NO: 10434 - protein, 118 aa, Homo sapiens
MERGVKNKQDFMDLSICTREKLAHVRNCKTGSSGIPVKLVTNLFNLDFPQDWQLYQYHVTYIPDLASRRLRIALLYSHSELSNKAKAFDGAILFLSQKLEEKVTELSSETQRGETIKM

SEQ ID NO: 10435 - protein, 453 aa, Homo sapiens
MERGVKNKQDFMDLSICTREKLAHVRNCKTGSSGIPVKLVTNLFNLDFPQDWQLYQYHVTYIPDLASRRLRIALLYSHSELSNKAKAFDGAILFLSQKLEEKVTELSSETQRGETIKMTITLKRELPSSSPVCIQVFNIIFRKILKKLSMYQIGRNFYNPSEPMEIPQHKLSLWPGFAISVSYFERKLLFSADVSYKVLRNETVLEFMTALCQRTGLSCFTQTCEKQLIGLIVLTRYNNRTYSIDDIDWSVKPTHTFQKRDGTEITYVDYYKQQYDITVSDLNQPMLVSLLKKKRNDNSEAQLAHLIPELCFLTGLTDQATSDFQLMKAVAEKTRLSPSGRQQRLARLVDNIQRNTNARFELETWGLHFGSQISLTGRIVPSEKILMQDHICQPVSAADWSKDIRTCKILNAQSLNTWLILCSDRTEYVAESFLNCLRRVAGSMGFNVDYPKM

SEQ ID NO: 10436 - protein, 203 aa, Homo sapiens
MGMLFFVGIRKVILFLLTPNSAGALNKWYKYNHDLPARIIVYRAGVGDGQLKTLIEYEVPQLLSSVAESSSNTSSRLSVIVVRKKCMPRFFTEMNRTVQNPPLGTVVDSEATRNEWYDFYLISQVACRGTVSPTYYNVIYDDNGLKPDHMQRLTFKLCHLYYNWPGIVSVPAPCQYAHKLTFLVAQSIHKEPSLELANHLFYL

SEQ ID NO: 10437 - protein, 495 aa, Homo sapiens
MGPRSVDLSNNEASSSNGFLGTSRISTNDKYGISSGDAGSTFMERGVKNKQDFMDLSICTREKLAHVRNCKTGSSGIPVKLVTNLFNLDFPQDWQLYQYHVTYIPDLASRRLRIALLYSHSELSNKAKAFDGAILFLSQKLEEKVTELSSETQRGETIKMTITLKRELPSSSPVCIQVFNIIFRKILKKLSMYQIGRNFYNPSEPMEIPQHKLSLWPGFAISVSYFERKLLFSADVSYKVLRNETVLEFMTALCQRTGLSCFTQTCEKQLIGLIVLTRYNNRTYSIDDIDWSVKPTHTFQKRDGTEITYVDYYKQQYDITVSDLNQPMLVSLLKKKRNDNSEAQLAHLIPELCFLTGLTDQATSDFQLMKAVAEKTRLSPSGRQQRLARLVDNIQRNTNARFELETWGLHFGSQISLTGRIVPSEKILMQDHICQPVSAADWSKDIRTCKILNAQSLNTWLILCSDRTEYVAESFLNCLRRVAGSMGFNVDYPKM

SEQ ID NO: 10438 - protein, 852 aa, Homo sapiens
MSGRARVKARGIARSPSATEVGRIQASPLPRSVDLSNNEASSSNGFLGTSRISTNDKYGISSGDAGSTFMERGVKNKQDFMDLSICTREKLAHVRNCKTGSSGIPVKLVTNLFNLDFPQDWQLYQYHVTYIPDLASRRLRIALLYSHSELSNKAKAFDGAILFLSQKLEEKVTELSSETQRGETIKMTITLKRELPSSSPVCIQVFNIIFRKILKKLSMYQIGRNFYNPSEPMEIPQHKLSLWPGFAISVSYFERKLLFSADVSYKVLRNETVLEFMTALCQRTGLSCFTQTCEKQLIGLIVLTRYNNRTYSIDDIDWSVKPTHTFQKRDGTEITYVDYYKQQYDITVSDLNQPMLVSLLKKKRNDNSEAQLAHLIPELCFLTGLTDQATSDFQLMKAVAEKTRLSPSGRQQRLARLVDNIQRNTNARFELETWGLHFGSQISLTGRIVPSEKILMQDHICQPVSAADWSKDIRTCKILNAQSLNTWLILCSDRTEYVAESFLNCLRRVAGSMGFNVDYPKIIKVQENPAAFVRAIQQYVDPDVQLVMCILPSNQKTYYDSIKKYLSSDCPVPSQCVLARTLNKQGMMMSIATKIAMQMTCKLGGELWAVEIPLKSLMVVGIDVCKDALSKDVMVVGCVASVNPRITRWFSRCILQRTMTDVADCLKVFMTGALNKWYKYNHDLPARIIVYRAGVGDGQLKTLIEYEVPQLLSSVAESSSNTSSRLSVIVVRKKCMPRFFTEMNRTVQNPPLGTVVDSEATRNEWYDFYLISQVACRGTVSPTYYNVIYDDNGLKPDHMQRLTFKLCHLYYNWPGIVSVPAPCQYAHKLTFLVAQSIHKEPSLELANHLFYL

SEQ ID NO: 10439 - protein, 181 aa, Homo sapiens
MRRRRAAVAAGFCASFLLGSVLNVLFAPGSEPPRPGQSPEPSPAPGPGRRGGRGELARQIRARYEEAGPRLPAQAPPARARAWAAPRFATCPARSTWAQATPRPCTGSACPAVPRWRSRRWTLAATIWAAACASSGYGGAAIGWRPTSCLRRWCCWSGCGTPTCCSSMATATRTARTSQTP

SEQ ID NO: 10440 - protein, 493 aa, Homo sapiens
MRRRRAAVAAGFCASFLLGSVLNVLFAPGSEPPRPGQSPEPSPAPGPGRRGGRGELARQIRARYEEVQRYSRGGPGPGAGRPERRRLMDLAPGGPGLPRPRPPWARPLSDGAPGWPPAPGPGSPGPGPRLGCAALRNVSGAQYMGSGYTKAVYRVRLPGGAAVALKAVDFSGHDLGSCVREFGVRRGCYRLAAHKLLKEMVLLERLRHPNVLQLYGYCYQDSEDIPDTLTTITELGAPVEMIQLLQTSWEDRFRICLSLGRLLHHLAHSPLGSVTLLDFRPRQFVLVDGELKVTDLDDARVEETPCAGSTDCILEFPARNFTLPCSAQGWCEGMNEKRNLYNAYRFFFTYLLPHSAPPSLRPLLDSIVNATGELAWGVDETLAQLEKVLHLYRSGQYLQNSTASSSTEYQCIPDSTIPQEDYRCWPSYHHGSCLLSVFNLAEAVDVCESHAQCRAFVVTNQTTWTGRQLVFFKTGWSQVVPDPNKTTYVKASG

SEQ ID NO: 10441 - protein, 4074 aa, Homo sapiens
MTAWLISLMSIEVLLLAVRHLSLHIEPEEGSLAGGTWITVIFDGLELGVLYPNNGSQLEIHLVNVNMVVPALRSVPCDVFPVFLDLPVVTCRTRSVLSEAHEGLYFLEAYFGGQLVSSPNPGPRDSCTFKFSKAQTPIVHQVYPPSGVPGKLIHVYGWIITGRLETFDFDAEYIDSPVILEAQGDKWVTPCSLINRQMGSCYPIQEDHGLGTLQCHVEGDYIGSQNVSFSVFNKGKSMVHKKAWLISAKQDLFLYQTHSEILSVFPETGSLGGRTNITITGDFFDNSAQVTIAGIPCDIRHVSPRKIECTTRAPGKDVRLTTPQPGNRGLLFEVGDAVEGLELTEATPGYRWQIVPNASSPFGFWSQEGQPFRARLSGFFVAPETNNYTFWIQADSQASLHFSWSEEPRTKVKVASISVGTADWFDSWEQNRDEGTWQQKTPKLELLGGAMYYLEAEHHGIAPSRGMRIGVQIHNTWLNPDVVTTYLREKHQIRVRAQRLPEVQVLNVSGRGNFFLTWDNVSSQPIPANATAHLIQTTIEELLAVKCKLEPLWSNILLRLGFERGPEVSNSDGDLTSGTEPFCGRFSLRQPRHLVLTPPAAQKGYRLDQYTHLCLAYKGHMNKILKMIVSFTIGFQNMVKNTTCDWSLTRTSPESWQFDCTDLWETCVRCFGDLQPPPANSPVLVHQINLLPLAQETGLFYVDEIIIADTNVTVSQADSGTARPGGNLVESVSVVGSPPVYSVTSWLAGCGTELPLITARSVPTEGTEEGSGLVLVTTQRRQRTSPPLGGHFRIQLPNTVISDVPVQISAHHLHQLLQNNADDFTSRYLNASDFTVKEDLYTCYEHVWTLSWSTQIGDLPNFIRVSDENLTGVNPAAATRVVYDGGVFLGPIFGDMLATANQHTQVVVRVNDVPAHCPGSCSFQYLQGSTPCVHSVWYSIDGDINLMIYITGTGFSGDSQFLQVTVNKTSCKVIFSNQTNVVCQTDLLPVGMHRILMLVRPSGLAISATGEDLFLNVKPRLDMVEPSRAADIGGLWATIRGSSLEGVSLILFGSYSCAINVATSNSSRIQCKVPPRGKDGRIVNVTVIRGDYSAVLPRAFTYVSSLNPVIVTLSRNISNIAGGETLVIGVARLMNYTDLDVEVHVQDALAPVHTQSAWGLEVALPPLPAGLHRISVSINGVSIHSQGVDLHIQYLTEVFSIEPCCGSLLGGTILSISGIGFSRDPALVWVLVGNRSCDIVNLTEASIWCETLPAPQIPDAGAPTVPAAVEVWAGNRFFARGPSPSLVGKGFTFMYEAAATPVVTAMQGEITNSSLSLHVGGSNLSNSVILLGNLNCDVETQSFQGNVSLSGCSIPLHSLEAGIYPLQVRQKQMGFANMSVVLQQFAVMPRIMAIFPSQGSACGGTILTVRGLLLNSRRRSVRVDLSGPFTCVILSLGDHTILCQVSLEGDPLPGASFSLNVTVLVNGLTSECQGNCTLFIREEASPVMDALSTNTSGSLTTVLIRGQRLATTADEPMVFVDDQLPCNVTFFNASHVVCQTRDLAPGPHYLSVFYTRNGYACSGNVSRHFYIMPQVFHYFPKNFSLHGGSLLTIEGTGLRGQNTTSVYIDQQTCLTVNIGAELIRCIVPTGNGSVALEIEVDGLWYHIGVIGYNKAFTPELISISQSDDILTFAVAQISGAANIDIFIGMSPCVGVSGNHTVLQCVVPSLPAGEYHVRGYDCIRGWASSALVFTSRVIITAVTENFGCLGGRLVHVFGAGFSPGNVSAAVCGAPCRVLANATVSAFSCLVLPLDVSLAFLCGLKREEDSCEAARHTYVQCDLTVAMATEQLLESWPYLYICEESSQCLFVPDHWAESMFPSFSGLFISPKLERDEVLIYNSSCNITMETEAEMECETPNQPITVKITEIRKRWGQNTQGNFSLQFCRRWSRTHSWFPERLPQDGDNVTVENGQLLLLDTNTSILNLLHIKGGKLIFMAPGPIELRAHAILVSDGGELRIGSEDKPFQGRAQITLYGSSYSTPFFPYGVKFLAVRNGTLSLHGSLPEVIVTCLRATAHALDTVLALEDAVDWNPGDEVVIISGTGVKGAKPMEEIVTVETVQDTDLYLKSPLRYSHNFTENWVAGEHHILKATVALLSRSITIQGNLTNEREKLLVSCQEANAPEGNLQHCLYSMSEKMLGSRDMGARVIVQSFPEEPSQVQLKGVQFQVLGQAFHKHLSSLTLVGAMRESFIQGCTVRNSFSRGLSMCGTLGLKVDSNVFYNILGHALLVGTCTEMRYISWEAIHGRKDDWSGHGNIIRNNVIIQVSGAEGLSNPEMLTPSGIYICSPTNVIEGNRVCGAGYGYFFHLMTNQTSQAPLLSFTQNIAHSCTRYGLFVYPKFQPPWDNVTGTTLFQSFTVWESAGGAQIFRSSNLRLKNFKVYSCRDFGIDVLESDANTSVTDSLLLGHFAHKGSLCMSSGIKTPKRWELMVSNTTFVNFDLINCVAIRTCSDCSQGQGGFTVKTSQLKFTNSSNLVAFPFPHAAILEDLDGSLSGKNRSHILASMETLSASCLVNSSFGRVVHGSACGGGVLFHRMSIGLANTPEVSYDLTMTDSRNKTTTVNYVRDTLSNPRGWMALLLDQETYSLQSENLWINRSLQYSATFDNFAPGNYLLLVHTDLPPYPDILLRCGSRVGLSFPFLPSPGQNQGCDWFFNSQLRQLTYLVSGEGQVQVILRVKEGMPPTISASTSAPESALKWSLPETWQGVEEGWGGYNNTIPGPGDDVLILPNRTVLVDTDLPFFKGLYVMGTLDFPVDRSNVLSVACMVIAGGELKVGTLENPLEKEQKLLILLRASEGVFCDRMNGIHIDPGTIGVYGKVHLYSAYPKNSWTHLGADIASGNERIIVEDAVDWRPHDKIVLSSSSYEPHEAEVLTVKEVKGHHVRIYERLKHRHIGSVHVTEDGRHIRLAAEVGLLTRNIQIQPDVSCRGRLFVGSFRKSSREEFSGVLQLLNVEIQNFGSPLYSSVEFSNVSAGSWIISSTLHQSCGGGIHAAASHGVLLNDNIVFGTAGHGIDLEGQAYTVTNNLVVLMTQPAWSTIWVAGIKVNQVKDINLHGNVVAGSERLGFHIRGHKCSSCELLWSDNVAHSSLHGLHLYKESGLDNCTRISGFLAFKNFDYGAMLHVENSVEIENITLVDNTIGLLAVVYVFSAPQNSVKKVQIVLRNSVIVATSSSFDCIQDKVKPHSANLTSTDRAPSNPRGGRIGILWPVFTSEPNQWPQEPWHKVRNDHSISGIMKLQDVTFSSFVKSCYSDDLDVCILPNAENSGIMHPITAERTRMLKIKDKNKFYFPSLQPRKDLGKVVCPELDCASPRKYLFKDLDGRALGLPPPVSVFPKTEAEWTASFFNAGTFREEQKCTYQFLMQGFICKQTDQVVLILDSADAIWAIQKLYPVVSVTSGFVDVFSSVNANIPCSTSGSVSTFYSILPIRQITKVCFMDQTPQVLRFFLLGNKSTSKLLLAVFYHELQSPHVFLGESFIPPTLVQSASLLLNESIGANYFNIMDNLLYVVLQGEEPIEIRSGVSIHLALTVMVSVLEKGWEIVILERLTNFLQIGQNQIRFIHEMPGHEETLKAIADSRAKRKRNCPTVTCTSHYRRVGQRRPLMMEMNSHRASPPMTVETISKVIVIEIGDSPTVRSTGMISSLSSNKLQNLAHRVITAQQTGVLENVLNMTIGALLVTQSKGVIGYGNTSSFKTGNLIYIRPYALSILVQPSDGEVGNELPVQPQLVFLDEQNRRVESLGPPSEPWTISASLEGASDSVLKGCTQAETQDGYVSFYNLAVLISGSNWHFIFTVTSPPGVNFTARSKPFAVLPVTRKEKSTIILAASLSSVASWLALSCLVCCWLKRSKSRKTKPEEIPESQTNNQNIHIHISSKRRESQGPKKEDTVVGEDMRMKVMLGKVNQCPHQLMNGVSRRKVSRHIVREEEAAVPAPGTTGITSHGHICAPGAPAQQVYLQETGNWKEGQEQLLRYQLAGQNQLLLLCPDFRQERQQLPGQSRLSKQSGSLGLSQEKKASCGATEAFCLHSVHPETIQEQL

SEQ ID NO: 10442 - protein, 3396 aa, Homo sapiens
MTAWLISLMSIEVLLLAVRHLSLHIEPEEGSLAGGTWITVIFDGLELGVLYPNNGSQLEIHLVNVNMVVPALRSVPCDVFPVFLDLPVVTCRTRSVLSEAHEGLYFLEAYFGGQLVSSPNPGPRDSCTFKFSKAQTPIVHQVYPPSGVPGKLIHVYGWIITGRLETFDFDAEYIDSPVILEAQGDKWVTPCSLINRQMGSCYPIQEDHGLGTLQCHVEGDYIGSQNVSFSVFNKGKSMVHKKAWLISAKQDLFLYQTHSEILSVFPETGSLGGRTNITITGDFFDNSAQVTIAGIPCDIRHVSPRKIECTTRAPGKDVRLTTPQPGNRGLLFEVGDAVEGLELTEATPGYRWQIVPNASSPFGFWSQEGQPFRARLSGFFVAPETNNYTFWIQADSQASLHFSWSEEPRTKVKVASISVGTADWFDSWEQNRDEGTWQQKTPKLELLGGAMYYLEAEHHGIAPSRGMRIGVQIHNTWLNPDVVTTYLREKHQIRVRAQRLPEVQVLNVSGRGNFFLTWDNVSSQPIPANATAHLIQTTIEELLAVKCKLEPLWSNILLRLGFERGPEVSNSDGDLTSGTEPFCGRFSLRQPRHLVLTPPAAQKGYRLDQYTHLCLAYKGHMNKILKMIVSFTIGFQNMVKNTTCDWSLTRTSPESWQFDCTDLWETCVRCFGDLQPPPANSPVLVHQINLLPLAQETGLFYVDEIIIADTNVTVSQADSGTARPGGNLVESVSVVGSPPVYSVTSWLAGCGTELPLITARSVPTEGTEEGSGLVLVTTQRRQRTSPPLGGHFRIQLPNTVISDVPVQISAHHLHQLLQNNADDFTSRYLNASDFTVKEDLYTCYEHVWTLSWSTQIGDLPNFIRVSDENLTGVNPAAATRVVYDGGVFLGPIFGDMLATANQHTQVVVRVNDVPAHCPGSCSFQYLQGSTPCVHSVWYSIDGDINLMIYITGTGFSGDSQFLQVTVNKTSCKVIFSNQTNVVCQTDLLPVGMHRILMLVRPSGLAISATGEDLFLNVKPRLDMVEPSRAADIGGLWATIRGSSLEGVSLILFGSYSCAINVATSNSSRIQCKVPPRGKDGRIVNVTVIRGDYSAVLPRAFTYVSSLNPVIVTLSRNISNIAGGETLVIGVARLMNYTDLDVEVHVQDALAPVHTQSAWGLEVALPPLPAGLHRISVSINGVSIHSQGVDLHIQYLTEVFSIEPCCGSLLGGTILSISGIGFSRDPALVWVLVGNRSCDIVNLTEASIWCETLPAPQIPDAGAPTVPAAVEVWAGNRFFARGPSPSLVGKGFTFMYEAAATPVVTAMQGEITNSSLSLHVGGSNLSNSVILLGNLNCDVETQSFQGNVSLSGCSIPLHSLEAGIYPLQVRQKQMGFANMSVVLQQFAVMPRIMAIFPSQGSACGGTILTVRGLLLNSRRRSVRVDLSGPFTCVILSLGDHTILCQVSLEGDPLPGASFSLNVTVLVNGLTSECQGNCTLFIREEASPVMDALSTNTSGSLTTVLIRGQRLATTADEPMVFVDDQLPCNVTFFNASHVVCQTRDLAPGPHYLSVFYTRNGYACSGNVSRHFYIMPQVFHYFPKNFSLHGGSLLTIEGTGLRGQNTTSVYIDQQTCLTVNIGAELIRCIVPTGNGSVALEIEVDGLWYHIGVIGYNKAFTPELISISQSDDILTFAVAQISGAANIDIFIGMSPCVGVSGNHTVLQCVVPSLPAGEYHVRGYDCIRGWASSALVFTSRVIITAVTENFGCLGGRLVHVFGAGFSPGNVSAAVCGAPCRVLANATVSAFSCLVLPLDVSLAFLCGLKREEDSCEAARHTYVQCDLTVAMATEQLLESWPYLYICEESSQCLFVPDHWAESMFPSFSGLFISPKLERDEVLIYNSSCNITMETEAEMECETPNQPITVKITEIRKRWGQNTQGNFSLQFCRRWSRTHSWFPERLPQDGDNVTVENGQLLLLDTNTSILNLLHIKGGKLIFMAPGPIELRAHAILVSDGGELRIGSEDKPFQGRAQITLYGSSYSTPFFPYGVKFLAVRNGTLSLHGSLPEVIVTCLRATAHALDTVLALEDAVDWNPGDEVVIISGTGVKGAKPMEEIVTVETVQDTDLYLKSPLRYSHNFTENWVAGEHHILKATVALLSRSITIQGNLTNEREKLLVSCQEANAPEGNLQHCLYSMSEKMLGSRDMGARVIVQSFPEEPSQVQLKGVQFQVLGQAFHKHLSSLTLVGAMRESFIQGCTVRNSFSRGLSMCGTLGLKVDSNVFYNILGHALLVGTCTEMRYISWEAIHGRKDDWSGHGNIIRNNVIIQVSGAEGLSNPEMLTPSGIYICSPTNVIEGNRVCGAGYGYFFHLMTNQTSQAPLLSFTQNIAHSCTRYGLFVYPKFQPPWDNVTGTTLFQSFTVWESAGGAQIFRSSNLRLKNFKVYSCRDFGIDVLESDANTSVTDSLLLGHFAHKGSLCMSSGIKTPKRWELMVSNTTFVNFDLINCVAIRTCSDCSQGQGGFTVKTSQLKFTNSSNLVAFPFPHAAILEDLDGSLSGKNRSHILASMETLSASCLVNSSFGRVVHGSACGGGVLFHRMSIGLANTPEVSYDLTMTDSRNKTTTVNYVRDTLSNPRGWMALLLDQETYSLQSENLWINRSLQYSATFDNFAPGNYLLLVHTDLPPYPDILLRCGSRVGLSFPFLPSPGQNQGCDWFFNSQLRQLTYLVSGEGQVQVILRVKEGMPPTISASTSAPESALKWSLPETWQGVEEGWGGYNNTIPGPGDDVLILPNRTVLVDTDLPFFKGLYVMGTLDFPVDRSNVLSVACMVIAGGELKVGTLENPLEKEQKLLILLRASEGVFCDRMNGIHIDPGTIGVYGKVHLYSAYPKNSWTHLGADIASGNERIIVEDAVDWRPHDKIVLSSSSYEPHEAEVLTVKEVKGHHVRIYERLKHRHIGSVHVTEDGRHIRLAAEVGLLTRNIQIQPDVSCRGRLFVGSFRKSSREEFSGVLQLLNVEIQNFGSPLYSSVEFSNVSAGSWIISSTLHQSCGGGIHAAASHGVLLNDNIVFGTAGHGIDLEGQAYTVTNNLVVLMTQPAWSTIWVAGIKVNQVKDINLHGNVVAGSERLGFHIRGHKCSSCELLWSDNVAHSSLHGLHLYKESGLDNCTRISGFLAFKNFDYGAMLHVENSVEIENITLVDNTIGLLAVVYVFSAPQNSVKKVQIVLRNSVIVATSSSFDCIQDKVKPHSANLTSTDRAPSNPRGGRIGILWPVFTSEPNQWPQEPWHKVRNDHSISGIMKLQDVTFSSFVKSCYSDDLDVCILPNAENSGIMHPITAERTRMLKIKDKNKFYFPSLQPRKDLGKVVCPELDCASPRKYLFKDLDGRALGLPPPVSVFPKTEAEWTASFFNAVTTEQALKISE

SEQ ID NO: 10443 - protein, 440 aa, Homo sapiens
MHKSSSIWGDAPPTPQPKCADFQSANLFEGTDLKVQFLLFVPSNPSCGQLVEGSSDLQNSGFNATLGTKLIIHGFRVLGTKPSWIDTFIRTLLRATNANVIAVDWIYGSTGVYFSAVKNVIKLSLEISLFLNKLLVLGVSESSIHIIGVSLGAHVGGMVGQLFGGQLGQITGLDPAGPEYTRASVEERLDAGDALFVEAIHTDTDNLGIRIPVGHVDYFVNGGQDQPGCPTFFYAGYSYLICDHMRAVHLYISALENSCPLMAFPCASYKAFLAGRCLDCFNPFLLSCPRIGLVEQGGVKIEPLPKEVKVYLLTTSSAPYCMHHSLVEFHLKELRNKDTNIEVTFLSSNITSSSKITIPKQQRYGKGIIAHATPQCQINQVKFKFQSSNRVWKKDRTTIIGKFCTALLPVNDREKMVCLPEPVNLQASVTVSCDLKIACV

SEQ ID NO: 10444 - protein, 456 aa, Homo sapiens
MPPGPWESCFWVGGLILWLSVGSSGDAPPTPQPKCADFQSANLFEGTDLKVQFLLFVPSNPSCGQLVEGSSDLQNSGFNATLGTKLIIHGFRVLGTKPSWIDTFIRTLLRATNANVIAVDWIYGSTGVYFSAVKNVIKLSLEISLFLNKLLVLGVSESSIHIIGVSLGAHVGGMVGQLFGGQLGQITGLDPAGPEYTRASVEERLDAGDALFVEAIHTDTDNLGIRIPVGHVDYFVNGGQDQPGCPTFFYAGYSYLICDHMRAVHLYISALENSCPLMAFPCASYKAFLAGRCLDCFNPFLLSCPRIGLVEQGGVKIEPLPKEVKVYLLTTSSAPYCMHHSLVEFHLKELRNKDTNIEVTFLSSNITSSSKITIPKQQRYGKGIIAHATPQCQINQVKFKFQSSNRVWKKDRTTIIGKFCTALLPVNDREKMVCLPEPVNLQASVTVSCDLKIACV

SEQ ID NO: 10445 - protein, 440 aa, Homo sapiens
MPPGPWESCFWVGGLILWLSVGSSGDAPPTPQPKCADFQSANLFEGTDLKVQFLLFVPSNPSCGQLVEGSSDLQNSGFNATLGTKLIIHGFRVLGTKPSWIDTFIRTLLRATNANVIAVDWIYGSTGVYFSAVKNVLGVSESSIHIIGVSLGAHVGGMVGQLFGGQLGQITGLDPAGPEYTRASVEERLDAGDALFVEAIHTDTDNLGIRIPVGHVDYFVNGGQDQPGCPTFFYAGYSYLICDHMRAVHLYISALENSCPLMAFPCASYKAFLAGRCLDCFNPFLLSCPRIGLVEQGGVKIEPLPKEVKVYLLTTSSAPYCMHHSLVEFHLKELRNKDTNIEVTFLSSNITSSSKITIPKQQRYGKGIIAHATPQCQINQVKFKFQSSNRVWKKDRTTIIGKFCTALLPVNDREKMVCLPEPVNLQASVTVSCDLKIACV

SEQ ID NO: 10446 - protein, 283 aa, Homo sapiens
MVGQLFGGQLGQITGLDPAGPEYTRASVEERLDAGDALFVEAIHTDTDNLGIRIPVGHVDYFVNGGQDQPGCPTFFYAGYSYLICDHMRAVHLYISALENSCPLMAFPCASYKAFLAGRCLDCFNPFLLSCPRIGLVEQGGVKIEPLPKEVKVYLLTTSSAPYCMHHSLVEFHLKELRNKDTNIEVTFLSSNITSSSKITIPKQQRYGKGIIAHATPQCQINQVKFKFQSSNRVWKKDRTTIIGKFCTALLPVNDREKMVCLPEPVNLQASVTVSCDLKIACV

SEQ ID NO: 10447 - protein, 224 aa, Homo sapiens
NVIKLSLEISLFLNKLLVLGVSESSIHIIGVSLGAHVGGMVGQLFGGQLGQITGLDPAGPEYTRASVEERLDAGDALFVEAIHTDTDNLGIRIPVGHVDYFVNGGQDQPGCPTFFYAGYSYLICDHMRAVHLYISALENSCPLMAFPCASYKAFLAGRCLDCFNPFLLSCPRIGLVEQGGVKIEPLPKEVKVYLLTTSSAPYCNAFQLLTVAPNHGISLKLGCW

SEQ ID NO: 10448 - protein, 165 aa, Homo sapiens
MGPLPVCLPIMLLLLLPSLLLLLLLPGPGSGEASRILRVHRRGILELAGTVGCVGPRTPIAYMKYGCFCGLGGHGQPRDAIDWCCHGHDCCYTRAEEAGCSPKTERYSWQCVNQSVLCGPAENKCQELLCKCDQEIANCLAQTEYNLKYLFYPQFLCEPDSPKCD

SEQ ID NO: 10449 - protein, 130 aa, Homo sapiens
MGPLPVCLPIMLLLLLPSLLLLLLLPGPGSGEASRILRVHRRGILELAGTVGCVGPRTPIAYMKYGCFCGLGGHGQPRDAIDWCCHGHDCCYTRAEEAGCSPKTERYSWQCVNQSVLCVLLCHPGWSAVV

SEQ ID NO: 10450 - protein, 70 aa, Homo sapiens
MALLSRPALTLLLLLMAAVVRCQEQAQTTDWRATLKTIRNGVHKIDTYLNAALDLLGGEDGLCQYKCSDA

SEQ ID NO: 10451 - protein, 187 aa, Homo sapiens
MALLSRPALTLLLLLMAAVVRCQEQAQTTDWRATLKTIRNGVHKIDTYLNAALDLLGGEDGLCQYKCSDGSKPFPRYGYKPSPPNGCGSPLFGLNIGIPSLTKCCNQHDRCYETCGKSKNDCDEEFQYCLSKICRDVQKTLGLTQHVQACETTVELLFDSVIHLGCKPYLDSQRAACRCHYEEKTDL

SEQ ID NO: 10452 - protein, 189 aa, Homo sapiens
MALLSRPALTLLLLLMAAVVRCQEQAQTTDWRATLKTIRNGVHKIDTYLNAALDLLGGEDGLCQYKCSDGSKPFPRYGYKPSPPNGCGSPLFGVHLNIGIPSLTKCCNQHDRCYETCGKSKNDCDEEFQYCLSKICRDVQKTLGLTQHVQACETTVELLFDSVIHLGCKPYLDSQRAACRCHYEEKTDL

SEQ ID NO: 10453 - protein, 195 aa, Homo sapiens
MKLASGFLVLWLSLGGGLAQSDTSPDTEESYSDWGLRHLRGSFESVNSYFDSFLELLGGKNGVCQYRCRYGKAPMPRPGYKPQEPNGCGSYFLGLKVPESMDLGIPAMTKCCNQLDVCYDTCGANKYRCDAKFRWCLHSICSDLKRSLGFVSKVEAACDSLVDTVFNTVWTLGCRPFMNSQRAACICAEEEKEEL

SEQ ID NO: 10454 - protein, 212 aa, Homo sapiens
MGLHLRPYRVGLLPDGLLFLLLLLMLLADPALPAGRHPPVVLGDNNRIPVIGPLKIREQQRSAVSTSWLLPYNYTWSPEKVFVQTPTINYTLRDYRKFFQDIGFEDGWLMRQDTEGLVEATMPPGVQLHCLYGTGVPTPDSFYYESFPDRDPKICFGDGDGTVNLKSALQCQAWQSRQEHQVLLQELPGSEHIEMLANATTLAYLKRVLLGP

SEQ ID NO: 10455 - protein, 318 aa, Homo sapiens
MGLHLRPYRVGLLPDGLLFLLLLLMLLADPALPAGRHPPVVLGWFTTKHPGPPSFLMVWMYVSLALGRPSHWSSWTPAKAAWVPISTPWWRALWAGATHGVRMSEGLPMTGAEPQRQPQAWKDKYIRAFVSLGAPWGGVAKTLRVLASGDNNRIPVIGPLKIREQQRSAVSTSWLLPYNYTWSPEKVFVQTPTINYTLRDYRKFFQDIGFEDGWLMRQDTEGLVEATMPPGVQLHCLYGTGVPTPDSFYYESFPDRDPKICFGDGDGTVNLKSALQCQAWQSRQEHQVLLQELPGSEHIEMLANATTLAYLKRVLLGP

SEQ ID NO: 10456 - protein, 86 aa, Homo sapiens
MGLHLRPYRVGLLPDGLLFLLLLLMLLADPALPAGRHPPVVLVEMGFHHIGQAGLELLTASDPLTSASQSAGITGMSPCALPRSPW

SEQ ID NO: 10457 - protein, 242 aa, Homo sapiens
MGLHLRPYRVGLLPDGLLFLLLLLMLLADPALPAGRHPPVVLVPGDLGNQLEAKLDKPTVVHYLCSKKTESYFTIWLNLELLLPVIIDCWIDNIRLECSGAISAHYTSASQAQALLLPQTPDNWDYRLVYNKTSRATQFPDGVDVRVPGFGKTFSLEFLDPSKSSVGSYFHTMVESLVGWGYTRGEDVRGAPYDWRRAPTAAAGLEGQVYPGLRVTGCALGGRGQDPARPGFRRQQPDPSHR

SEQ ID NO: 10458 - protein, 163 aa, Homo sapiens
MGLHLRPYRVGLLPDGLLFLLLLLMLLADPALPAGRHPPVVLVPGDLGNQLEAKLDKPTVVHYLCSKKTESYFTIWLNLELLLPVIIDCWIDNIRLVYNKTSRATQFPDGVDVRVPGFGKTFSLEFLDPSKSSVDENGPYFLALREMIEEMYQLYGGPVVLVA

SEQ ID NO: 10459 - protein, 412 aa, Homo sapiens
MGLHLRPYRVGLLPDGLLFLLLLLMLLADPALPAGRHPPVVLVPGDLGNQLEAKLDKPTVVHYLCSKKTESYFTIWLNLELLLPVIIDCWIDNIRLVYNKTSRATQFPDGVDVRVPGFGKTFSLEFLDPSKSSVGSYFHTMVESLVGWGYTRGEDVRGAPYDWRRAPNENGPYFLALREMIEEMYQLYGGPVVLVAHSMGNMYTLYFLQRQPQAWKDKYIRAFVSLGAPWGGVAKTLRVLASGDNNRIPVIGPLKIREQQRSAVSTSWLLPYNYTWSPEKVFVQTPTINYTLRDYRKFFQDIGFEDGWLMRQDTEGLVEATMPPGVQLHCLYGTGVPTPDSFYYESFPDRDPKICFGDGDGTVNLKSALQCQAWQSRQEHQVLLQELPGSEHIEMLANATTLAYLKRVLLGP

SEQ ID NO: 10460 - protein, 236 aa, Homo sapiens
MGLHLRPYRVGLLPDGLLFLLLLLMLLADPALPAGRHPPVVLVPGDLGNQLEAKLDKPTVVHYLCSKKTESYFTIWLNLELLLPVIIDCWIDNIRLVYNKTSRATQFPDGVDVRVPGFGKTFSLEFLDPSKSSVGSYFHTMVESLVGWGYTRGEDVRGAPYDWRRAPTAAAGLEGQVYPGLRVTGCALGGRGQDPARPGFRRQQPDPSHRAPEDPGAAAVSCLHQLAAALQLHMVT

SEQ ID NO: 10461 - protein, 298 aa, Homo sapiens
MGLHLRPYRVGLLPDGLLFLLLLLMLLADPALPAGRHPPVVLVPGDLGNQLEAKLDKPTVVHYLCSKKTESYFTIWLNLELLLPVIIDCWIDNIRLVYNKTSRATQFPDGVDVRVPGFGKTFSLEFLDPSKSSVGSYFHTMVESLVGWGYTRGEDVRGAPYDWRRAPTQWFRLQDPSHLTPAWLWPADENGPYFLALREMIEEMYQLYGGPVVLVAHSMGNMYTLYFLQRQPQAWKDKYIRAFVSLGAPWGGVAKTLRVLASGDNNRIPVIGPLKIREQQRSAVSTSWLLPYNYTWSP

SEQ ID NO: 10462 - protein, 119 aa, Homo sapiens
MIKCVIPGSDPFLEYNNYGCYCGLGGSGTPVDELDKCCQTHDNCYDQAKKLDSCKFLLDNPYTHTYSYSCSGSAITCSSKNKECEAFICNCDRNAAICFSKAPYNKAHKNLDTKKYCQS

SEQ ID NO: 10463 - protein, 148 aa, Homo sapiens
MKLLVLAVLLTVAAADSGISPRAVWQFRKMIKCVIPGSDPFLEYNNYGCYCGLGGSGTPVDELDKCCQTHDNCYDQAKKLDSCKFLLDNPYTHTYSYSCSGSAITCSSKNKECEAFICNCDRNAAICFSKAPYNKAHKNLDTKKYCQS

SEQ ID NO: 10464 - protein, 70 aa, Homo sapiens
MKLLVLAVLLTVAAADSGISPRAVWQFRKMIKCVIPGSDPFLEYNNYGCYCGLGGSGTPVDELDKQKQRV

SEQ ID NO: 10465 - protein, 144 aa, Homo sapiens
MKTLLLLAVIMIFGLLQAHGNLVNFHRMIKLTTGKEAALSYGFYGCHCGVGGRGSPKDATDRCCVTHDCCYKRLEKRGCGTKFLSYKFSNSGSRITCAKQDSCRSQLCECDKAAATCFARNKTTYNKKYQYYSNKHCRGSTPRC

SEQ ID NO: 10466 - protein, 144 aa, Homo sapiens; identical to SEQ ID NO: 10465

SEQ ID NO: 10467 - protein, 149 aa, Homo sapiens
MKVIAILTLLLFCSPTHSSFWQFQRRVKHITGRSAFFSYYGYGCYCGLGDKGIPVDDTDRHSPSSPSPYEKLKEFSCQPVLNSYQFHIVNGAVVCGCTLGPGASCHCRLKACECDKQSVHCFKESLPTYEKNFKQFSSQPRCGRHKPWC

SEQ ID NO: 10468 - protein, 150 aa, Homo sapiens
MLIATSFFLFFSSVVAAPTHSSFWQFQRRVKHITGRSAFFSYYGYGCYCGLGDKGIPVDDTDSPSSPSPYEKLKEFSCQPVLNSYQFHIVNGAVVCGCTLGPGASCHCRLKACECDKQSVHCFKESLPTYEKNFKQFSSQPRCGRHKPWC

SEQ ID NO: 10469 - protein, 62 aa, Homo sapiens
MELALLCGLVVMAGVIPIQGGILNLNKMVKQVTGKMPILSYWPYGCHCGLGGRGQPKDATDC

SEQ ID NO: 10470 - protein, 145 aa, Homo sapiens
MELALLCGLVVMAGVIPIQGGILNLNKMVKQVTGKMPILSYWPYGCHCGLGGRGQPKDATDWCCQTHDCCYDHLKTQGCSIYKDYYRYNFSQGNIHCSDKGSWCEQQLCACDKEVAFCLKRNLDTYQKRLRFYWRPHCRGQTPGC

SEQ ID NO: 10471 - protein, 142 aa, Homo sapiens
MKSPHVLVFLCLLVALVTGNLVQFGVMIEKMTGKSALQYNDYGCYCGIGGSHWPVDQTDWCCHAHDCCYGRLEKLGCEPKLEKYLFSVSERGIFCAGRTTCQRLTCECDKRAALCFRRNLGTYNRKYAHYPNKLCTGPTPPC

SEQ ID NO: 10472 - protein, 509 aa, Homo sapiens
MGVQAGLFGMLGFLGVALGGSPALRWYRTSCHLTKAVPGNPLGYLSFLAKDAQGLALIHARWDAHRRLQSCSWEDEPELTAAYGALCAHETAWGSFIHTPGPELQRALATLQSQWEACRALEESPAGARKKRAAGQSGVPGGGHQREKRGWTMPGTLWCGVGDSAGNSSELGVFQGPDLCCREHDRCPQNISPLQYNYGIRNYRFHTISHCDCDTRFQQCLQNQHDSISDIVGVAFFNVLEIPCFVLEEQEACVAWYWWGGCRMYGTVPLARLQPRTFYNASWSSRATSPTPSSRSPAPPKPRQKQHLRKGPPHQKGSKRPSKANTTALQDPMVSPRLDVAPTGLQGPQGGLKPQGARWVCRSFRRHLDQCEHQIGPREIEFQLLNSAQEPLFHCNCTRRLARFLRLHSPPEVTNMLWELLGTTCFKLAPPLDCVEGKNCSRDPRAIRVSARHLRRLQQRRHQLQDKGTDERQPWPSEPLRGPMSFYNQCLQLTQAARRPDRQQKSWSQ

SEQ ID NO: 10473 - protein, 138 aa, Homo sapiens
MKGLLPLAWFLACSVPAVQGGLLDLKSMIEKVTGKNALTNYGFYGCYCGWGGRGTPKDGTDWCCWAHDHCYGRLEEKGCNIRTQSYKYRFAWGVVTCEPGPFCHVNLCACDRKLVYCLKRNLRSYNPQYQYFPNILCS

SEQ ID NO: 10474 - protein, 441 aa, Homo sapiens
MVPPKLHVLFCLCGCLAVVYPFDWQYINPVAHMKSSAWVNKIQVLMAAASFGQTKIPRGNGPYSVGCTDLMFDHTNKGTFLRLYYPSQDNDRLDTLWIPNKEYFWGLSKFLGTHWLMGNILRLLFGSMTTPANWNSPLRPGEKYPLVVFSHGLGAFRTLYSAIGIDLASHGFIVAAVEHRDRSASATYYFKDQSAAEIGDKSWLYLRTLKQEEETHIRNEQVRQRAKECSQALSLILDIDHGKPVKNALDLKFDMEQLKDSIDREKIAVIGHSFGGATVIQTLSEDQRFRCGIALDAWMFPLGDEVYSRIPQPLFFINSEYFQYPANIIKMKKCYSPDKERKMITIRGSVHQNFADFTFATGKIIGHMLKLKGDIDSNVAIDLSNKASLAFLQKHLGLHKDFDQWDCLIEGDDENLIPGTNINTTNQHIMLQNSSGIEKYN

SEQ ID NO: 10475 - protein, 441 aa, Homo sapiens; identical to SEQ ID NO: 10474

SEQ ID NO: 10476 - protein, 1463 aa, Homo sapiens
MLLSPSLLLLLLLGAPRGCAEGVAAALTPERLLEWQDKGIFVIQSESLKKCIQAGKSVLTLENCKQANKHMLWKWVSNHGLFNIGGSGCLGLNFSAPEQPLSLYECDSTLVSLRWRCNRKMITGPLQYSVQVAHDNTVVASRKYIHKWISYGSGGGDICEYLHKDLHTIKGNTHGMPCMFPFQYNHQWHHECTREGREDDLLWCATTSRYERDEKWGFCPDPTSAEVGCDTIWEKDLNSHICYQFNLLSSLSWSEAHSSCQMQGGTLLSITDETEENFIREHMSSKTVEVWMGLNQLDEHAGWQWSDGTPLNYLNWSPEVNFEPFVEDHCGTFSSFMPSAWRSRDCESTLPYICKKYLNHIDHEIVEKDAWKYYATHCEPGWNPYNRNCYKLQKEEKTWHEALRSCQADNSALIDITSLAEVEFLVTLLGDENASETWIGLSSNKIPVSFEWSNDSSVIFTNWHTLEPHIFPNRSQLCVSAEQSEGHWKVKNCEERLFYICKKAGHVLSDAESGCQEGWERHGGFCYKIDTVLRSFDQASSGYYCPPALVTITNRFEQAFITSLISSVVKMKDSYFWIALQDQNDTGEYTWKPVGQKPEPVQYTHWNTHQPRYSGGCVAMRGRHPLGRWEVKHCRHFKAMSLCKQPVENQEKAEYEERWPFHPCYLDWESEPGLASCFKVFHSEKVLMKRTWREAEAFCEEFGAHLASFAHIEEENFVNELLHSKFNWTEERQFWIGFNKRNPLNAGSWEWSDRTPVVSSFLDNTYFGEDARNCAVYKANKTLLPLHCGSKREWICKIPRDVKPKIPFWYQYDVPWLFYQDAEYLFHTFASEWLNFEFVCSWLHSDLLTIHSAHEQEFIHSKIKALSKYGASWWIGLQEERANDEFRWRDGTPVIYQNWDTGRERTVNNQSQRCGFISSITGLWGSEECSVSMPSICKRKKVWLIEKKKDTPKQHGTCPKGWLYFNYKCLLLNIPKDPSSWKNWTHAQHFCAEEGGTLVAIESEVEQAFITMNLFGQTTSVWIGLQNDDYETWLNGKPVVYSNWSPFDIINIPSHNTTEVQKHIPLCALLSSNPNFHFTGKWYFEDCGKEGYGFVCEKMQDTSGHGVNTSDMYPMPNTLEYGNRTYKIINANMTWYAAIKTCLMHKAQLVSITDQYHQSFLTVVLNRLGYAHWIGLFTTDNGLNFDWSDGTKSSFTFWKDEESSLLGDCVFADSNGRWHSTACESFLQGAICHVPPETRQSEHPELCSETSIPWIKFKSNCYSFSTVLDSMSFEAAHEFCKKEGSNLLTIKDEAENAFLLEELFAFGSSVQMVWLNAQFDGNNETIKWFDGTPTDQSNWGIRKPDTDYFKPHHCVALRIPEGLWQLSPCQEKKGFICKMEADIHTAEALPEKGPSHSIIPLAVVLTLIVIVAICTLSFCIYKHNGGFFRRLAGFRNPYYPATNFSTVYLEENILISDLEKSDQ

SEQ ID NO: 10477 - protein, 1324 aa, Homo sapiens
MLLSPSLLLLLLLGAPRGCAEGVAAALTPERLLEWQDKGIFVIQSESLKKCIQAGKSVLTLENCKQANKHMLWKWVSNHGLFNIGGSGCLGLNFSAPEQPLSLYECDSTLVSLRWRCNRKMITGPLQYSVQVAHDNTVVASRKYIHKWISYGSGGGDICEYLHKDLHTIKGNTHGMPCMFPFQYNHQWHHECTREGREDDLLWCATTSRYERDEKWGFCPDPTSAEVGCDTIWEKDLNSHICYQFNLLSSLSWSEAHSSCQMQGGTLLSITDETEENFIREHMSSKTVEVWMGLNQLDEHAGWQWSDGTPLNYLNWSPEVNFEPFVEDHCGTFSSFMPSAWRSRDCESTLPYICKKYLNHIDHEIVEKDAWKYYATHCEPGWNPYNRNCYKLQKEEKTWHEALRSCQADNSALIDITSLAEVEFLVTLLGDENASETWIGLSSNKIPVSFEWSNDSSVIFTNWHTLEPHIFPNRSQLCVSAEQSEGHWKVKNCEERLFYICKKAGHVLSDAESGCQEGWERHGGFCYKIDTVLRSFDQASSGYYCPPALVTITNRFEQAFITSLISSVVKMKDSYFWIALQDQNDTGEYTWKPVGQKPEPVQYTHWNTHQPRYSGGCVAMRGRHPLGRWEVKHCRHFKAMSLCKQPVENQEKAEYEERWPFHPCYLDWESEPGLASCFKVFHSEKVLMKRTWREAEAFCEEFGAHLASFAHIEEENFVNELLHSKFNWTEERQFWIGFNKRNPLNAGSWEWSDRTPVVSSFLDNTYFGEDARNCAVYKANKTLLPLHCGSKREWICKIPRDVKPKIPFWYQYDVPWLFYQDAEYLFHTFASEWLNFEFVCSWLHSDLLTIHSAHEQEFIHSKIKALSKYGASWWIGLQEERANDEFRWRDGTPVIYQNWDTGRERTVNNQSQRCGFISSITGLWGSEECSVSMPSICKRKKVWLIEKKKDTPKQHGTCPKGWLYFNYKCLLLNIPKDPSSWKNWTHAQHFCAEEGGTLVAIESEVEQAFITMNLFGQTTSVWIGLQNDDYETWLNGKPVVYSNWSPFDIINIPSHNTTEVQKHIPLCALLSSNPNFHFTGKWYFEDCGKEGYGFVCEKMQDTSGHGVNTSDMYPMPNTLEYGNRTYKIINANMTWYAAIKTCLMHKAQLVSITDQYHQSFLTVVLNRLGYAHWIGLFTTDNGLNFDWSDGTKSSFTFWKDEESSLLGDCVFADSNGRWHSTACESFLQGAICHVPPETRQSEHPELCSETSIPWIKFKSNCYSFSTVLDSMSFEAAHEFCKKEGSNLLTIKDEAENAFLLEELFAFGSSVQMVWLNAQFDGNSK

SEQ ID NO: 10478 - protein, 212 aa, Homo sapiens
MKVFKFIGLMILLTSAFSAGSGQSPMTVLCSIDWFMVTVHPFMLNNDVCVHFHELHLGLGCPPNHVQPHAYQFTYRVTECGIRAKAVSQDMVIYSTEIHYSSKGTPSKFVIPVSCAAPQKSPWLTKPCSMRVASKSRATAQKDEKCYEVFSLSQSSQRPNCDCPPCVFSEEEHTQVPCHQAGAQEAQPLQPSHFLDISEDWSLHTDDMIGSM

SEQ ID NO: 10479 - protein, 55 aa, Homo sapiens
MAVQRRLDVMEEMVEKTVDHLGTEVKGLLGLLEELAWNLPPGPFSPAPDLLGDGF

SEQ ID NO: 10480 - protein, 87 aa, Homo sapiens
MRPLLCALTGLALLRAAGSLAAAEPFSPPRGDSAQSTACDRHMAVQRRLDVMEEMASEPWSWSPAVGGGAPARQRPQNQPCPLDFLP

SEQ ID NO: 10481 - protein, 97 aa, Homo sapiens
MRPLLCALTGLALLRAAGSLAAAEPFSPPRGDSAQSTACDRHMAVQRRLDVMEEMVEKTVDHLGTEVKGLLGLLEELAWNLPPGPFSPAPDLLGDGF

SEQ ID NO: 10482 - protein, 516 aa, Homo sapiens
MDAMKRGLCCVLLLCGAVFVSPSQEIHARFRRGARSYQGCSEPRCFNGGTCQQALYFSDFVCQCPEGFAGKCCEIDTRATCYEDQGISYRGTWSTAESGAECTNWNSSALAQKPYSGRRPDAIRLGLGNHNYCRNPDRDSKPWCYVFKAGKYSSEFCSTPACSEGNSDCYFGNGSAYRGTHSLTESGASCLPWNSMILIGKVYTAQNPSAQALGLGKHNYCRNPDGDAKPWCHVLKNRRLTWEYCDVPSCSTCGLRQYSQPQFRIKGGLFADIASHPWQAAIFAKHRRSPGERFLCGGILISSCWILSAAHCFQERFPPHHLTVILGRTYRVVPGEEEQKFEVEKYIVHKEFDDDTYDNDIALLQLKSDSSRCAQESSVVRTVCLPPADLQLPDWTECELSGYGKHEALSPFYSERLKEAHVRLYPSSRCTSQHLLNRTVTDNMLCAGDTRSGGPQANLHDACQGDSGGPLVCLNDGRMTLVGIISWGLGCGQKDVPGVYTKVTNYLDWIRDNMRP

SEQ ID NO: 10483 - protein, 436 aa, Homo sapiens
MDAMKRGLCCVLLLCGAVFVSPSQEIHARFRRGARSYQVICRDEKTQMIYQQHQSWLRPVLRSNRVEYCWCNSGRAQCHSVPVKRNSDCYFGNGSAYRGTHSLTESGASCLPWNSMILIGKVYTAQNPSAQALGLGKHNYCRNPDGDAKPWCHVLKNRRLTWEYCDVPSCSTCGLRQYSQPQFRIKGGLFADIASHPWQAAIFAKHRRSPGERFLCGGILISSCWILSAAHCFQERFPPHHLTVILGRTYRVVPGEEEQKFEVEKYIVHKEFDDDTYDNDIALLQLKSDSSRCAQESSVVRTVCLPPADLQLPDWTECELSGYGKHEALSPFYSERLKEAHVRLYPSSRCTSQHLLNRTVTDNMLCAGDTRSGGPQANLHDACQGDSGGPLVCLNDGRMTLVGIISWGLGCGQKDVPGVYTKVTNYLDWIRDNMRP

SEQ ID NO: 10484 - protein, 499 aa, Homo sapiens
MDAMKRGLCCVLLLCGAVFVSPSQEIHARFRRGARSYQVICRDEKTQMIYQQHQSWLRPVLRSNRVEYCWCNSGRAQCHSVPVKSCSEPRCFNGGTCQQALYFSDFVCQCPEGFAGKCCEIDSKPWCYVFKAGKYSSEFCSTPACSEGNSDCYFGNGSAYRGTHSLTESGASCLPWNSMILIGKVYTAQNPSAQALGLGKHNYCRNPDGDAKPWCHVLKNRRLTWEYCDVPSCSTCGLRQYSQPQFRIKGGLFADIASHPWQAAIFAKHRRSPGERFLCGGILISSCWILSAAHCFQERFPPHHLTVILGRTYRVVPGEEEQKFEVEKYIVHKEFDDDTYDNDIALLQLKSDSSRCAQESSVVRTVCLPPADLQLPDWTECELSGYGKHEALSPFYSERLKEAHVRLYPSSRCTSQHLLNRTVTDNMLCAGDTRSGGPQANLHDACQGDSGGPLVCLNDGRMTLVGIISWGLGCGQKDVPGVYTKVTNYLDWIRDNMRP

SEQ ID NO: 10485 - protein, 157 aa, Homo sapiens
MDAMKRGLCCVLLLCGAVFVSPSQEIHARFRRGARSYQVICRDEKTQMIYQQHQSWLRPVLRSNRVEYCWCNSGRAQCHSVPVKSCSEPRCFNGGTCQQALYFSDFVCQCPEGFAGKCCEIDTRATCYEDQGISYRGTWSTAESGAECTNWNSSALA

SEQ ID NO: 10486 - protein, 178 aa, Homo sapiens
MDAMKRGLCCVLLLCGAVFVSPSQEIHARFRRGARSYQVICRDEKTQMIYQQHQSWLRPVLRSNRVEYCWCNSGRAQCHSVPVKSCSEPRCFNGGTCQQALYFSDFVCQCPEGFAGKCCEIDTRATCYEDQGISYRGTWSTAESGAECTNWNSSALAQKPYSGRRPDAIRLGLGNHNY

SEQ ID NO: 10487 - protein, 562 aa, Homo sapiens
MDAMKRGLCCVLLLCGAVFVSPSQEIHARFRRGARSYQVICRDEKTQMIYQQHQSWLRPVLRSNRVEYCWCNSGRAQCHSVPVKSCSEPRCFNGGTCQQALYFSDFVCQCPEGFAGKCCEIDTRATCYEDQGISYRGTWSTAESGAECTNWNSSALAQKPYSGRRPDAIRLGLGNHNYCRNPDRDSKPWCYVFKAGKYSSEFCSTPACSEGNSDCYFGNGSAYRGTHSLTESGASCLPWNSMILIGKVYTAQNPSAQALGLGKHNYCRNPDGDAKPWCHVLKNRRLTWEYCDVPSCSTCGLRQYSQPQFRIKGGLFADIASHPWQAAIFAKHRRSPGERFLCGGILISSCWILSAAHCFQERFPPHHLTVILGRTYRVVPGEEEQKFEVEKYIVHKEFDDDTYDNDIALLQLKSDSSRCAQESSVVRTVCLPPADLQLPDWTECELSGYGKHEALSPFYSERLKEAHVRLYPSSRCTSQHLLNRTVTDNMLCAGDTRSGGPQANLHDACQGDSGGPLVCLNDGRMTLVGIISWGLGCGQKDVPGVYTKVTNYLDWIRDNMRP

SEQ ID NO: 10488 - protein, 562 aa, Homo sapiens; identical to SEQ ID NO: 10487

SEQ ID NO: 10489 - protein, 473 aa, Homo sapiens
MDAMKRGLCCVLLLCGAVFVSPSQEIHARFRRGARSYQVICRDEKTQMIYQQHQSWLRPVLRSNRVEYCWCNSGRAQCHSVPVKSCSEPRCFNGGTCQQALYFSDFVCQCPEGFAGKCCEIGNSDCYFGNGSAYRGTHSLTESGASCLPWNSMILIGKVYTAQNPSAQALGLGKHNYCRNPDGDAKPWCHVLKNRRLTWEYCDVPSCSTCGLRQYSQPQFRIKGGLFADIASHPWQAAIFAKHRRSPGERFLCGGILISSCWILSAAHCFQERFPPHHLTVILGRTYRVVPGEEEQKFEVEKYIVHKEFDDDTYDNDIALLQLKSDSSRCAQESSVVRTVCLPPADLQLPDWTECELSGYGKHEALSPFYSERLKEAHVRLYPSSRCTSQHLLNRTVTDNMLCAGDTRSGGPQANLHDACQGDSGGPLVCLNDGRMTLVGIISWGLGCGQKDVPGVYTKVTNYLDWIRDNMRP

SEQ ID NO: 10490 - protein, 96 aa, Homo sapiens
  SITE 1: note = misc_feature - Xaa can be any naturally occurring amino acid
XFAGKCCEIDTRATCYEDQGISYRGTWSTAESGAECTNWNSSALAQKPYSGRRPDAIRLGLGNHNYCRTPVPRHWAWANIITAGILMGMPSPGATC

SEQ ID NO: 10491 - protein, 106 aa, Homo sapiens
MRALLARLLLCVLVVSDSKGSNELHQVPSNCDCLNGGTCVSNKYFSNIHWCNCPKKFGGQHCEIDKSKTCYEGNGHFYRGKASTDTMGRPCLPWNSATVLQQTYHA

SEQ ID NO: 10492 - protein, 431 aa, Homo sapiens
MRALLARLLLCVLVVSDSKGSNELHQVPSNCDCLNGGTCVSNKYFSNIHWCNCPKKFGGQHCEIDKSKTCYEGNGHFYRGKASTDTMGRPCLPWNSATVLQQTYHAHRSDALQLGLGKHNYCRNPDNRRRPWCYVQVGLKLLVQECMVHDCADGKKPSSPPEELKFQCGQKTLRPRFKIIGGEFTTIENQPWFAAIYRRHRGGSVTYVCGGSLISPCWVISATHCFIDYPKKEDYIVYLGRSRLNSNTQGEMKFEVENLILHKDYSADTLAHHNDIALLKIRSKEGRCAQPSRTIQTICLPSMYNDPQFGTSCEITGFGKENSTDYLYPEQLKMTVVKLISHRECQQPHYYGSEVTTKMLCAADPQWKTDSCQGDSGGPLVCSLQGRMTLTGIVSWGRGCALKDKPGVYTRVSHFLPWIRSHTKEENGLAL

SEQ ID NO: 10493 - protein, 414 aa, Homo sapiens
MVFHLRTRYEQANCDCLNGGTCVSNKYFSNIHWCNCPKKFGGQHCEIDKSKTCYEGNGHFYRGKASTDTMGRPCLPWNSATVLQQTYHAHRSDALQLGLGKHNYCRNPDNRRRPWCYVQVGLKLLVQECMVHDCADGKKPSSPPEELKFQCGQKTLRPRFKIIGGEFTTIENQPWFAAIYRRHRGGSVTYVCGGSLISPCWVISATHCFIDYPKKEDYIVYLGRSRLNSNTQGEMKFEVENLILHKDYSADTLAHHNDIALLKIRSKEGRCAQPSRTIQTICLPSMYNDPQFGTSCEITGFGKENSTDYLYPEQLKMTVVKLISHRECQQPHYYGSEVTTKMLCAADPQWKTDSCQGDSGGPLVCSLQGRMTLTGIVSWGRGCALKDKPGVYTRVSHFLPWIRSHTKEENGLAL

SEQ ID NO: 10494 - protein, 78 aa, Homo sapiens
MDGAWRLASWGLRCMQCKTNGDCRVEECALGQDLCRTTIVRLWEEGEELELVEKSCTHSEKTNRTLSYRTGLKITSLT

SEQ ID NO: 10495 - protein, 152 aa, Homo sapiens
MDTNLNGRGLETWSSWGLRCMQCKTNGDCRVEECALGQDLCRTTIVRLWEEGEELELVEKSCTHSEKTNRTLSYRTGLKITSLTEVVCGLDLCNQGNSGRAVTYSRSRYLECISCGSSDMSCERGRHQSLQCRSPEEQCLDVVTHWIQEGEE

SEQ ID NO: 10496 - protein, 335 aa, Homo sapiens
MGHPPLLPLLLLLHTCVPASWGLRCMQCKTNGDCRVEECALGQDLCRTTIVRLWEEGEELELVEKSCTHSEKTNRTLSYRTGLKITSLTEVVCGLDLCNQGNSGRAVTYSRSRYLECISCGSSDMSCERGRHQSLQCRSPEEQCLDVVTHWIQEGEEGRPKDDRHLRGCGYLPGCPGSNGFHNNDTFHFLKCCNTTKCNEGPILELENLPQNGRQCYSCKGNSTHGCSSEETFLIDCRGPMNQCLVATGTHEPKNQSYMVRGCATASMCQHAHLGDAFSMNHIDVSCCTKSGCNHPDLDVQYRSGAAPQPGPAHLSLTITLLMTARLWGGTLLWT

SEQ ID NO: 10497 - protein, 281 aa, Homo sapiens
MGHPPLLPLLLLLHTCVPASWGLRCMQCKTNGDCRVEECALGQDLCRTTIVRLWEEGEELELVEKSCTHSEKTNRTLSYRTGLKITSLTEVVCGLDLCNQGNSGRAVTYSRSRYLECISCGSSDMSCERGRHQSLQCRSPEEQCLDVVTHWIQEGEEGRPKDDRHLRGCGYLPGCPGSNGFHNNDTFHFLKCCNTTKCNEGPILELENLPQNGRQCYSCKGNSTHGCSSEETFLIDCRGPMNQCLVATGTHERSLWGSWLPCKSTTALRPPCCEEAQATHV

SEQ ID NO: 10498 - protein, 286 aa, Homo sapiens
MGHPPLLPLLLLLHTCVPASWGLRCMQCKTNGDCRVEECALGQDLCRTTIVRLWEEGEELELVEKSCTHSEKTNRTLSYRTGLKITSLTEVVCGLDLCNQGNSGRAVTYSRSRYLECISCGSSDMSCERGRHQSLQCRSPEEQCLDVVTHWIQEGEEGRPKDDRHLRGCGYLPGCPGSNGFHNNDTFHFLKCCNTTKCNEGPKPKNQSYMVRGCATASMCQHAHLGDAFSMNHIDVSCCTKSGCNHPDLDVQYRSGAAPQPGPAHLSLTITLLMTARLWGGTLLWT

SEQ ID NO: 10499 - protein, 290 aa, Homo sapiens
MGHPPLLPLLLLLHTCVPASWGLRCMQCKTNGDCRVEECALGQDLCRTTIVRLWEEGEELELVEKSCTHSEKTNRTLSYRTGLKITSLTEVVCGLDLCNQGNSGRAVTYSRSRYLECISCGSSDMSCERGRHQSLQCRSPEEQCLDVVTHWIQEGEEVLELENLPQNGRQCYSCKGNSTHGCSSEETFLIDCRGPMNQCLVATGTHEPKNQSYMVRGCATASMCQHAHLGDAFSMNHIDVSCCTKSGCNHPDLDVQYRSGAAPQPGPAHLSLTITLLMTARLWGGTLLWT

SEQ ID NO: 10500 - protein, 46 aa, Homo sapiens
MGHPPLLPLLLLLHTCVPAWATARDSISKKKKRKKKERRNLRRYNL

SEQ ID NO: 10501 - protein, 153 aa, Homo sapiens
MQCKTNGDCRVEECALGQDLCRTTIVRLWEEGEELELVEKSCTHSEKTNRTLSYRTGLKITSLTEVVCGLDLCNQGNSGRAVTYSRSRYLECISCGSSDMSCERGRHQSLQCRSPEEQCLDVVTHWIQEGEEGRPKDDRHLRGCGYLPGCPGS

SEQ ID NO: 10502 - protein, 226 aa, Homo sapiens
MQCKTNGDCRVEECALGQDLCRTTIVRLWEEGEELELVEKSCTHSEKTNRTLSYRTGLKITSLTEVVCGLDLCNQGNSGRAVTYSRSRYLECISCGSSDMSCERGRHQSLQCRSPEEQCLDVVTHWIQEGEEGRPKDDRHLRGCGYLPGCPGSNGFHNNDTFHFLKCCNTTKCNEGPILELENLPQNGRQCYSCKGNSTHGCSSEETFLIDCRGPMNQCLVATGTH

SEQ ID NO: 10503 - protein, 154 aa, Homo sapiens
  SITE 1: note = misc_feature - Xaa can be any naturally occurring amino acid
XCERGRHQSLQCRSPEEQCLDVVTHWIQEGEEGRPKDDRHLRGCGYLPGCPGSNGFHNNDTFHFLKCCNTTKCNEGPILELENLPQNGRQCYSCKGNSTHGCSSEETFLIDCRGPMNQCLVATGTHGCGHFCHGKVEFRLGAVAEACTLSTLGG

SEQ ID NO: 10504 - protein, 133 aa, Homo sapiens
  SITE 1: note = misc_feature - Xaa can be any naturally occurring amino acid
XRYLECISCGSSDMSCERGRHQSLQCRSPEEQCLDVVTHWIQEGEEGRPKDDRHLRGCGYLPGCPGSNGFHNNDTFHFLKCCNTTKCNEGPILELENLPQNGRQCYSCKGNSTHGCSSEETFLIDCRGTLLWT

SEQ ID NO: 10505 - protein, 185 aa, Homo sapiens
  SITE 1: note = misc_feature - Xaa can be any naturally occurring amino acid
XSWGLRCMQCKTNGDCRVEECALGQDLCRTTIVRLWEGRAVTYSRSRYLECISCGSSDMSCERGRHQSLQCRSPEEQCLDVVTHWIQEGEEGRPKDDRHLRGCGYLPGCPGSNGFHNNDTFHFLKCCNTTKCNEGPILELENLPQNGRQCYSCKGNSTHGCSSEETFLIDCRGPMNQCLVATGTH

SEQ ID NO: 10506 - protein, 144 aa, Homo sapiens
MPAEKTVQVKNVMDKNGDAYGFYNNSVKTTGWGILEIRAGYGSQTLSNEIIMFVAGFLEGYLTAPHMNDHYTNLYPQLITKPSIMDKVQDFMEKQDKWTRKNIKEYKTDSFWRHTGYVMAQIDGLYVGAKKRAILEGTKPMTLF

SEQ ID NO: 10507 - protein, 40 aa, Homo sapiens
MTRGGPGGRPGLPQPPPLLLLLLLLPLLLVTAEPPKPADT

SEQ ID NO: 10508 - protein, 553 aa, Homo sapiens
MTRGGPGGRPGLPQPPPLLLLLLLLPLLLVTAEPPKPAGVYYATAYWMPAEKTVQVKNVMDKNGDAYGFYNNSVKTTGWGILEIRAGYGSQTLSNEIIMFVAGFLEGYLTAPHMNDHYTNLYPQLITKPSIMDKVQDFMEKQDKWTRKNIKEYKTDSFWRHTGYVMAQIDGLYVGAKKRAILEGTKPMTLFQIQFLNSVGDLLDLIPSLSPTKNGSLKVFKRWDMGHCSALIKVLPGFENILFAHSSWYTYAAMLRIYKHWDFNVIDKDTSSSRLSFSSYPGFLESLDDFYILSSGLILLQTTNSVFNKTLLKQVIPETLLSWQRVRVANMMADSGKRWADIFSKYNSGTYNNQYMVLDLKKVKLNHSLDKGTLYIVEQIPTYVEYSEQTDVLRKGYWPSYNVPFHEKIYNWSGYPLLVQKLGLDYSYDLAPRAKIFRRDQGKVTDTASMKYIMRYNNYKKDPYSRGDPCNTICCREDLNSPNPSPGGCYDTKVADIYLASQYTSYAISGPTVQGGLPVFRWDRFNKTLHQGMPEVYNFDFITMKPILKLDIK

SEQ ID NO: 10509 - protein, 52 aa, Homo sapiens
DGQVPPASRSRSVLLDVSAGQLLMVDGRHPDAVAWANLTNAIRETGSSTCTG

SEQ ID NO: 10510 - protein, 589 aa, Homo sapiens
MVGQMYCYPGSHLARALTRALALALVLALLVGPFLSGLAGAIPAPGGRWARDGQVPPASRSRSVLLDVSAGQLLMVDGRHPDAVAWANLTNAIRETGWAFLELGTSGQYNDSLQAYAAGVVEAAVSEELIYMHWMNTVVNYCGPFEYEVGYCERLKSFLEANLEWMQEEMESNPDSPYWHQVRLTLLQLKGLEDSYEGRVSFPAGKFTIKPLGFLLLQLSGDLEDLELALNKTKIKPSLGSGSCSALIKLLPGQSDLLVAHNTWNNYQHMLRVIKKYWLQFREGPWGDYPLVPGNKLVFSSYPGTIFSCDDFYILGSGLVTLETTIGNKNPALWKYVRPRGCVLEWVRNIVANRLASDGATWADIFKRFNSGTYNNQWMIVDYKAFIPGGPSPGSRVLTILEQIPGMVVVADKTSELYQKTYWASYNIPSFETVFNASGLQALVAQYGDWFSYDGSPRAQIFRRNQSLVQDMDSMVRLMRYNDFLHDPLSLCKACNPQPNGENAISARSDLNPANGSYPFQALRQRSHGGIDVKVTSMSLARILSLLAASGPTWDQVPPFQWSTSPFSGLLHMGQPDLWKFAPVKVSWD

SEQ ID NO: 10511 - protein, 557 aa, Homo sapiens
MVGQMYCYPGSHLARALTRALALALVLALLVGPFLSGLAGAIPAPGGRWARDGQVPPASRSRSVLLDVSAGQLLMVDGRHPDAVAWANLTNAIRETGWAFLELGTSGQYNDSLQAYAAGVVEAAVSEELIYMHWMNTVVNYCGPFEYEVGYCERLKSFLEANLEWMQEEMESNPDSPYWHQVRLTLLQLKGLEDSYEGRVSFPAGKFTIKPLGFLLLQLSGDLEDLELALNKTKIKPSLGSGSCSALIKLLPGQSDLLVAHNTWNNYQHMLRVIKKYWLQFREGPWGDYPLVPGNKLVFSSYPGTIFSCDDFYILGSGLVTLETTIGNKNPALWKYVRPRGCVLEWVRNIVANRLASDGATWADIFKRFNSGTGMVVVADKTSELYQKTYWASYNIPSFETVFNASGLQALVAQYGDWFSYDGSPRAQIFRRNQSLVQDMDSMVRLMRYNDFLHDPLSLCKACNPQPNGENAISARSDLNPANGSYPFQALRQRSHGGIDVKVTSMSLARILSLLAASGPTWDQVPPFQWSTSPFSGLLHMGQPDLWKFAPVKVSWD

SEQ ID NO: 10512 - protein, 136 aa, Homo sapiens
MEHKEVVLLLLLFLKSGQGEPLDDYVNTQGASLFSVTKKQLGAGSIEECAAKCEEDEEFTCRAFQYHSKEQQCVIMAENRKSSIIIRMRDVVLFEKKVYLSECKTGNGKNYRGTMSKTKNGITCQKWSSTSPHRPR

SEQ ID NO: 10513 - protein, 810 aa, Homo sapiens
MEHKEVVLLLLLFLKSGQGEPLDDYVNTQGASLFSVTKKQLGAGSIEECAAKCEEDEEFTCRAFQYHSKEQQCVIMAENRKSSIIIRMRDVVLFEKKVYLSECKTGNGKNYRGTMSKTKNGITCQKWSSTSPHRPRFSPATHPSEGLEENYCRNPDNDPQGPWCYTTDPEKRYDYCDILECEEECMHCSGENYDGKISKTMSGLECQAWDSQSPHAHGYIPSKFPNKNLKKNYCRNPDRELRPWCFTTDPNKRWELCDIPRCTTPPPSSGPTYQCLKGTGENYRGNVAVTVSGHTCQHWSAQTPHTHNRTPENFPCKNLDENYCRNPDGKRAPWCHTTNSQVRWEYCKIPSCDSSPVSTEQLAPTAPPELTPVVQDCYHGDGQSYRGTSSTTTTGKKCQSWSSMTPHRHQKTPENYPNAGLTMNYCRNPDADKGPWCFTTDPSVRWEYCNLKKCSGTEASVVAPPPVVLLPDVETPSEEDCMFGNGKGYRGKRATTVTGTPCQDWAAQEPHRHSIFTPETNPRAGLEKNYCRNPDGDVGGPWCYTTNPRKLYDYCDVPQCAAPSFDCGKPQVEPKKCPGRVVGGCVAHPHSWPWQVSLRTRFGMHFCGGTLISPEWVLTAAHCLEKSPRPSSYKVILGAHQEVNLEPHVQEIEVSRLFLEPTRKDIALLKLSSPAVITDKVIPACLPSPNYVVADRTECFITGWGETQGTFGAGLLKEAQLPVIENKVCNRYEFLNGRVQSTELCAGHLAGGTDSCQGDSGGPLVCFEKDKYILQGVTSWGLGCARPNKPGVYVRVSRFVTWIEGVMRNN

SEQ ID NO: 10514 - protein, 166 aa, Homo sapiens
MEHKEVVLLLLLFLKSGQGEPLDDYVNTQGASLFSVTKKQLGAGSIEECAAKCEEDEEFTCRYFHCRCTYAGICNSDGKAFQYHSKEQQCVIMAENRKSSIIIRMRDVVLFEKKVYLSECKTGNGKNYRGTMSKTKNGITCQKWSSTSPHRPRFSPATHPSEGLEE

SEQ ID NO: 10515 - protein, 96 aa, Homo sapiens
MEHKEVVLLLLLFLKSGQGEPLDDYVNTQGPSLFSVTKKQLGAGSREECAAKCEEDKEFTCRAFQYHSKEQQCVIMAENRKSSIIIRMRDAVLFEK

SEQ ID NO: 10516 - protein, 96 aa, Homo sapiens; identical to SEQ ID NO: 10515

SEQ ID NO: 10517 - protein, 96 aa, Homo sapiens; identical to SEQ ID NO: 10515

SEQ ID NO: 10518 - protein, 89 aa, Homo sapiens
MEHKEVVLLLLLFLKSGQGEPLDDYVNTQGPSLFSVTKKQLGAGSREECAAKCEEDKEFTCRYFHRRCTYPEICNSDGHSNITVKSNNV

SEQ ID NO: 10519 - protein, 96 aa, Homo sapiens; identical to SEQ ID NO: 10515

SEQ ID NO: 10520 - protein, 96 aa, Homo sapiens; identical to SEQ ID NO: 10515

SEQ ID NO: 10521 - protein, 225 aa, Homo sapiens
MRPLLLLALLGWLLLAEAKGDAKPEAPCCQEGLRAGGSGSLHLGRDFTVLAGARGSPSPSVSSIPRFWIPGSDNLLVLTVATKETEGFRRFKRSAQFFNYKIQALGLGEDWNVEKGTSAGGGQKVRLLKKALEKHADKEDLVILFADSYDVLFASGPRELLKKFRQARSQVVFSAEELIYPDRRLETKYPVVSDGKRFLGSGGFIGYAPNLSKLVAEWEGQDSDS

SEQ ID NO: 10522 - protein, 727 aa, Homo sapiens
MRPLLLLALLGWLLLAEAKGDAKPEDNLLVLTVATKETEGFRRFKRSAQFFNYKIQALGLGEDWNVEKGTSAGGGQKVRLLKKALEKHADKEDLVILFADSYDVLFASGPRELLKKFRQARSQVVFSAEELIYPDRRLETKYPVVSDGKRFLGSGGFIGYAPNLSKLVAEWEGQDSDSDQLFYTKIFLDPEKREQINITLDHRCRIFQNLDGALDEVVLKFEMGHVRARNLAYDTLPVLIHGNGPTKLQLNYLGNYIPRFWTFETGCTVCDEGLRSLKGIGDEALPTVLVGVFIEQPTPFVSLFFQRLLRLHYPQKHMRLFIHNHEQHHKAQVEEFLAQHGSEYQSVKLVGPEVRMANADARNMGADLCRQDRSCTYYFSVDADVALTEPNSLRLLIQQNKNVIAPLMTRHGRLWSNFWGALSADGYYARSEDYVDIVQGRRVGVWNVPYISNIYLIKGSALRGELQSSDLFHHSKLDPDMAFCANIRQQDVFMFLTNRHTLGHLLSLDSYRTTHLHNDLWEVFSNPEDWKEKYIHQNYTKALAGKLVETPCPDVYWFPIFTEVACDELVEEMEHFGQWSLGNNKDNRIQGGYENVPTIDIHMNQIGFEREWHKFLLEYIAPMTEKLYPGYYTRAQFDLAFVVRYKPDEQPSLMPHHDASTFTINIALNRVGVDYEGGGCRFLRYNCSIRAPRKGWTLMHPGRLTHYHEGLPTTRGTRYIAVSFVDP

SEQ ID NO: 10523 - protein, 283 aa, Homo sapiens
MRPLLLLALLGWLLLAEAKGDAKPEDNLLVLTVATKETEGFRRFKRSAQFFNYKIQALGLGEDWNVEKGTSAGGGQKVRLLKKALEKHADKEDLVILFADSYDVLFASGPRELLKKFRQARSQVVFSAEELIYPDRRLETKYPVVSDGKRFLGSGGFIGYAPNLSKLVAEWEGQDSDSDQLFYTKIFLDPEKREQINITLDHRCRIFQNLDGALVSPWGQGHLPGACYELTASVLTSELSVMPSFPAVVLQLNYLGNYIPRFWTFETGCTVCDEGLRSLKGIG

SEQ ID NO: 10524 - protein, 98 aa, Homo sapiens
MGGCTVKPQLLLLALVLHPWNPCLGADSEKPSSIPTDKLLVITVATKESDGFHRFMQSAKYFNYTVKKEGSVSQVFSTNKRRTRRYLGPWSRRRMERW

SEQ ID NO: 10525 - protein, 758 aa, Homo sapiens
MGGCTVKPQLLLLALVLHPWNPCLGADSEKPSSIPTDKLLVITVATKESDGFHRFMQSAKYFNYTVKVLGQGEEWRGGDGINSIGGGQKVRLMKEVMEHYADQDDLVVMFTECFDVIFAGGPEEVLKKFQKANHKVVFAADGILWPDKRLADKYPVVHIGKRYLNSGGFIGYAPYVNRIVQQWNLQDNDDDQLFYTKVYIDPLKREAINITLDHKCKIFQTLNGAVDEVVLKFENGKARAKNTFYETLPVAINGNGPTKILLNYFGNYVPNSWTQDNGCTLCEFDTVDLSAVDVHPNVSIGVFIEQPTPFLPRFLDILLTLDYPKEALKLFIHNKEVYHEKDIKVFFDKAKHEIKTIKIVGPEENLSQAEARNMGMDFCRQDEKCDYYFSVDADVVLTNPRTLKILIEQNRKIIAPLVTRHGKLWSNFWGALSPDGYYARSEDYVDIVQGNRVGVWNVPYMANVYLIKGKTLRSEMNERNYFVRDKLDPDMALCRNAREMTLQREKDSPTPETFQMLSPPKGVFMYISNRHEFGRLLSTANYNTSHYNNDLWQIFENPVDWKEKYINRDYSKIFTENIVEQPCPDVFWFPIFSEKACDELVEEMEHYGKWSGGKHHDSRISGGYENVPTDDIHMKQVDLENVWLHFIREFIAPVTLKVFAGYYTKGFALLNFVVKYSPERQRSLRPHHDASTFTINIALNNVGEDFQGGGCKFLRYNCSIESPRKGWSFMHPGRLTHLHEGLPVKNGTRYIAVSFIDP

SEQ ID NO: 10526 - protein, 737 aa, Homo sapiens
MGGCTVKPQLLLLALVLHPWNPCLGADSEKPSSIPTDKLLVITVATKESDGFHRFMQSAKYFNYTVKVLGQGEEWRGGDGINSIGGGQKVRLMKEVMEHYADQDDLVVMFTECFDVIFAGGPEEVLKKFQKANHKVVFAADGILWPDKRLADKYPVVHIGKRYLNSGGFIGYAPYVNRIVQQWNLQDNDDDQLFYTKVYIDPLKREAINITLDHKCKIFQTLNGAVDEVVLKFENGKARAKNTFYETLPVAINGNGPTKILLNYFGNYVPNSWTQDNGCTLCEFDTVDLSAVDVHPNVSIGVFIEQPTPFLPRFLDILLTLDYPKEALKLFIHNKEVYHEKDIKVFFDKAKHEIKTIKIVGPEENLSQAEARNMGMDFCRQDEKCDYYFSVDADVVLTNPRTLKILIEQNRKIIAPLVTRHGKLWSNFWGALSPDGYYARSEDYVDIVQGNRVGVWNVPYMANVYLIKGKTLRSEMNERNYFVRDKLDPDMALCRNAREMGVFMYISNRHEFGRLLSTANYNTSHYNNDLWQIFENPVDWKEKYINRDYSKIFTENIVEQPCPDVFWFPIFSEKACDELVEEMEHYGKWSGGKHHDSRISGGYENVPTDDIHMKQVDLENVWLHFIREFIAPVTLKVFAGYYTKGFALLNFVVKYSPERQRSLRPHHDASTFTINIALNNVGEDFQGGGCKFLRYNCSIESPRKGWSFMHPGRLTHLHEGLPVKNGTRYIAVSFIDP

SEQ ID NO: 10527 - protein, 418 aa, Homo sapiens
MLENHILHKRIYILTFFSQQIFILCHAHFIFFFTVRDFCRQDEKCDYYFSVDADVVLTNPRTLKILIEQNRKIIAPLVTRHGKLWSNFWGALSPDGYYARSEDYVDIVQGNRVGVWNVPYMANVYLIKGKTLRSEMNERNYFVRDKLDPDMALCRNAREMTLQREKDSPTPETFQMLSPPKGVFMYISNRHEFGRLLSTANYNTSHYNNDLWQIFENPVDWKEKYINRDYSKIFTENIVEQPCPDVFWFPIFSEKACDELVEEMEHYGKWSGGKHHDSRISGGYENVPTDDIHMKQVDLENVWLHFIREFIAPVTLKVFAGYYTKGFALLNFVVKYSPERQRSLRPHHDASTFTINIALNNVGEDFQGGGCKFLRYNCSIESPRKGWSFMHPGRLTHLHEGLPVKNGTRYIAVSFIDP

SEQ ID NO: 10528 - protein, 703 aa, Homo sapiens
MQSAKYFNYTVKVLGQGEEWRGGDGINSIGGGQKVRLMKEVMEHYADQDDLVVMFTECFDVIFAGGPEEVLKKFQKANHKVVFAADGILWPDKRLADKYPVVHIGKRYLNSGGFIGYAPYVNRIVQQWNLQDNDDDQLFYTKVYIDPLKREAINITLDHKCKIFQTLNGAVDEVVLKFENGKARAKNTFYETLPVAINGNGPTKILLNYFGNYVPNSWTQDNGCTLCEFDTVDLSAVDVHPNVSIGVFIEQPTPFLPRFLDILLTLDYPKEALKLFIHNKEVYHEKDIKVFFDKAKHEIKTIKIVGPEENLSQAEARNMGMDFCRQDEKCDYYFSVDADVVLTNPRTLKILIEQNRKIIAPLVTRHGKLWSNFWGALSPDGYYARSEDYVDIVQGNRVGVWNVPYMANVYLIKGKTLRSEMNERNYFVRDKLDPDMALCRNAREMTLQREKDSPTPETFQMLSPPKGVFMYISNRHEFGRLLSTANYNTSHYNNDLWQIFENPVDWKEKYINRDYSKIFTENIVEQPCPDVFWFPIFSEKACDELVEEMEHYGKWSGGKHHDSRISGGYENVPTDDIHMKQVDLENVWLHFIREFIAPVTLKVFAGYYTKGFALLNFVVKYSPERQRSLRPHHDASTFTINIALNNVGEDFQGGGCKFLRYNCSIESPRKGWSFMHPGRLTHLHEGLPVKNGTRYIAVSFIDP

SEQ ID NO: 10529 - protein, 229 aa, Homo sapiens
MTRFGVRLYKLLVITVATKESDGFHRFMQSAKYFNYTVKVLGQGEEWRGGDGINSIGGGQKVRLMKEVMEHYADQDDLVVMFTECFDVIFAGGPEEVLKKFQKANHKVVFAADGILWPDKRLADKYPVVHIGKRYLNSGGFIGYAPYVNRIVQQWNLQDNDDDQLFYTKVYIDPLKREAINITLDHKCKIFQTLNGAVDEVVLKFENGKARAKNTFYETLPVAINGNGP

SEQ ID NO: 10530 - protein, 171 aa, Homo sapiens
MGHFKDVVTVFLQEILFSFGPCEDAVITKAAPGASPGRRGEKLLVITVATAETEGYLRFLRSAEFFNYTVRTLGLGEEWRGGDVARTVGGGQKVRWLKKEMEKYADREDMIIMFVDSYDVILAGSPTELLKKFVQSGSRLLFSAESFCWPEWGLAEQYPEVGTGKRFLNSG

SEQ ID NO: 10531 - protein, 76 aa, Homo sapiens
MTSSGPGPRFLLLLPLLLPPAASASDRPRGRDPVNPEKLLVITVATAETEGYLRFLRSAEFFNYTVRTLGLGEEWR

SEQ ID NO: 10532 - protein, 738 aa, Homo sapiens
MTSSGPGPRFLLLLPLLLPPAASASDRPRGRDPVNPEKLLVITVATAETEGYLRFLRSAEFFNYTVRTLGLGEEWRGGDVARTVGGGQKVRWLKKEMEKYADREDMIIMFVDSYDVILAGSPTELLKKFVQSGSRLLFSAESFCWPEWGLAEQYPEVGTGKRFLNSGGFIGFATTIHQIVRQWKYKDDDDDQLFYTRLYLDPGLREKLSLNLDHKSRIFQNLNGALDEVVLKFDRNRVRIRNVAYDTLPIVVHGNGPTKLQLNYLGNYVPNGWTPEGGCGFCNQDRRTLPGGQPPPRVFLAVFVEQPTPFLPRFLQRLLLLDYPPDRVTLFLHNNEVFHEPHIADSWPQLQDHFSAVKLVGPEEALSPGEARDMAMDLCRQDPECEFYFSLDADAVLTNLQTLRILIEENRKVIAPMLSRHGKLWSNFWGALSPDEYYARSEDYVELVQRKRVGVWNVPYISQAYVIRGDTLRMELPQRDVFSGSDTDPDMAFCKSFRDKGIFLHLSNQHEFGRLLATSRYDTEHLHPDLWQIFDNPVDWKEQYIHENYSRALEGEGIVEQPCPDVYWFPLLSEQMCDELVAEMEHYGQWSGGRHEDSRLAGGYENVPTVDIHMKQVGYEDQWLQLLRTYVGPMTESLFPGYHTKARAVMNFVVRYRPDEQPSLRPHHDSSTFTLNVALNHKGLDYEGGGCRFLRYDCVISSPRKGWALLHPGRLTHYHEGLPTTWGTRYIMVSFVDP

SEQ ID NO: 10533 - protein, 125 aa, Homo sapiens
TLGLGEEWRGGDVARTVGGGQKVRWLKKEMEKYADREDMIIMFVDSYDVILAGSPTELLKKFVQSGSRLLFSAESFCWPEWGLAEQYPEDSSVLPPPSTKSCASGSTRMMTTTSCSTHGSTWTQD

SEQ ID NO: 10534 - protein, 270 aa, Homo sapiens
  SITE 1: note = misc_feature - Xaa can be any naturally occurring amino acid
XFIGFATTIHQIVRQWKYKDDDDDQLFYTRLYLDPGLREKLSLNLDHKSRIFQNLNGALDEVVLKFDRNRVRIRNVAYDTLPIVVHGNGPTKLQLNYLGNYVPNGWTPEGGCGFCNQDRRTLPGGQEVFHEPHIADSWPQLQDHFSAVKLVGPEEALSPGEARDMAMDLCRQDPECEFYFSLDADAVLTNLQTLRILIEENRKVIAPMLSRHGKLWSNFWGALSPDEYYARSEDYVELVQRKRVGVWNVPYISQAYVIRGDTLRMELPQR

SEQ ID NO: 10535 - protein, 66 aa, Homo sapiens
  SITE 1: note = misc_feature - Xaa can be any naturally occurring amino acid
XFSLDADAVLTNLQTLRILIEENRKVIAPMLSRHGKLWSNFWGALSPDEYYARSEDYVELVQRKRV

SEQ ID NO: 10536 - protein, 264 aa, Homo sapiens
  SITE 1: note = misc_feature - Xaa can be any naturally occurring amino acid
XNFWGALSPDEYYARSEDYVELVQRKRVGVWNVPYISQAYVIRGDTLRMELPQRDVFSGSDTDPDMAFCKSFRDKGIFLHLSNQHEFGRLLATSRYDTEHLHPDLWQIFDNPVDWKEQYIHENYSRALEGEGIVEQPCPDVYWFPLLSEQMCDELVAEMEHYGQWSGGRHEARAVMNFVVRYRPDEQPSLRPHHDSSTFTLNVALNHKGLDYEGGGCRFLRYDCVISSPRKGWALLHPGRLTHYHEGLPTTWGTRYIMVSFVDP

SEQ ID NO: 10537 - protein, 398 aa, Homo sapiens
MALFGALFLALLAGAHAEFPGCKIRVTSKALELVKQEGLRFLEQELETITIPDLRGKEGHFYYNISEKVYDFLSTFITSGMRFLLNQQICPVLYHAGTVLLNSLLDTVPVRSSVDELVGIDYSLMKDPVASTSNLDMDFRGAFFPLTERNWSLPNRAVEPQLQEEERMVYVAFSEFFFDSAMESYFRAGALQLLLVGDKVPHDLDMLLRATYFGSIVLLSPAVIDSPLKLELRVLAPPRCTIKPSGTTISVTASVTIALVPPDQPEVQLSSMTMDARLSAKMALRGKALRTQLDLRRFRIYSNHSALESLALIPLQAPLKTMLQIGVMPMLNERTWRGVQIPLPEGINFVHEVVTNHAGFLTIGADLHFAKGLREVIEKNRPADVRASTAPTPSTAAV

SEQ ID NO: 10538 - protein, 493 aa, Homo sapiens
MALFGALFLALLAGAHAEFPGCKIRVTSKALELVKQEGLRFLEQELETITIPDLRGKEGHFYYNISEVKVTELQLTSSELDFQPQQELMLQITNASLGLRFRRQLLYWFFYDGGYINASAEGVSIRTGLELSRDPAGRMKVSNVSCQASVSRMHAAFGGTFKKVYDFLSTFITSGMRFLLNQQICPVLYHAGTVLLNSLLDTVPVRSSVDELVGIDYSLMKDPVASTSNLDMDFRGAFFPLTERNWSLPNRAVEPQLQEEERMVYVAFSEFFFDSAMESYFRAGALQLLLVGDKVPHDLDMLLRATYFGSIVLLSPAVIDSPLKLELRVLAPPRCTIKPSGTTISVTASVTIALVPPDQPEVQLSSMTMDARLSAKMALRGKALRTQLDLRRFRIYSNHSALESLALIPLQAPLKTMLQIGVMPMLNERTWRGVQIPLPEGINFVHEVVTNHAGFLTIGADLHFAKGLREVIEKNRPADVRASTAPTPSTAAV

SEQ ID NO: 10539 - protein, 493 aa, Homo sapiens; identical to SEQ ID NO: 10538

SEQ ID NO: 10540 - protein, 441 aa, Homo sapiens
MALFGALFLALLAGAHAEFPGCKIRVTSKALELVKQEGLRFLEQELETITIPDLRGKEGHFYYNISEVKVTELQLTSSELDFQPQQELMLQITNASLGLRFRRQLLYWFLKVYDFLSTFITSGMRFLLNQQICPVLYHAGTVLLNSLLDTVPVRSSVDELVGIDYSLMKDPVASTSNLDMDFRGAFFPLTERNWSLPNRAVEPQLQEEERMVYVAFSEFFFDSAMESYFRAGALQLLLVGDKVPHDLDMLLRATYFGSIVLLSPAVIDSPLKLELRVLAPPRCTIKPSGTTISVTASVTIALVPPDQPEVQLSSMTMDARLSAKMALRGKALRTQLDLRRFRIYSNHSALESLALIPLQAPLKTMLQIGVMPMLNERTWRGVQIPLPEGINFVHEVVTNHAGFLTIGADLHFAKGLREVIEKNRPADVRASTAPTPSTAAV

SEQ ID NO: 10541 - protein, 405 aa, Homo sapiens
MLQITNASLGLRFRRQLLYWFFYDGGYINASAEGVSIRTGLELSRDPAGRMKVSNVSCQASVSRMHAAFGGTFKKVYDFLSTFITSGMRFLLNQQICPVLYHAGTVLLNSLLDTVPVRSSVDELVGIDYSLMKDPVASTSNLDMDFRGAFFPLTERNWSLPNRAVEPQLQEEERMVYVAFSEFFFDSAMESYFRAGALQLLLVGDKVPHDLDMLLRATYFGSIVLLSPAVIDSPLKLELRVLAPPRCTIKPSGTTISVTASVTIALVPPDQPEVQLSSMTMDARLSAKMALRGKALRTQLDLRRFRIYSNHSALESLALIPLQAPLKTMLQIGVMPMLNERTWRGVQIPLPEGINFVHEVVTNHAGFLTIGADLHFAKGLREVIEKNRPADVRASTAPTPSTAAV

SEQ ID NO: 10542 - protein, 1894 aa, Homo sapiens
MKAMPWNWTCLLSHLLMVGMGSSTLLTRQPAPLSQKQRSFVTFRGEPAEGFNHLVVDERTGHIYLGAVNRIYKLSSDLKVLVTHETGPDEDNPKCYPPRIVQTCNEPLTTTNNVNKMLLIDYKENRLIACGSLYQGICKLLRLEDLFKLGEPYHKKEHYLSGVNESGSVFGVIVSYSNLDDKLFIATAVDGKPEYFPTISSRKLTKNSEADGMFAYVFHDEFVASMIKIPSDTFTIIPDFDIYYVYGFSSGNFVYFLTLQPEMVSPPGSTTKEQVYTSKLVRLCKEDTAFNSYVEVPIGCERSGVEYRLLQAAYLSKAGAVLGRTLGVHPDDDLLFTVFSKGQKRKMKSLDESALCIFILKQINDRIKERLQSCYRGEGTLDLAWLKVKDIPCSSALLTIDDNFCGLDMNAPLGVSDMVRGIPVFTEDRDRMTSVIAYVYKNHSLAFVGTKSGKLKKIRVDGPRGNALQYETVQVVDPGPVLRDMAFSKDHEQLYIMSERQLTRVPVESCGQYQSCGECLGSGDPHCGWCVLHNTCTRKERCERSKEPRRFASEMKQCVRLTVHPNNISVSQYNVLLVLETYNVPELSAGVNCTFEDLSEMDGLVVGNQIQCYSPAAKEVPRIITENGDHHVVQLQLKSKETGMTFASTSFVFYNCSVHNSCLSCVESPYRCHWCKYRHVCTHDPKTCSFQEGRVKLPEDCPQLLRVDKILVPVEVIKPITLKAKNLPQPQSGQRGYECILNIQGSEQRVPALRFNSSSVQCQNTSYSYEGMEINNLPVELTVVWNGHFNIDNPAQNKVHLYKCGAMRESCGLCLKADPDFACGWCQGPGQCTLRQHCPAQESQWLELSGAKSKCTNPRITEIIPVTGPREGGTKVTIRGENLGLEFRDIASHVKVAGVECSPLVDGYIPAEQIVCEMGEAKPSQHAGFVEICVAVCRPEFMARSSQLYYFMTLTLSDLKPSRGPMSGGTQVTITGTNLNAGSNVVVMFGKQPCLFHRRSPSYIVCNTTSSDEVLEMKVSVQVDRAKIHQDLVFQYVEDPTIVRIEPEWSIVSGNTPIAVWGTHLDLIQNPQIRAKHGGKEHINICEVLNATEMTCQAPALALGPDHQSDLTERPEEFGFILDNVQSLLILNKTNFTYYPNPVFEAFGPSGILELKPGTPIILKGKNLIPPVAGGNVKLNYTVLVGEKPCTVTVSDVQLLCESPNLIGRHKVMARVGGMEYSPGMVYIAPDSPLSLPAIVSIAVAGGLLIIFIVAVLIAYKRKSRESDLTLKRLQMQMDNLESRVALECKEAFAELQTDIHELTSDLDGAGIPFLDYRTYTMRVLFPGIEDHPVLRDLEVPGYRQERVEKGLKLFAQLINNKVFLLSFIRTLESQRSFSMRDRGNVASLIMTVLQSKLEYATDVLKQLLADLIDKNLESKNHPKLLLRRTESVAEKMLTNWFTFLLYKFLKECAGEPLFSLFCAIKQQMEKGPIDAITGEARYSLSEDKLIRQQIDYKTLVLSCVSPDNANSPEVPVKILNCDTITQVKEKILDAIFKNVPCSHRPKAADMDLEWRQGSGARMILQDEDITTKIENDWKRLNTLAHYQVPDGSVVALVSKQVTAYNAVNNSTVSRTSASKYENMIRYTGSPDSLRSRTPMITPDLESGVKMWHLVKNHEHGDQKEGDRGSKMVSEIYLTRLLATKGTLQKFVDDLFETIFSTAHRGSALPLAIKYMFDFLDEQADKHGIHDPHVRHTWKSNCLPLRFWVNMIKNPQFVFDIHKNSITDACLSVVAQTFMDSCSTSEHRLGKDSPSNKLLYAKDIPSYKNWVERYYSDIGKMPAISDQDMNAYLAEQSRMHMNEFNTMSALSEIFSYVGKYSEEILGPLDHDDQCGKQKLAYKLEQVITLMSLDS

SEQ ID NO: 10543 - protein, 1894 aa, Homo sapiens; identical to SEQ ID NO: 10542

SEQ ID NO: 10544 - protein, 522 aa, Homo sapiens
MKAMPWNWTCLLSHLLMVGMGSSTLLTRQPAPLSQKQRSFVTFRGEPAEGFNHLVVDERTGHIYLGAVNRIYKLSSDLKVLVTHETGPDEDNPKCYPPRIVQTCNEPLTTTNNVNKMLLIDYKENRLIACGSLYQGICKLLRLEDLFKLGEPYHKKEHYLSGVNESGSVFGVIVSYSNLDDKLFIATAVDGKPEYFPTISSRKLTKNSEADGMFAYVFHDEFVASMIKIPSDTFTIIPDFDIYYVYGFSSGNFVYFLTLQPEMVSPPGSTTKEQVYTSKLVRLCKEDTAFNSYVEVPIGCERSGVEYRLLQAAYLSKAGAVLGRTLGVHPDDDLLFTVFSKGQKRKMKSLDESALCIFILKQINDRIKERLQSCYRGEGTLDLAWLKVKDIPCSSALLTIDDNFCGLDMNAPLGVSDMVRGIPVFTEDRDRMTSVIAYVYKNHSLAFVGTKSGKLKKSFGTGPQGGITQEWIGVEGDPPGANIASQEQMLCVYLQCSSHKAISDQRVQPLLCCFLNVPGNSS

SEQ ID NO: 10545 - protein, 492 aa, Homo sapiens
MKAMPWNWTCLLSHLLMVGMGSSTLLTRQPAPLSQKQRSFVTFRGEPAEGFNHLVVDERTGHIYLGAVNRIYKLSSDLKVLVTHETGPDEDNPKCYPPRIVQTCNEPLTTTNNVNKMLLIDYKENRLIACGSLYQGICKLLRLEDLFKLGEPYHKKEHYLSGVNESGSVFGVIVSYSNLDDKLFIATAVDGKPEYFPTISSRKLTKNSEADGMFAYVFHDEFVASMIKIPSDTFTIIPDFDIYYVYGFSSGNFVYFLTLQPEMVSPPGSTTKEQVYTSKLVRLCKEDTAFNSYVEVPIGCERSGVEYRLLQAAYLSKAGAVLGRTLGVHPDDDLLFTVFSKGQKRKMKSLDESALCIFILKQINDRIKERLQSCYRGEGTLDLAWLKVKDIPCSSALLTIDDNFCGLDMNAPLGVSDMVRGIPVFTEDRDRMTSVIAYVYKNHSLAFVGTKSGKLKKMPGTSLCPTLELQTGPRSHRATVTLELLFSSCSSN

SEQ ID NO: 10546 - protein, 160 aa, Homo sapiens
GPDVTAGGPVEARQHPYALQCPGWSHPHPVQGGGLPAAGGQPAGPAWGAPCPPGGGEPGVAPGAADRRGGRGQVQERQREREGADEGHHRDLPDAAALSQGHTAAVCGQLLPERAGLGTRCHLQSSTSSTSWTSRQRSTTSRMKTPSTSGRRTAYRSGSG

SEQ ID NO: 10547 - protein, 162 aa, Homo sapiens
MALQLWALTLLGLLGAGASLRPRKLDFFRSEKELNHLAVDEASGVVYLGAVNALYQLDAKLQLEQQVATGPALDNKKCTPPIEASQCHEAEMTDNVNQLLLLDPPRKRLVECGSLFKGICALRALSNISLRLFYEDGSGEKSFVASNDEGVATVGLVSSTGP

SEQ ID NO: 10548 - protein, 1838 aa, Homo sapiens
MALQLWALTLLGLLGAGASLRPRKLDFFRSEKELNHLAVDEASGVVYLGAVNALYQLDAKLQLEQQVATGPALDNKKCTPPIEASQCHEAEMTDNVNQLLLLDPPRKRLVECGSLFKGICALRALSNISLRLFYEDGSGEKSFVASNDEGVATVGLVSSTGPGGDRVLFVGKGNGPHDNGIIVSTRLLDRTDSREAFEAYTDHATYKAGYLSTNTQQFVAAFEDGPYVFFVFNQQDKHPARNRTLLARMCREDPNYYSYLEMDLQCRDPDIHAAAFGTCLAASVAAPGSGRVLYAVFSRDSRSSGGPGAGLCLFPLDKVHAKMEANRNACYTGTREARDIFYKPFHGDIQCGGHAPGSSKSFPCGSEHLPYPLGSRDGLRGTAVLQRGGLNLTAVTVAAENNHTVAFLGTSDGRILKVYLTPDGTSSEYDSILVEINKRVKRDLVLSGDLGSLYAMTQDKVFRLPVQECLSYPTCTQCRDSQDPYCGWCVVEGRCTRKAECPRAEEASHWLWSRSKSCVAVTSAQPQNMSRRAQGEVQLTVSPLPALSEEDELLCLFGESPPHPARVEGEAVICNSPSSIPVTPPGQDHVAVTIQLLLRRGNIFLTSYQYPFYDCRQAMSLEENLPCISCVSNRWTCQWDLRYHECREASPNPEDGIVRAHMEDSCPQFLGPSPLVIPMNHETDVNFQGKNLDTVKGSSLHVGSDLLKFMEPVTMQESGTFAFRTPKLSHDANETLPLHLYVKSYGKNIDSKLHVTLYNCSFGRSDCSLCRAANPDYRCAWCGGQSRCVYEALCNTTSECPPPVITRIQPETGPLGGGIRITILGSNLGVQAGDIQRISVAGRNCSFQPERYSVSTRIVCVIEAAETPFTGGVEVDVFGKLGRSPPNVQFTFQQPKPLSVEPQQGPQAGGTTLTIHGTHLDTGSQEDVRVTLNGVPCKVTKFGAQLQCVTGPQATRGQMLLEVSYGGSPVPNPGIFFTYRENPVLRAFEPLRSFASGGRSINVTGQGFSLIQRFAMVVIAEPLQSWQPPREAESLQPMTVVGTDYVFHNDTKVVFLSPAVPEEPEAYNLTVLIEMDGHRALLRTEAGAFEYVPDPTFENFTGGVKKQVNKLIHARGTNLNKAMTLQEAEAFVGAERCTMKTLTETDLYCEPPEVQPPPKRRQKRDTTHNLPEFIVKFGSREWVLGRVEYDTRVSDVPLSLILPLVIVPMVVVIAVSVYCYWRKSQQAEREYEKIKSQLEGLEESVRDRCKKEFTDLMIEMEDQTNDVHEAGIPVLDYKTYTDRVFFLPSKDGDKDVMITGKLDIPEPRRPVVEQALYQFSNLLNSKSFLINFIHTLENQREFSARAKVYFASLLTVALHGKLEYYTDIMHTLFLELLEQYVVAKNPKLMLRRSETVVERMLSNWMSICLYQYLKDSAGEPLYKLFKAIKHQVEKGPVDAVQKKAKYTLNDTGLLGDDVEYAPLTVSVIVQDEGVDAIPVKVLNCDTISQVKEKIIDQVYRGQPCSCWPRPDSVVLEWRPGSTAQILSDLDLTSQREGRWKRVNTLMHYNVRDGATLILSKVGVSQQPEDSQQDLPGERHALLEEENRVWHLVRPTDEVDEGKSKRGSVKEKERTKAITEIYLTRLLSVKGTLQQFVDNFFQSVLAPGHAVPPAVKYFFDFLDEQAEKHNIQDEDTIHIWKTNSLPLRFWVNILKNPHFIFDVHVHEVVDASLSVIAQTFMDACTRTEHKLSRDSPSNKLLYAKEISTYKKMVEDYYKGIRQMVQVSDQDMNTHLAEISRAHTDSLNTLVALHQLYQYTQKYYDEIINALEEDPAAQKMQLAFRLQQIAAALENKVTDL

SEQ ID NO: 10549 - protein, 477 aa, Homo sapiens
MALQLWALTLLGLLGAGASLRPRKLDFFRSEKELNHLAVDEASGVVYLGAVNALYQLDAKLQLEQQVATGPALDNKKCTPPIEASQCHEAEMTDNVNQLLLLDPPRKRLVECGSLFKGICALRALSNISLRLFYEDGSGEKSFVASNDEGVATVGLVSSTGPGGDRVLFVGKGNGPHDNGIIVSTRLLDRTDSREAFEAYTDHATYKAGYLSTNTQQFVAAFEDGPYVFFVFNQQDKHPARNRTLLARMCREDPNYYSYLEMDLQCRDPDIHAAAFGTCLAASVAAPGSGRVLYAVFSRDSRSSGGPGAGLCLFPLDKVHAKMEANRNACYTGTREARDIFYKPFHGDIQCGGHAPGSSKSFPCGSEHLPYPLGSRDGLRGTAVLQRGGLNLTAVTVAAENNHTVAFLGTSDGRILKVYLTPDGTSSEYDSILVEINKRVKRDLVLSGDLGSLYAMTQDKVFRLPVQECLSYPTCTQ

SEQ ID NO: 10550 - protein, 1838 aa, Homo sapiens; identical to SEQ ID NO: 10548

SEQ ID NO: 10551 - protein, 347 aa, Homo sapiens [sequence omitted]

SEQ ID NO: 10552 - protein, 189 aa, Homo sapiens
  SITE 1: note = misc_feature - Xaa can be any naturally occurring amino acid
XEVWGAAPVCHWPPGDTGPDASGGLLRGVPRAQPRHLLHLPRKPRTASLRAATKLCQVVGTDYVFHNDTKVVFLSPAVPEEPEAYNLTVLIEMDGHRALLRTEAGAFEYVPDPTFENFTGGVKKQVNKLIHARGTNLNKAMTLQEAEAFVGAERCTMKTLTETDLYCEPPEVQPPPKRRQKRDTTHNLP

SEQ ID NO: 10553 - protein, 84 aa, Homo sapiens
  SITE 1: note = misc_feature - Xaa can be any naturally occurring amino acid
XTDVNFQGKNLDTVKVWMSGGGGRGKPTEDVQRLLQTQGSSLHVGSDLLKFMEPVTMQESGTFAFRTPKLSHDANETLPLHLYV

SEQ ID NO: 10554 - protein, 234 aa, Homo sapiens
YKPFHGDIQCGGHAPGSSKSFPCGSEHLPYPLGSRDGLRGTAVLQRGGLNLTAVTVAAENNHTVAFLEWRPGSTAQILSDLDLTSQREGRWKRVNTLMHYNVRDGATLILSKVGVSQQPEDSQQDLPGERHALLEEENRVWHLVRPTDEVDEGKSKRGSVKEKERTKAITEIYLTRLLSVKGTLQQFVDNFFQSVLAPGHAVPPAVKYFFDFLDEQAEKHNIQDEDTIHIWKTN

SEQ ID NO: 10555 - protein, 502 aa, Homo sapiens
MAQRCVCVLALVAMLLLVFPTVSRSMGPRSGEHQRASRIPSQFSKEERVAMKEALKGAIQIPTVTFSSEKSNTTALAEFGKYIHKVFPTVVSTSFIQHEVVEEYSHLFTIQGSDPSLQPYLLMAHFDVVPAPEEGWEVPPFSGLERDGIIYGRGTLDDKNSVMALLQALELLLIRKYIPRRSFFISLGHDEESSGTGAQRISALLQSRGVQLAFIVDEGGFILDDFIPNFKKPIALIAVSEKGSMNLMLQVNMTSGHSSAPPKETSIGILAAAVSRLEQTPMPIIFGSGTVVTVLQQLANEFPFPVNIILSNPWLFEPLISRFMERNPLTNAIIRTTTALTIFKAGVKFNVIPPVAQATVNFRIHPGQTVQEVLELTKNIVADNRVQFHVLSAFDPLPVSPSDDKALGYQLLRQTVQSVFPEVNITAPVTSIGNTDSRFFTNLTTGIYRFYPIYIQPEDFKRIHGVNEKISVQAYETQVKFIFELIQNADTDQEPVSHLHKL

SEQ ID NO: 10556 - protein, 165 aa, Homo sapiens
MAKMNLSSYILILTFSLFSQGILLSASKSIRNLDDDMVFNTFRLGKGFQKEDTAEKSVIAPSLEQYKNDESSFMNEEENKVSKNTGSKHNFLNHGLPLNLAIKPYLALKGSVAFPAENGVQNTESTQEKREIGDEENSAKFPIGRRDFDMLRCMLGRVYRPCWQV

SEQ ID NO: 10557 - protein, 290 aa, Homo sapiens
MDLVLKRCLLHLAVIGALLAVGATKGGQVSLKVSNDGPTLIGANASFSIALNFPGSQKVLPDGQVIWVNNTIINGSQVWGGQPVYPQETDDACIFPDGGPCPSGSWSQKRSFVYVWKTWEGIESAEILQAVPSGEGDAFELTVSCQGGLPKEACMEISSPGCQPPAQRLCQPVLPSPACQLVLHQILKGGSGTYCLNVSLADTNSLAVVSTQLIMPGQEAGLGQVPLIVGILLVLMAVVLASLIYRRRLMKQDFSVPQLPHSSSHWLRLPRIFCSCPIGENSPLLSGQQV

SEQ ID NO: 10558 - protein, 575 aa, Homo sapiens
MDLVLKRCLLHLAVIGALLAVGATKGSQVWGGQPVYPQETDDACIFPDGGPCPSGSWSQKRSFVYVWKTWGQYWQVLGGPVSGLSIGTGRAMLGTHTMEVTVYHRRGSRSYVPLAHSSSAFTITDQVPFSVSVSQLRALDGGNKHFLRNQPLTFALQLHDPSGYLAEADLSYTWDFGDSSGTLISRALVVTHTYLEPGPVTAQVVLQAAIPLTSCGSSPVPGTTDGHRPTAEAPNTTAGQVPTTEVVGTTPGQAPTAEPSGTTSVQVPTTEVISTAPVQMPTAESTGMTPEKVPVSEVMGTTLAEMSTPEATGMTPAEVSIVVLSGTTAAQVTTTEWVETTARELPIPEPEGPDASSIMSTESITGSLGPLLDGTATLRLVKRQVPLDCVLYRYGSFSVTLDIVQGIESAEILQAVPSGEGDAFELTVSCQGGLPKEACMEISSPGCQPPAQRLCQPVLPSPACQLVLHQILKGGSGTYCLNVSLADTNSLAVVSTQLIMPGQEAGLGQVPLIVGILLVLMAVVLASLIYRRRLMKQDFSVPQLPHSSSHWLRLPRIFCSCPIGENSPLLSGQQV

SEQ ID NO: 10559 - protein, 151 aa, Homo sapiens
MDLVLKRCLLHLAVIGALLAVGATKVPRNQDWLGVSRQLRTKAWNRQLYPEWTEAQRLDCWRGGQVSLKVSNDGPTLIGANASFSIALNFPGSQKVLPDGQVIWVNNTIINGSQVWGGQPVYPQETDDACIFPDGGPCPSGSWSQKRSFVY

SEQ ID NO: 10560 - protein, 344 aa, Homo sapiens
MDLVLKRCLLHLAVIGALLAVGATKVPRNQDWLGVSRQLRTKAWNRQLYPEWTEAQRLDCWRGGQVSLKVSNDGPTLIGANASFSIALNFPGSQKVLPDGQVIWVNNTIINGSQVWGGQPVYPQETDDACIFPDGGPCPSGSWSQKRSFVYVWKTWDQVPFSVSVSQLRALDGGNKHFLRNQPLTFALQLHDPSGYLAEADLSYTWDFGDSSGTLISRALVVTHTYLEPGPVTAQVVLQAAIPLTSCGSSPVPGTTDGHRPTAEAPNTTAGQVPTTEVVGTTPGQAPTAEPSGTTSVQVPTTEVISTAPVQMPTAESTGMTPEKVPVSEVMGTTLAEMSTPEAT

SEQ ID NO: 10561 - protein, 668 aa, Homo sapiens
MDLVLKRCLLHLAVIGALLAVGATKVPRNQDWLGVSRQLRTKAWNRQLYPEWTEAQRLDCWRGGQVSLKVSNDGPTLIGANASFSIALNFPGSQKVLPDGQVIWVNNTIINGSQVWGGQPVYPQETDDACIFPDGGPCPSGSWSQKRSFVYVWKTWGQYWQVLGGPVSGLSIGTGRAMLGTHTMEVTVYHRRGSRSYVPLAHSSSAFTITDQVPFSVSVSQLRALDGGNKHFLRNQPLTFALQLHDPSGYLAEADLSYTWDFGDSSGTLISRALVVTHTYLEPGPVTAQVVLQAAIPLTSCGSSPVPGTTDGHRPTAEAPNTTAGQVPTTEVVGTTPGQAPTAEPSGTTSVQVPTTEVISTAPVQMPTAESTGMTPEKVPVSEVMGTTLAEMSTPEATGMTPAEVSIVVLSGTTAAQVTTTEWVETTARELPIPEPEGPDASSIMSTESITGSLGPLLDGTATLRLVKRQVPLDCVLYRYGSFSVTLDIVQGIESAEILQAVPSGEGDAFELTVSCQGGLPKEACMEISSPGCQPPAQRLCQPVLPSPACQLVLHQILKGGSGTYCLNVSLADTNSLAVVSTQLIMPVPGILLTGQEAGLGQVPLIVGILLVLMAVVLASLIYRRRLMKQDFSVPQLPHSSSHWLRLPRIFCSCPIGENSPLLSGQQV

SEQ ID NO: 10562 - protein, 661 aa, Homo sapiens
MDLVLKRCLLHLAVIGALLAVGATKVPRNQDWLGVSRQLRTKAWNRQLYPEWTEAQRLDCWRGGQVSLKVSNDGPTLIGANASFSIALNFPGSQKVLPDGQVIWVNNTIINGSQVWGGQPVYPQETDDACIFPDGGPCPSGSWSQKRSFVYVWKTWGQYWQVLGGPVSGLSIGTGRAMLGTHTMEVTVYHRRGSRSYVPLAHSSSAFTITDQVPFSVSVSQLRALDGGNKHFLRNQPLTFALQLHDPSGYLAEADLSYTWDFGDSSGTLISRALVVTHTYLEPGPVTAQVVLQAAIPLTSCGSSPVPGTTDGHRPTAEAPNTTAGQVPTTEVVGTTPGQAPTAEPSGTTSVQVPTTEVISTAPVQMPTAESTGMTPEKVPVSEVMGTTLAEMSTPEATGMTPAEVSIVVLSGTTAAQVTTTEWVETTARELPIPEPEGPDASSIMSTESITGSLGPLLDGTATLRLVKRQVPLDCVLYRYGSFSVTLDIVQGIESAEILQAVPSGEGDAFELTVSCQGGLPKEACMEISSPGCQPPAQRLCQPVLPSPACQLVLHQILKGGSGTYCLNVSLADTNSLAVVSTQLIMPGQEAGLGQVPLIVGILLVLMAVVLASLIYRRRLMKQDFSVPQLPHSSSHWLRLPRIFCSCPIGENSPLLSGQQV

SEQ ID NO: 10563 - protein, 661 aa, Homo sapiens; identical to SEQ ID NO: 10562

SEQ ID NO: 10564 - protein, 661 aa, Homo sapiens; identical to SEQ ID NO: 10562

SEQ ID NO: 10565 - protein, 296 aa, Homo sapiens
MDLVLKRCLLHLAVIGALLAVGATKVPRNQDWLGVSRQLRTKAWNRQLYPEWTEAQRLDCWRGGQVSLKVSNDGPTLIGANASFSIALNFPGSQKVLPDGQVIWVNNTIINGSQVWGGQPVYPQETDDACIFPDGGPCPSGSWSQKRSFVYVWKTWVPGTTDGHRPTAEAPNTTAGQVPTTEVVGTTPGQAPTAEPSGTTSVQVPTTEVISTAPVQMPTAESTAAQVTTTEWVETTARELPIPEPEGPDASSIMSTESITGSLGPLLDGTATLRLVKRQVPLDCVLYRYGSFSVTL

SEQ ID NO: 10566 - protein, 299 aa, Homo sapiens
MDLVLKRCLLHLAVIGALLAVGATKVPRNQDWLGVSRQLRTKAWNRQLYPEWTEAQRLDCWRGSQVWGGQPVYPQETDDACIFPDGGPCPSGSWSQKRSFVYVWKTWGQYWQVLGGPVSGLSIGTGRAMLGTHTMEVTVYHRRGSRSYVPLAHSSSAFTITDQVPFSVSVSQLRALDGGNKHFLRNQPLTFALQLHDPSGYLAEADLSYTWDFGDSSGTLISRALVVTHTYLEPGPVTAQVVLQAAIPLTSCGSSPVPGTTDGHRPTAEAPNTTAGQVPTTEVVGTTPGQAPTAEPSGT

SEQ ID NO: 10567 - protein, 134 aa, Homo sapiens
MGKEEIPRPTLTSVKTLLYTKEFPQTVKVPRNQDWLGVSRQLRTKAWNRQLYPEWTEAQRLDCWRGGQVSLKVSNDGPTLIGANASFSIALNFPGSQKVLPDGQVIWVNNTIINGSQVWGGQPVYPQETDDACI

SEQ ID NO: 10568 - protein, 452 aa, Homo sapiens
  SITE 1: note = misc_feature - Xaa can be any naturally occurring amino acid
XQVWGGQPVYPQETDDACIFPDGGPCPSGSWSQKRSFVYVWKTWGQYWQVLGGPVSGLSIGTGRAMLGTHTMEVTVYHRRGSRSYVPLAHSSSAFTITDQVPFSVSVSQLRALDGGNKHFLRNQPLTFALQLHDPSGYLAEADLSYTWDFGDSSGTLISRALVVTHTYLEPGPVTAQVVLQAAIPLTSCGSSPVPGTTDGHRPTAEAPNTTAGQVPTTEVVGTTPGQAPTAEPSGTTSVQVPTTEVISTAPVQMPTAESTAAQVTTTEWVETTARELPIPEPEGPDASSIMSTESITGSLGPLLDGTATLRLVKRQVPLDCVLYRYGSFSVTLDIVQGIESAEILQAVPSGEGDAFELTVSCQGGLPKEACMEISSPGCQPPAQRLCQPVLPSPACQLVLHQILKGGSGTYCLNVSLADTNSLAVVSTQLIMPVPGILLTGQEAGLGQVPLI

SEQ ID NO: 10569 - protein, 252 aa, Homo sapiens
MAELEFVQIIIIVVVMMVMVVVITCLLSHYKLSARSFISRHSQGRRREDALSSEGCLWPSESTVSGNGIPEPQVYAPPRPTDRLAVPPFAQRERFHRFQPTYPYLQHEIDLPPTISLSDGEEPPPYQGPCTLQLRDPEQQLELNRESVRAPPNRTIFDSDLMDSARLGGPCPPSSNSGISATCYGSGGRMEGPPPTYSEVIGHYPGSSFQHQQSSGPPSLLEGTRLHHTHIAPLESAAIWSKEKDKQKGHPL

SEQ ID NO: 10570 - protein, 227 aa, Homo sapiens
MHRLMGVNSTAAAAAGQPNVSCTCNCKRSLFQSMEISCHGFPVCKSHQHQEWKSLCWSLRSPGGASSITGFGSMKVTNPAMNLPECQWLRIQKAELEFVQIIIIVVVMMVMVVVITCLLSHYKLSARSFISRHSQGRRREDALSSEGCLWPSESTVSGNGIPEPQVYAPPRPTDRLAVPPFAQRERFHRFQPTYPYLQHEIDLPPTISLSDGEEPPPYQGPCTLQLR

SEQ ID NO: 10571 - protein, 287 aa, Homo sapiens
MHRLMGVNSTAAAAAGQPNVSCTCNCKRSLFQSMEITELEFVQIIIIVVVMMVMVVVITCLLSHYKLSARSFISRHSQGRRREDALSSEGCLWPSESTVSGNGIPEPQVYAPPRPTDRLAVPPFAQRERFHRFQPTYPYLQHEIDLPPTISLSDGEEPPPYQGPCTLQLRDPEQQLELNRESVRAPPNRTIFDSDLMDSARLGGPCPPSSNSGISATCYGSGGRMEGPPPTYSEVIGHYPGSSFQHQQSSGPPSLLEGTRLHHTHIAPLESAAIWSKEKDKQKGHPL

SEQ ID NO: 10572 - protein, 237 aa, Homo sapiens
MMVMVVVITCLLSHYKLSARSFISRHSQGRRREDALSSEGCLWPSESTVSGNGIPEPQVYAPPRPTDRLAVPPFAQRERFHRFQPTYPYLQHEIDLPPTISLSDGEEPPPYQGPCTLQLRDPEQQLELNRESVRAPPNRTIFDSDLMDSARLGGPCPPSSNSGISATCYGSGGRMEGPPPTYSEVIGHYPGSSFQHQQSSGPPSLLEGTRLHHTHIAPLESAAIWSKEKDKQKGHPL

SEQ ID NO: 10573 - protein, 237 aa, Homo sapiens; identical to SEQ ID NO: 10572

SEQ ID NO: 10574 - protein, 237 aa, Homo sapiens; identical to SEQ ID NO: 10572

SEQ ID NO: 10575 - protein, 208 aa, Homo sapiens
MPAIPAHGAELEFVQIIIIVVVMMVMVVVITCLLSHYKLSARSFISRHSQGRRREDALSSEGCLWPSESTVSGNGIPEPQVYAPPRPTDRLAVPPFAQRERFHRFQPTYPYLQHEIDLPPTISLSDGEEPPPYQGPCTLQLRDPEQQLELNRESVRAPPNRTIFDSDLMDSARLGGPCPPSSNSGISATCYGSGGRMEGPPPTYSEVI

SEQ ID NO: 10576 - protein, 465 aa, Homo sapiens
MLPLWTLSLLLGAVAGKEVCYERLGCFSDDSPWSGITERPLHILPWSPKDVNTRFLLYTNENPNNFQEVAADSSSISGSNFKTNRKTRFIIHGFIDKGEENWLANVCKNLFKVESVNCICVDWKGGSRTGYTQASQNIRIVGAEVAYFVEFLQSAFGYSPSNVHVIGHSLGAHAAGEAGRRTNGTIGRITGLDPAEPCFQGTPELVRLDPSDAKFVDVIHTDGAPIVPNLGFGMSQVVGHLDFFPNGGVEMPGCKKNILSQIVDIDGIWEGTRDFAACNHLRSYKYYTDSIVNPDGFAGFPCASYNVFTANKCFPCPSGGCPQMGHYADRYPGKTNDVGQKFYLDTGDASNFARWRYKVSVTLSGKKVTGHILVSLFGNKGNSKQYEIFKGTLKPDSTHSNEFDSDVDVGDLQMVKFIWYNNVINPTLPRVGASKIIVETNVGKQFNFCSPETVREEVLLTLTPC

SEQ ID NO: 10577 - protein, 179 aa, Homo sapiens
KLFEVEEVNCICVDWKKGSQATYTQAANNVRVVGAQVAQMLDILLTEYSYPPSKVHLIGHSLGAHVAGEAGSKTPGLSRITGLDPVEASFESTPEEVRLDPSDADFVDVIHTDAAPLIPFLGFGTNQQMGHLDFFPNGGESMPGCKKNALSQIVDLDGIWAGQVLPVSRSRMPTDGSLC

SEQ ID NO: 10578 - protein, 132 aa, Homo sapiens
MLIFWTITLFLLGAAKGKEVCYEDLGCFSDTEPWGGTAIRPLKILPWSPEKIGTRFLLYTNENPNNFQILLLSDPSTIEASNFQMDRKTRFIIHGFIDKGDESWVTDMCKKLFEVEEVNCICVDWKKGSQAT

SEQ ID NO: 10579 - protein, 191 aa, Homo sapiens
MLIFWTITLFLLGAAKGKEVCYEDLGCFSDTEPWGGTAIRPLKILPWSPEKIGTRFLLYTNENPNNFQILLLSDPSTIEASNFQMDRKTRFIIHGFIDKGDESWVTDMCKKLFEVEEVNCICVDWKKGSQATYTQAANNVRVVGAQVAQMLDILLTEYSYPPSKVHLIGHSLGAHVAGEAGSKTPGLSRIT

SEQ ID NO: 10580 - protein, 467 aa, Homo sapiens
MLIFWTITLFLLGAAKGKEVCYEDLGCFSDTEPWGGTAIRPLKILPWSPEKIGTRFLLYTNENPNNFQILLLSDPSTIEASNFQMDRKTRFIIHGFIDKGDESWVTDMCKKLFEVEEVNCICVDWKKGSQATYTQAANNVRVVGAQVAQMLDILLTEYSYPPSKVHLIGHSLGAHVAGEAGSKTPGLSRITGLDPVEASFESTPEEVRLDPSDADFVDVIHTDAAPLIPFLGFGTNQQMGHLDFFPNGGESMPGCKKNALSQIVDLDGIWAGTRDFVACNHLRSYKYYLESILNPDGFAAYPCTSYKSFESDKCFPCPDQGCPQMGHYADKFAGRTSEEQQKFFLNTGEASNFARWRYGVSITLSGRTATGQIKVALFGNKGNTHQYSIFRGILKPGSTHSYEFDAKLDVGTIEKVKFLWNNNVINPTLPKVGATKITVQKGEEKTVYNFCSEDTVREDTLLTLTPC

SEQ ID NO: 10581 - protein, 467 aa, Homo sapiens; identical to SEQ ID NO: 10580

SEQ ID NO: 10582 - protein, 467 aa, Homo sapiens
MLIFWTITLFLLGAAKGKEVCYEDLGCFSDTEPWGGTAIRPLKILPWSPEKIGTRFLLYTNENPNNFQILLLSDPSTIEASNFQMDRKTRFIIHGFIDKGDESWVTDMCKKLFEVEEVNCICVDWKKGSQATYTQAANNVRVVGAQVAQMLDILLVKYSYPPSKVHLIGHSLGAHVAGEAGSKTPGLSRITGLDPVEASFESTPEEVRLDPSDADFVDVIHTDAAPLIPFLGFGTNQQMGHLDFFPNGGESMPGCKKNALSQIVDLDGIWAGTRDFVACNHLRSYKYYLESILNPDGFAAYPCTSYKSFESDKCFPCPDQGCPQMGHYADKFAGRTSEEQQKFFLNTGEASNFARWRYGVSITLSGRTATGQIKVALFGNKGNTHQYSIFRGILKPGSTHSYEFDAKLDVGTIEKVKFLWNNNVINPTLPKVGATKITVQKGEEKTVYNFCSEDTVREDTLLTLTPC

SEQ ID NO: 10583 - protein, 118 aa, Homo sapiens
MLIFWTITLFLLGAAKGKEVCYEDLGCFSDTEPWGGTAIRPLKILPWSPEKIGTRFLLYTNENPNNFQILLLSDPSTIEASNFQMDRKTRFIIHGFIDKGDESWVTDMCKQPGASPRA

SEQ ID NO: 10584 - protein, 185 aa, Homo sapiens
MLIFWTITLFLLGAAKGKEVCYEDLGCFSDTEPWGGTAIRPLKILPWSPEKIGTRFLLYTNENPNNFQILLLSDPSTIEASNFQMDRKTRFIIHGFIDKGDESWVTDMCKTEYSYPPSKVHLIGHSLGAHVAGEAGSKTPGLSRITGLDPVEASFESTPEEVRLDPSDADFVDVIHTDAAPLIPF

SEQ ID NO: 10585 - protein, 163 aa, Homo sapiens
MLIFWTITLFLLGAAKGKEVCYEDLGCFSDTEPWGGTAIRPLKILPWSPEKIGTRFLLYTNENPNNFQILLLSDPSTIEASNFQMDRKTRFIIHGFIDKGDESWVTDMCKTPGLSRITGLDPVEASFESTPEEVRLDPSDADFVDVIHTDAAPLIPFLGFGTN

SEQ ID NO: 10586 - protein, 467 aa, Homo sapiens
MLGIWIVAFLFFGTSRGKEVCYERLGCFKDGLPWTRTFSTELVGLPWSPEKINTRFLLYTIHNPNAYQEISAVNSSTIQASYFGTDKITRINIAGWKTDGKWQRDMCNVLLQLEDINCINLDWINGSREYIHAVNNLRVVGAEVAYFIDVLMKKFEYSPSKVHLIGHSLGAHLAGEAGSRIPGLGRITGLDPAGPFFHNTPKEVRLDPSDANFVDVIHTNAARILFELGVGTIDACGHLDFYPNGGKHMPGCEDLITPLLKFNFNAYKKEMASFFDCNHARSYQFYAESILNPDAFIAYPCRSYTSFKAGNCFFCSKEGCPTMGHFADRFHFKNMKTNGSHYFLNTGSLSPFARWRHKLSVKLSGSEVTQGTVFLRVGGAVRKTGEFAIVSGKLEPGMTYTKLIDADVNVGNITSVQFIWKKHLFEDSQNKLGAEMVINTSGKYGYKSTFCSQDIMGPNILQNLKPC

SEQ ID NO: 10587 - protein, 112 aa, Homo sapiens
MARSSWQLSPAAPEHVAAALYQPRASEMQHLRRMPRVRSLFQEQEEPEPGMEEAGEMEQKQLQKRFGGFTGARKSARKLANQKRFSEFMRQYLVLSMQSSQRRRTLHQNGNV

SEQ ID NO: 10588 - protein, 154 aa, Homo sapiens
MKVLLCDLLLLSLFSSVFSSCQRDCLTCQEKLHPALDSFDLEVCILECEEKVFPSPLWTPCTKVMARSSWQLSPAAPEHVAAALYQPRASEMQHLRRMPRVRSLFQEQEEPEPGMEEAGEMEQKQLQKRFGGFTGARKSARKLANQKRFSEFMR

SEQ ID NO: 10589 - protein, 176 aa, Homo sapiens
MKVLLCDLLLLSLFSSVFSSCQRDCLTCQEKLHPALDSFDLEVCILECEEKVFPSPLWTPCTKVMARSSWQLSPAAPEHVAAALYQPRASEMQHLRRMPRVRSLFQEQEEPEPGMEEAGEMEQKQLQKRFGGFTGARKSARKLANQKRFSEFMRQYLVLSMQSSQRRRTLHQNGNV

SEQ ID NO: 10590 - protein, 93 aa, Homo sapiens
MENGYTYEDYKNTAEWLLSHTKHRPQVAIICGSGLGGLTDKLTQAQIFDYGEIPNFPRSTVPGHAGRLVFGFLNGRACVMMQGRFHMYEGYPL

SEQ ID NO: 10591 - protein, 289 aa, Homo sapiens
MENGYTYEDYKNTAEWLLSHTKHRPQVAIICGSGLGGLTDKLTQAQIFDYGEIPNFPRSTVPGHAGRLVFGFLNGRACVMMQGRFHMYEGYPLWKVTFPVRVFHLLGVDTLVVTNAAGGLNPKFEVGDIMLIRDHINLPGFSGQNPLRGPNDERFGDRFPAMSDAYDRTMRQRALSTWKQMGEQRELQEGTYVMVAGPSFETVAECRVLQKLGADAVGMSTVPEVIVARHCGLRVFGFSLITNKVIMDYESLEKANHEEVLAAGKQAAQKLEQFVSILMASIPLPDKAS

SEQ ID NO: 10592 - protein, 61 aa, Homo sapiens
MMQGRFHMYEGYPLWKVTFPVRVFHLLGVDTLVVTNAAGGLNPKFEVGDIMLIRDHINLPG

SEQ ID NO: 10593 - protein, 221 aa, Homo sapiens
MQRGLALSLVSGARRQSHAAASAGRDARGNRAGVAPPEQEGDRYTYEDYKNTAEWLLSHTKHRPQVAIICGSGLGGLTDKLTQAQIFDYGEIPNFPRSTVPGHAGRLVFGFLNGRACVMMQGRFHMYEGYPLWKVTFPVRVFHLLGVDTLVVTNAAGGLNPKFEVGDIMLIRDHINLPGFSGQNPLRGPNDERFGDRFPAMSDAYDRTMRQRALSTWKQMG

SEQ ID NO: 10594 - protein, 166 aa, Homo sapiens
MARLRSGMESILPPSAHELAQNRLHVSITNAKTRENHLVSTFSSREDLIKVLLASSFVPIYAGLKLVEYKGQKWVDGGLTNALPILPVGRTVTISPFSGRLDISPQDKGQLDLYVNIAKQDIMLSLANLVRLNQALFPPSKRKMESLYQCGFDDTVKFLLKENWFE

SEQ ID NO: 10595 - protein, 190 aa, Homo sapiens
MKHINLSFAACGFLGIYHLGAASALCRHGKKLVKDVKAFAGASAGSLVASVLLTAPEKIEECNQFTYKFAEEIRRQSFGAVTPGYDFMARLRSGMESILPPSAHELAQNRLHVSITNAKTRENHLVSTFSSREDLIKVLLASSFVPIYAGLKLVEYKGQKWVDGGLTNALPILPVGRTVTISPFSGRLDI

SEQ ID NO: 10596 - protein, 253 aa, Homo sapiens
MKHINLSFAACGFLGIYHLGAASALCRHGKKLVKDVKAFAGASAGSLVASVLLTAPEKIEECNQFTYKFAEEIRRQSFGAVTPGYDFMARLRSGMESILPPSAHELAQNRLHVSITNAKTRENHLVSTFSSREDLIKVLLASSFVPIYAGLKLVEYKGQKWVDGGLTNALPILPVGRTVTISPFSGRLDISPQDKGQLDLYVNIAKQDIMLSLANLVRLNQALFPPSKRKMESLYQCGFDDTVKFLLKENWFE

SEQ ID NO: 10597 - protein, 253 aa, Homo sapiens; identical to SEQ ID NO: 10596

SEQ ID NO: 10598 - protein, 135 aa, Homo sapiens
LQLQRNQLRMLEPEPLAGLDQLRELSLAHNRLRVGDIGPGTWHELQALQMLDLSHNELSFVPPDLPEALEELHLEGNRIGHVGPEAFLSTPRLRALFLRCPEGDRRGGGGQGRAWEGHDRLSVQGQQASHDEHRG

SEQ ID NO: 10599 - protein, 512 aa, Homo sapiens
MAESGLAMWPSLLLLLLLPGPPPVAGLEDAAFPHLGESLQPLPRACPLRCSCPRVDTVDCDGLDLRVFPDNITRAAQHLSLQNNQLQELPYNELSRLSGLRTLNLHNNLISSEGLPDEAFESLTQLQHLCVAHNKLSVAPQFLPRSLRVADLAANQVMEIFPLTFGEKPALRSVYLHNNQLSNAGLPPDAFRGSEAIATLSLSNNQLSYLPPSLPPSLERLHLQNNLISKVPRGALSRQTQLRELYLQHNQLTDSGLDATTFSKLHSLEYLDLSHNQLTTVPAGLPRTLAILHLGRNRIRQVEAARLHGARGLRYLLLQHNQLGSSGLPAGALRPLRGLHTLHLYGNGLDRVPPALPRRLRALVLPHNHVAALGARDLVATPGLTELNLAYNRLASARVHHRAFRRLRALRSLDLAGNQLTRLPMGLPTGLRTLQLQRNQLRMLEPEPLAGLDQLRELSLAHNRLRVGDIGPGTWHELQALQVRHRLVSHTVPRAPPSPCLPCHVPNILVSW

SEQ ID NO: 10600 - protein, 32 aa, Homo sapiens
MAWTFECSRTTSPEPLSTSPCRTTSSRNSPTM

SEQ ID NO: 10601 - protein, 430 aa, Homo sapiens
MAWTFECSRTTSPEPLSTSPCRTTSSRNSPTMSCPASVACEPSTSTTTSSPPKLSVAPQFLPRSLRVADLAANQVMEIFPLTFGEKPALRSVYLHNNQLSNAGLPPDAFRGSEAIATLSLSNNQLSYLPPSLPPSLERLHLQNNLISKVPRGALSRQTQLRELYLQHNQLTDSGLDATTFSKLHSLEYLDLSHNQLTTVPAGLPRTLAILHLGRNRIRQVEAARLHGARGLRYLLLQHNQLGSSGLPAGALRPLRGLHTLHLYGNGLDRVPPALPRRLRALVLPHNHVAALGARDLVATPGLTELNLAYNRLASARVHHRAFRRLRALRSLDLAGNQLTRLPMGLPTGLRTLQLQRNQLRMLEPEPLAGLDQLRELSLAHNRLRVGDIGPGTWHELQALQVRHRLVSHTVPRAPPSPCLPCHVPNILVSW

SEQ ID NO: 10602 - protein, 164 aa, Homo sapiens
MAWTFECSRTTSPEPLSTSPCRTTSSRNSPTMSCPASVACEPSTSTTTSSPPKNNLISKVPRGALSRQTQLRELYLQHNQLTDSGLDATTFSKLHSLEYLDLSHNQLTTVPAGLPRTLAILHLGRNRIRQVEAARLHGARGLRYLLLQHNQLGSSGLPAGALRP

SEQ ID NO: 10603 - protein, 123 aa, Homo sapiens
MGRPTQWPSLLLLLLLPGPPPVAGLEDAAFPHLGESLQPLPRACPLRCSCPRVDTVDCDGLDLRVFPDNITRAAQHLSLQNNQLQELPYNELSRLSGLRTLNLHNNLISSEEQSHLQGAPRSP

SEQ ID NO: 10604 - protein, 510 aa, Homo sapiens
MGRPTQWPSLLLLLLLPGPPPVAGLEDAAFPHLGESLQPLPRACPLRCSCPRVDTVDCDGLDLRVFPDNITRAAQHLSLQNNQLQELPYNELSRLSGLRTLNLHNNLISSEGLPDEAFESLTQLQHLCVAHNKLSVAPQFLPRSLRVADLAANQVMEIFPLTFGEKPALRSVYLHNNQLSNAGLPPDAFRGSEAIATLSLSNNQLSYLPPSLPPSLERLHLQNNLISKVPRGALSRQTQLRELYLQHNQLTDSGLDATTFSKLHSLEYLDLSHNQLTTVPAGLPRTLAILHLGRNRIRQVEAARLHGARGLRYLLLQHNQLGSSGLPAGALRPLRGLHTLHLYGNGLDRVPPALPRRLRALVLPHNHVAALGARDLVATPGLTELNLAYNRLASARVHHRAFRRLRALRSLDLAGNQLTRLPMGLPTGLRTLQLQRNQLRMLEPEPLAGLDQLRELSLAHNRLRVGDIGPGTWHELQALQVRHRLVSHTVPRAPPSPCLPCHVPNILVSW

SEQ ID NO: 10605 - protein, 421 aa, Homo sapiens
MGRPTQWPSLLLLLLLPGPPPVAGLEDAAFPHLGESLQPLPRACPLRCSCPRVDTVDCDGLDLRVFPDNITRAAQHLSLQNNQLQELPYNELSRLSGLRTLNLHNNLISSEGLPDEAFESLTQLQHLCVAHNKNNLISKVPRGALSRQTQLRELYLQHNQLTDSGLDATTFSKLHSLEYLDLSHNQLTTVPAGLPRTLAILHLGRNRIRQVEAARLHGARGLRYLLLQHNQLGSSGLPAGALRPLRGLHTLHLYGNGLDRVPPALPRRLRALVLPHNHVAALGARDLVATPGLTELNLAYNRLASARVHHRAFRRLRALRSLDLAGNQLTRLPMGLPTGLRTLQLQRNQLRMLEPEPLAGLDQLRELSLAHNRLRVGDIGPGTWHELQALQVRHRLVSHTVPRAPPSPCLPCHVPNILVSW

SEQ ID NO: 10606 - protein, 505 aa, Homo sapiens
MWPSLLLLLLLPGPPPVAGLEDAAFPHLGESLQPLPRACPLRCSCPRVDTVDCDGLDLRVFPDNITRAAQHLSLQNNQLQELPYNELSRLSGLRTLNLHNNLISSEGLPDEAFESLTQLQHLCVAHNKLSVAPQFLPRSLRVADLAANQVMEIFPLTFGEKPALRSVYLHNNQLSNAGLPPDAFRGSEAIATLSLSNNQLSYLPPSLPPSLERLHLQNNLISKVPRGALSRQTQLRELYLQHNQLTDSGLDATTFSKLHSLEYLDLSHNQLTTVPAGLPRTLAILHLGRNRIRQVEAARLHGARGLRYLLLQHNQLGSSGLPAGALRPLRGLHTLHLYGNGLDRVPPALPRRLRALVLPHNHVAALGARDLVATPGLTELNLAYNRLASARVHHRAFRRLRALRSLDLAGNQLTRLPMGLPTGLRTLQLQRNQLRMLEPEPLAGLDQLRELSLAHNRLRVGDIGPGTWHELQALQVRHRLVSHTVPRAPPSPCLPCHVPNILVSW

SEQ ID NO: 10607 - protein, 574 aa, Homo sapiens
MWPSLLLLLLLPGPPPVAGLEDAAFPHLGESLQPLPRACPLRCSCPRVDTVDCDGLDLRVFPDNITRAAQHLSLQNNQLQELPYNELSRLSGLRTLNLHNNLISSEGLPDEAFESLTQLQHLCVAHNKLSVAPQFLPRSLRVADLAANQVMEIFPLTFGEKPALRSVYLHNNQLSNAGLPPDAFRGSEAIATLSLSNNQLSYLPPSLPPSLERLHLQNNLISKVPRGALSRQTQLRELYLQHNQLTDSGLDATTFSKLHSLEYLDLSHNQLTTVPAGLPRTLAILHLGRNRIRQVEAARLHGARGLRYLLLQHNQLGSSGLPAGALRPLRGLHTLHLYGNGLDRVPPALPRRLRALVLPHNHVAALGARDLVATPGLTELNLAYNRLASARVHHRAFRRLRALRSLDLAGNQLTRLPMGLPTGLRTLQLQRNQLRMLEPEPLAGLDQLRELSLAHNRLRVGDIGPGTWHELQALQMLDLSHNELSFVPPDLPEALEELHLEGNRIGHVGPEAFLSTPRLRALFLRANRLHMTSIAAEAFLGLPNLRVVDTAGNPEQVLIRLPPTTPRGPRAGGP

SEQ ID NO: 10608 - protein, 151 aa, Homo sapiens
RRLPRLRGHRHPQPLQQPAQLPAAQPAALTRAAPPAGSPANNLISKVPRGALSRQTQLRELYLQHNQLTDSGLDATTFSKLHSLEYLDLSHNQLTTVPAGLPRTLAILHLGRNRIRQVEAARLHGARGLRYLLLQHNQLGSSGLPAGALRP

SEQ ID NO: 10609 - protein, 182 aa, Homo sapiens
  SITE 1: note = misc_feature - Xaa can be any naturally occurring amino acid
XFESLTQLQHLCVAHNKLSNAGLPPDAFRGSEAIATLSLSNNQLSYLPPSLPPSLERLHLQNNLISKVPRGALSRQTQLRELYLQHNQLTDSGLDATTFSKLHSLEYLDLSHNQLTTVPAGLPRTLAILHLGRNRIRQVEAARLHGARGLRYLLLQHNQLGSSGLPAGALRPLRGLHTLHLY

SEQ ID NO: 10610 - protein, 388 aa, Homo sapiens
MGAAAWARPLSVSFLLLLLPLPGMPAGSWDPAGYLLYCPCMGRFGNQADHFLGSLAFAKLLNRTLAVPPWIEYQHHKPPFTNLHVSYQKYFKLEPLQAYHRVISLEDFMEKLAPTHWPPEKRVAYCFEVAAQRSPDKKTCPMKEGNPFGPFWDQFHVSFNKSELFTGISFSASYREQWSQRFSPKEHPVLALPGAPAQFPVLEEHRPLQKYMVWSDEMVKTGEAQIHAHLVRPYVGIHLRIGSDWKNACAMLKDGTAGSHFMASPQCVGYSRSTAAPLTMTMCLPDLKEIQRAVKLWVRSLDAQSVYVATDSESYVPELQQLFKGKVKVVSLKPEVAQVDLYILGQADHFIGNCVSSFTAFVKRERDLQGRPSSFFGMDRPPKLRDEF

SEQ ID NO: 10611 - protein, 194 aa, Homo sapiens
MGAAAWARPLSVSFLLLLLPLPGMPAGSWDPAGYLLYCPCMGRFGNQADHFLGSLAFAKLLNRTLAVPPWIEYQHHKPPFTNLHVSYQKYFKLEPLQAYHRVISLEDFMEKLAPTHWPPEKRVAYCFEVAAQRSPDKKTCPMKEGNPFGPFWDQFHVSFNKSELFTGISFSASYREQWSQRRENHSCVTLLFPR

SEQ ID NO: 10612 - protein, 424 aa, Homo sapiens
MATLSFVFLLLGAVSWPPASASGQEFWPGQSAADILSGAASRRRYLLYDVNPPEGFNLRRDVYIRIASLLKTLLKTEEWVLVLPPWGRLYHWQSPDIHQVRIPWSEFFDLPSLNKNIPVIEYEQFIAESGGPFIDQVYVLQSYAEGWKEGTWEEKVDERPCIDQLLYSQDKHEYYRGWFWGYEETRGLNVSCLSVQGSASIVAPLLLRNTSARSVMLDRAENLLHDHYGGKEYWDTRRSMVFARHLREVGDEFRSRHLNSTDDADRIPFQEDWMKMKVKLGSALGGPYLGVHLRRKDFIWGHRQDVPSLEGAVRKIRSLMKTHRLDKVFVATDAVRKEYEELKKLLPEMVRFEPTWEELELYKDGGVAIIDQWICAHARCLPTSLSAESGSGGFQRFFCPKYSVSEQMVACVHSGHFHTVCLLV

SEQ ID NO: 10613 - protein, 429 aa, Homo sapiens
MATLSFVFLLLGAVSWPPASASGQEFWPGQSAADILSGAASRRRYLLYDVNPPEGFNLRRDVYIRIASLLKTLLKTEEWVLVLPPWGRLYHWQSPDIHQVRIPWSEFFDLPSLNKNIPVIEYEQFIAESGGPFIDQVYVLQSYAEGWKEGTWEEKVDERPCIDQLLYSQDKHEYYRGWFWGYEETRGLNVSCLSVQGSASIVAPLLLRNTSARSVMLDRAENLLHDHYGGKEYWDTRRSMVFARHLREVGDEFRSRHLNSTDDADRIPFQEDWMKMKVKLGSALGGPYLGVHLRRKDFIWGHRQDVPSLEGAVRKIRSLMKTHRLDKVFVATDAVRKEYEELKKLLPEMVRFEPTWEELELYKDGGVAIIDQWICAHARFFIGTSVSTFSFRIHEEREILGLDPKTTYNRFCGDQEKACEQPTHWKITY

SEQ ID NO: 10614 - protein, 380 aa, Homo sapiens
MATLSFVFLLLGAVSWPPASASGQEFWPGQSAADILSGAASRRRYLLYDVNPPEGFNLRRDVYIRIASLLKTLLKTEEWVLVLPPWGRLYHWQSPDIHQVRIPWSEFFDLPSLNKNIPVIEYEQFIAESGGPFIDQVYVLQSYAEGWKEGTWEEKVDERPCIDQLLYSQDKHEYYRGWFWGYEETRGLNVSCLSVQGSASIVAPLLLRNTSARSVMLDRAENLLHDHYGGKEYWDTRRSMVFARHLREVGDEFRSRHLNSTDDADRIPFQEDWMKMKVKLGSALGGPYLGVHLRRKDFIWGHRQDVPSLEGAVRKIRSLMKTHRLDKVFVATDAVRKEYEELKKLLPEMVRFEPTWEELELYKDGGVAIIDQWICAHASS

SEQ ID NO: 10615 - protein, 212 aa, Homo sapiens
MATLSFVFLLLGAVSWPPASASGQEFWPGQSAADILSGAASRRRYLLYDVNPPEGFNLRRDVYIRIASLLKTLLKTEEWVLVLPPWGRLYHWQSPDIHQVRIPWSEFFDLPSLNKNIPVIEYEQFIAGRRTACGVCFVVSQCSARDKESGGPFIDQVYVLQSYAEGWKEGTWEEKVDERPCIDQLLYSQDKHEYYRCLLRLLPLPQRMVLGL

SEQ ID NO: 10616 - protein, 141 aa, Homo sapiens
MVFARHLREVGDEFRSRHLNSTDDADRIPFQEDWMKMKVKLGSALGGPYLGVHLRRKDFIWGHRQDVPSLEGAVRKIRSLMKTHRLDKVFVATDAVRKEYEELKKLLPEMVRFEPTWEELELYKDGGVAIIDQWICAHASS

SEQ ID NO: 10617 - protein, 265 aa, Homo sapiens
  SITE 1: note = misc_feature - Xaa can be any naturally occurring amino acid
XQFIAESGGPFIDQVYVLQSYAEGWKEGTWEEKVDERPCIDQLLYSQDKHEYYRDGGLVSPKCRLPLKALTLPGLLWKSCQLTASMCPVPGQLALKHGRGWFWGYEETRGLNVSCLSVQGSASIVAPLLLRNTSARSVMLDRAENLLHDHYGGKEYWDTRRSMVFARHLREVGDEFRSRHLNSTDDADRIPFQEDWMKMKVKLGSALGGPYLGVHLRRKDFIWGHRQDVPSLEGAVRKIRSLMKTHRLDKVFVATDAVRKEYEEL

SEQ ID NO: 10618 - protein, 111 aa, Homo sapiens
MEWWASSPLRLWLLLFLLPSAQGRQKESGGLRAVPSLPLGLGVWPESRGAPPRGRLPGRCRGRCSSELGRRHRGALRRRVQNGKYLLTKLTGLWRITNHVQVKTAAATMVS

SEQ ID NO: 10619 - protein, 163 aa, Homo sapiens
MEWWASSPLRLWLLLFLLPSAQGRQKESGSKWKVFIDQINRSLENYEPCSSQNCSCYHGVIEEDLTPFRGGISRKMMAEVVRRKLGTHYQITKNRLYRENDCMFPSRCSGVEHFILEVIGRLPDMEMVINVRDYPQVPKWMEPAIPVFSFSKARLWKIGKIYL

SEQ ID NO: 10620 - protein, 187 aa, Homo sapiens
MEWWASSPLRLWLLLFLLPSAQGRQKESGSKWKVFIDQINRSLENYEPCSSQNCSCYHGVIEEDLTPFRGGISRKMMAEVVRRKLGTHYQITKNRLYRENDCMFPSRCSGVEHFILEVIGRLPDMEMVINVRDYPQVPKWMEPAIPVFSFSKTCFISCVASGQRPHLCCISHGLASFLESVWFHCLS

SEQ ID NO: 10621 - protein, 392 aa, Homo sapiens
MEWWASSPLRLWLLLFLLPSAQGRQKESGSKWKVFIDQINRSLENYEPCSSQNCSCYHGVIEEDLTPFRGGISRKMMAEVVRRKLGTHYQITKNRLYRENDCMFPSRCSGVEHFILEVIGRLPDMEMVINVRDYPQVPKWMEPAIPVFSFSKTSEYHDIMYPAWTFWEGGPAVWPIYPTGLGRWDLFREDLVRSAAQWPWKKKNSTAYFRGSRTSPERDPLILLSRKNPKLVDAEYTKNQAWKSMKDTLGKPAAKDVHLVDHCKYKYLFNFRGVAASFRFKHLFLCGSLVFHVGDEWLEFFYPQLKPWVHYIPVKTDLSNVQELLQFVKANDDVAQEIAERGSQFIRNHLQMDDITCYWENLLSEYSKFLSYNVTRRKGYDQIIPKMLKTEL

SEQ ID NO: 10622 - protein, 189 aa, Homo sapiens
  SITE 1: note = misc_feature - Xaa can be any naturally occurring amino acid
XCGAALPPAPQRGICSSKWKVFIDQINRSLENYEPCSSQNCSCYHGVIEEDLTPFRGGISRKMMAEVVRRKLGTHYQITKNRLYRENDCMFPSRCSGVEHFILEVIGRLPDMEMVINVRDYPQVPKWMEPAIPVFSFSKTSEYHDIMYPAWTFWEGGPAVWPIYPTGLGRWDLFREDLVRSAAQWPWKK

SEQ ID NO: 10623 - protein, 334 aa, Homo sapiens
MDPRGILKAFPKRQKIHADASSKPSCASALRCLCPESDIGADSACPGPAEWLSSLRAHVVRTGIGRARAELFEKQIVQHGGQLCPAQGPGVTHIVVDEGMDYERALRLLRLPQLPPGAQLVKSAWLSLCLQERRLVDVAGFSIFIPSRYLDHPQPSKAEQDASIPPGTHEALLQTALSPPPPPTRPVSPPQKAKEAPNTQAQPISDDEASDGEETQVSAADLEALISGHYPTSLEGDCEPSPAPAVLDKWVCAQPSSQKATNHNLHITEKLEVLAKAYSVQGDKWRALGYAKAINALKSFHKPVTSYQEACSIPGIGKRMAEKIIEILESGHLR

SEQ ID NO: 10624 - protein, 188 aa, Homo sapiens
MDPRGILKAFPKRQKIHADASSKVLAKIPRREEGEEAEEWLSSLRAHVVRTGIGRARAELFEKQIVQHGGQLCPAQGPGVTHIVVDEGMDYERALRLLRLPQLPPGAQLVKSAWLSLCLQERRLVDVAGFSIFIPSRYLDHPQPSKAEQDASIPPGTHEALLQTALSPPPPPTRPVSPPQKAKEAPNT

SEQ ID NO: 10625 - protein, 470 aa, Homo sapiens
MDPRGILKAFPKRQKIHADASSKVLAKIPRREEGEEAEEWLSSLRAHVVRTGIGRARAELFEKQIVQHGGQLCPAQGPGVTHIVVDEGMDYERALRLLRLPQLPPGAQLVKSAWLSLCLQERRLVDVAGFSIFIPSRYLDHPQPSKAEQDASIPPGTHEALLQTALSPPPPPTRPVSPPQKAKEAPNTQAQPISDDEASDGEETQEACSIPGIGKRMAEKIIEILESGHLRKLDHISESVPVLELFSNIWGAGTKTAQMWYQQGFRSLEDIRSQASLTTQQAIGLKHYSDFLERMPREEATEIEQTVQKAAQAFNSGLLCVACGSYRRGKATCGDVDVLITHPDGRSHRGIFSRLLDSLRQEAVPSVGPGFLTDDLVSQEENGQQQKYLGVCRLPGPGRRHRRLDIIVVPYSEFACALLYFTGSAHFNRSMRALAKTKGMSLSEHALSTAVVRNTHGCKVGPGRVLPTPT

SEQ ID NO: 10626 - protein, 575 aa, Homo sapiens
MDPRGILKAFPKRQKIHADASSKVLAKIPRREEGEEAEEWLSSLRAHVVRTGIGRARAELFEKQIVQHGGQLCPAQGPGVTHIVVDEGMDYERALRLLRLPQLPPGAQLVKSAWLSLCLQERRLVDVAGFSIFIPSRYLDHPQPSKAEQDASIPPGTHEALLQTALSPPPPPTRPVSPPQKAKEAPNTQAQPISDDEASDGEETQVSAADLEALISGHYPTSLEGDCEPSPAPAVLDKWVCAQPSSQKATNHNLHITEKLEVLAKAYSVQGDKWRALGYAKAINALKSFHKPVTSYQEACSIPGIGKRMAEKIIEILESGHLRKLDHISESVPVLELFSNIWGAGTKTAQMWYQQGFRSLEDIRSQASLTTQQAIGLKHYSDFLERMPREEATEIEQTVQKAAQAFNSGLLCVACGSYRRGKATCGDVDVLITHPDGRSHRGIFSRLLDSLRQEGFLTDDLVSQEENGQQQKYLGVCRLPGPGRRHRRLDIIVVPYSEFACALLYFTGSAHFNRSMRALAKTKGMSLSEHALSTAVVRNTHGCKVGPGRVLPTPTEKDVFRLLGLPYREPAERDW

SEQ ID NO: 10627 - protein, 575 aa, Homo sapiens; identical to SEQ ID NO: 10626

SEQ ID NO: 10628 - protein, 575 aa, Homo sapiens; identical to SEQ ID NO: 10626

SEQ ID NO: 10629 - protein, 269 aa, Homo sapiens
MDPRGILKAFPKRQKIHADASSKVLAKIPRREEGEEAEEWLSSLRAHVVRTGIGRARAELFEKQIVQHGGQLCPAQGPGVTHIVVDEGMDYERALRLLRLPQLPPGAQLVKSAWLSLCLQERRLVDVAGFSIFIPSRYLDHPQPSKAEQDASIPPGTHEALLQTALSPPPPPTRPVSPPQKAKEAPNTQAQPISDDEASDGEETQVSAADLEALISGHYPTSLEGDCEPSPAPAVLDKWVCAQPSSQKATNHNLHITEKLEVLAKAYSV

SEQ ID NO: 10630 - protein, 487 aa, Homo sapiens
MDYERALRLLRLPQLPPGAQLVKSAWLSLCLQERRLVDVAGFSIFIPSRYLDHPQPSKAEQDASIPPGTHEALLQTALSPPPPPTRPVSPPQKAKEAPNTQAQPISDDEASDGEETQVSAADLEALISGHYPTSLEGDCEPSPAPAVLDKWVCAQPSSQKATNHNLHITEKLEVLAKAYSVQGDKWRALGYAKAINALKSFHKPVTSYQEACSIPGIGKRMAEKIIEILESGHLRKLDHISESVPVLELFSNIWGAGTKTAQMWYQQGFRSLEDIRSQASLTTQQAIGLKHYSDFLERMPREEATEIEQTVQKAAQAFNSGLLCVACGSYRRGKATCGDVDVLITHPDGRSHRGIFSRLLDSLRQEGFLTDDLVSQEENGQQQKYLGVCRLPGPGRRHRRLDIIVVPYSEFACALLYFTGSAHFNRSMRALAKTKGMSLSEHALSTAVVRNTHGCKVGPGRVLPTPTEKDVFRLLGLPYREPAERDW

SEQ ID NO: 10631 - protein, 152 aa, Homo sapiens
MDYERALRLLRLPQLPPGAQLVKSAWLSLCLQERRLVDVAGFSIFIPSSPSLMMKPVMGKKPRLVQLIWKPSSVATTPPPLREIVSLAQPLLSWISGSVHSPQARRRPITTSISQRSWKFWPKPTVFRETSGGPWAMPRPSMPSRASISLSP

SEQ ID NO: 10632 - protein, 248 aa, Homo sapiens
MEALCVCSLMPLHWSWILTASHLAAFFQGFRSLEDIRSQASLTTQQAIGLKHYSDFLERMPREEATEIEQTVQKAAQAFNSGLLCVACGSYRRGKATCGDVDVLITHPDGRSHRGIFSRLLDSLRQEGFLTDDLVSQEENGQQQKYLGVCRLPGPGRRHRRLDIIVVPYSEFACALLYFTGSAHFNRSMRALAKTKGMSLSEHALSTAVVRNTHGCKVGPGRVLPTPTEKDVFRLLGLPYREPAERDW

SEQ ID NO: 10633 - protein, 218 aa, Homo sapiens
MHHQKYLQRFLGGKREKKQKEACSIPGIGKRMAEKIIEILESGHLRKLDHISESVPVLELFSNIWGAGTKTAQMWYQQGFRSLEDIRSQASLTTQQAIGLKHYSDFLERMPREEATEIEQTVQKAAQAFNSGLLCVACGSYRRGKATCGDVDVLITHPDGRSHRGIFSRLLDSLRQEGFLTDDLVSQEENGQQQKYLGVCRLPGPGRRHRRLDIIVVP

SEQ ID NO: 10634 - protein, 298 aa, Homo sapiens
MHHQKYLQRFLGGKREKKQKEACSIPGIGKRMAEKIIEILESGHLRKLDHISESVPVLELFSNIWGAGTKTAQMWYQQGFRSLEDIRSQASLTTQQAIGLKHYSDFLERMPREEATEIEQTVQKAAQAFNSGLLCVACGSYRRGKATCGDVDVLITHPDGRSHRGIFSRLLDSLRQEGFLTDDLVSQEENGQQQKYLGVCRLPGPGRRHRRLDIIVVPYSEFACALLYFTGSAHFNRSMRALAKTKGMSLSEHALSTAVVRNTHGCKVGPGRVLPTPTEKDVFRLLGLPYREPAERDW

SEQ ID NO: 10635 - protein, 300 aa, Homo sapiens
MLMHHQKYLQRFLGGKREKKQKEACSIPGIGKRMAEKIIEILESGHLRKLDHISESVPVLELFSNIWGAGTKTAQMWYQQGFRSLEDIRSQASLTTQQAIGLKHYSDFLERMPREEATEIEQTVQKAAQAFNSGLLCVACGSYRRGKATCGDVDVLITHPDGRSHRGIFSRLLDSLRQEGFLTDDLVSQEENGQQQKYLGVCRLPGPGRRHRRLDIIVVPYSEFACALLYFTGSAHFNRSMRALAKTKGMSLSEHALSTAVVRNTHGCKVGPGRVLPTPTEKDVFRLLGLPYREPAERDW

SEQ ID NO: 10636 - protein, 246 aa, Homo sapiens
MPRSCCSRSGALLLALLLQASMEVRGWCLESSQCQDLTTESNLLECIRACKPDLSAETPMFPGNGDEQPLTENPRKYVMGHFRWDRFGRRNSSSSGSSGAGQKREDVSAGEDCGPLPEGGPEPRSDGAKPGPREGKRSYSMEHFRWGKPVGKKRRPVKVYPNGAEDESAEAFPLEFKRELTGQRLREGDGPDGPADDGAGAQADLEHSLLVAAEKKDEGPYRMEHFRWGSPPKDKRYGGFMTSEKS

SEQ ID NO: 10637 - protein, 267 aa, Homo sapiens
MPRSCCSRSGALLLALLLQASMEVRGWCLESSQCQDLTTESNLLECIRACKPDLSAETPMFPGNGDEQPLTENPRKYVMGHFRWDRFGRRNSSSSGSSGAGQKREDVSAGEDCGPLPEGGPEPRSDGAKPGPREGKRSYSMEHFRWGKPVGKKRRPVKVYPNGAEDESAEAFPLEFKRELTGQRLREGDGPDGPADDGAGAQADLEHSLLVAAEKKDEGPYRMEHFRWGSPPKDKRYGGFMTSEKSQTPLVTLFKNAIIKNAYKKGE

SEQ ID NO: 10638 - protein, 267 aa, Homo sapiens; identical to SEQ ID NO: 10637

SEQ ID NO: 10639 - protein, 267 aa, Homo sapiens; identical to SEQ ID NO: 10637

SEQ ID NO: 10640 - protein, 267 aa, Homo sapiens; identical to SEQ ID NO: 10637

SEQ ID NO: 10641 - protein, 580 aa, Homo sapiens
MHLSAVFNALLVSVLAAVLWKHVRLREHAATLEEELALSRQATEPAPALRIDYPKALQILMEGGTHMVCTGRTHTDRICRFKWLCYSNEAEEFIFFHGNTSVMLPNLGSRRFQPALLDLSTVEDHNTQYFNFVELPAAALRFMPKPVFVPDVALIANRFNPDNLMHVFHDDLLPLFYTLRQFPGLAHEARLFFMEGWGEGAHFDLYKLLSPKQPLLRAQLKTLGRLLCFSHAFVGLSKITTWYQYGFVQPQGPKANILVSGNEIRQFARFMTEKLNVSHTGVPLGEEYILVFSRTQNRLILNEAELLLALAQEFQMKTVTVSLEDHTFADVVRLVSNASMLVSMHGAQLVTTLFLPRGATVVELFPYAVNPDHYTPYKTLAMLPGMDLQYVAWRNMMPENTVTHPERPWDQGGITHLDRAEQARILQSREVPRHLCCRNPEWLFRIYQDTKVDIPSLIQTIRRVVKGRPGPRKQKWTVGLYPGKVREARCQASVHGASEARLTVSWQIPWNLKYLKVREVKYEVWLQEQGENTYVPYILALQNHTFTENIKPFTTYLVWVRCIFNKILLGPFADVLVCNT

SEQ ID NO: 10642 - protein, 580 aa, Homo sapiens; identical to SEQ ID NO: 10641

SEQ ID NO: 10643 - protein, 355 aa, Homo sapiens [sequence omitted]

SEQ ID NO: 10644 - protein, 77 aa, Homo sapiens
MAKLIALTLLGMGLALFRNHQSSYQTRLNALREVQPVELPNCNLVKGIETGSEDLEILPNGLAFISSSWKNTSDGPE

SEQ ID NO: 10645 - protein, 375 aa, Homo sapiens
MAPPTELLARPERGSAPGSRAMGRLVAVGLLGIALALLGERLLALRNRLKASREVESVDLPHCHLIKGIEAGSEDIDILPNGLAFFSVGLKFPGLHSFAPDKPGGILMMDLKEEKPRARELRISRGFDLASFNPHGISTFIDNDDTVYLFVVNHPEFKNTVEIFKFEEAENSLLHLKTVKHELLPSVNDITAVGPAHFYATNDHYFSDPFLKYLETYLNLHWANVVYYSPNEVKVVAEGFDSANGINISPDDKYIYVADILAHEIHVLEKHTNMNLTQLKVLELDTLVDNLSIDPSSGDIWVGCHPNGQKLFVYDPNNPPSSEVLRIQNILSEKPTVTTVYANNGSVLQGSSVASVYDGKLLIGTLYHRALYCEL

SEQ ID NO: 10646 - protein, 354 aa, Homo sapiens
MGRLVAVGLLGIALALLGERLLALRNRLKASREVESVDLPHCHLIKGIEAGSEDIDILPNGLAFFSVGLKFPGLHSFAPDKPGGILMMDLKEEKPRARELRISRGFDLASFNPHGISTFIDNDDTVYLFVVNHPEFKNTVEIFKFEEAENSLLHLKTVKHELLPSVNDITAVGPAHFYATNDHYFSDPFLKYLETYLNLHWANVVYYSPNEVKVVAEGFDSANGINISPDDKYIYVADILAHEIHVLEKHTNMNLTQLKVLELDTLVDNLSIDPSSGDIWVGCHPNGQKLFVYDPNNPPSSEVLRIQNILSEKPTVTTVYANNGSVLQGSSVASVYDGKLLIGTLYHRALYCEL

SEQ ID NO: 10647 - protein, 354 aa, Homo sapiens; identical to SEQ ID NO: 10646

SEQ ID NO: 10648 - protein, 219 aa, Homo sapiens
MGRLVAVGLLGIALALLGERLLALRNRLKASREVESVDLPHCHLIKGIEAGSEDIDILPNGLAFFSVGLKFPGLHSFAPDKPGGILMMDLKEEKPRARELRISRGFDLASFNPHGISTFIDNDDTVYLFVVNHPEFKNTVEIFKFEEAENSLLHLKTVKHELLPSVNDITAVGPAHFYATNDHYFSDPFLKYLETYLNLHWANVVYYSPNEVKVVYLCC

SEQ ID NO: 10649 - protein, 342 aa, Homo sapiens
MGRLVAVGLLGIALALLGERLLALRNRLKASREVESVDLPHCHLIKGIEAGSEDIDILPNGLAFFSVGLKFPGLHSFAPDKPGGILMMDLKEEKPRARELRISRGFDLASFNPHGISTFIDNEFKNTVEIFKFEEAENSLLHLKTVKHELLPSVNDITAVGPAHFYATNDHYFSDPFLKYLETYLNLHWANVVYYSPNEVKVVAEGFDSANGINISPDDKYIYVADILAHEIHVLEKHTNMNLTQLKVLELDTLVDNLSIDPSSGDIWVGCHPNGQKLFVYDPNNPPSSEVLRIQNILSEKPTVTTVYANNGSVLQGSSVASVYDGKLLIGTLYHRALYCEL

SEQ ID NO: 10650 - protein, 84 aa, Homo sapiens
MGRLVAVGLLGIALALLGERLLALRNRLKASREVESVDLPHCHLIKGIEAGSEDIDILPNGLAFFSVVSVFFLPQIQQRRYKGI

SEQ ID NO: 10651 - protein, 84 aa, Homo sapiens; identical to SEQ ID NO: 10650

SEQ ID NO: 10652 - protein, 50 aa, Homo sapiens
MGRLVAVGLLGIALALLGERLLALRNRLKASREVESVDLPHCHLIKGIVW

SEQ ID NO: 10653 - protein, 32 aa, Homo sapiens
MMDLKEEKPRARELRISRGFDLASFNPHGIST

SEQ ID NO: 10654 - protein, 53 aa, Homo sapiens
MMDLKEEKPRARELRISRGFDLASFNPHGISTFIDNDDTVYLFVVNHPEFKNT

SEQ ID NO: 10655 - protein, 69 aa, Homo sapiens
MMDLKEEKPRARELRISRGFDLASFNPHGISTFIDNDDTVYLFVVNHPEFKNTVEIFKFEEAENSLLHL

SEQ ID NO: 10656 - protein, 113 aa, Homo sapiens
MMDLKEEKPRARELRISRGFDLASFNPHGISTFIDNDDTVYLFVVNHPEFKNTVEIFKFEEAENSLLHLKTVKHELLPSVNDITAVGPAHFYATNDHYFSDPFLKYLETYLNL

SEQ ID NO: 10657 - protein, 122 aa, Homo sapiens
  SITE 1: note = misc_feature - Xaa can be any naturally occurring amino acid
XENSLLHLKTVKHELLPSVNDITAVGPAHFYATNDHYFSDPFLKYLETYLNLHWANVVYYSPNEVKVVAEGFDSANGINISPDDKYIYVADILAHEIHVLEKHTNMNLTQLKILTISHLEGT

SEQ ID NO: 10658 - protein, 245 aa, Homo sapiens
MGKLVALVLLGVGLSLVGEMFLAFRERVNASREVEPVEPENCHLIEELESGSEDIDILPSGLAFISSGLKYPGMPNFAPDEPGKIFLMDLNEQNPRAQALEISGGFDKELFNPHGISIFIDKDNTVYLYVVNHPHMKSTVEIFKFEEQQRSLVYLKTIKHELLKSVNDIVVLGPEQFYATRDHYFTNSLLSFFEMILDLRWTYVLFYSPREVKVVAKGFCSANGITVSADQKYFASRMFCLRSPG

SEQ ID NO: 10659 - protein, 354 aa, Homo sapiens
MGKLVALVLLGVGLSLVGEMFLAFRERVNASREVEPVEPENCHLIEELESGSEDIDILPSGLAFISSGLKYPGMPNFAPDEPGKIFLMDLNEQNPRAQALEISGGFDKELFNPHGISIFIDKDNTVYLYVVNHPHMKSTVEIFKFEEQQRSLVYLKTIKHELLKSVNDIVVLGPEQFYATRDHYFTNSLLSFFEMILDLRWTYVLFYSPREVKVVAKGFCSANGITVSADQKYVYVADVAAKNIHIMEKHDNWDLTQLKVIQLGTLVDNLTVDPATGDILAGCHPNPMKLLNYNPEDPPGSEVLRIQNVLSEKPRVSTVYANNGSVLQGTSVASVYHGKILIGTVFHKTLYCEL

SEQ ID NO: 10660 - protein, 270 aa, Homo sapiens
MGKLVALVLLGVGLSLVGEMFLAFRERVNASREVEPVEPENCHLIEELESGSEDIDILPSGLAFISSGLKYPGMPNFAPDEPGKIFLMDLNEQNPRAQALEISGGFDKELFNPHGISIFIDKDNTVYLYVVNHPHMKSTVEIFKFEEQQRSLVYLKTIKHELLKSVNDIVVLGPEQFYATRDHYFTNSLLSFFEMILDLRWTYVLFYSPREVKVVAKGFCSANGITVSADQKYVYVADVAAKNIHIMEKHDNWDLTQLKETFWQDAILIL

SEQ ID NO: 10661 - protein, 61 aa, Homo sapiens
MGKLVALVLLGVGLSLVGEMFLAFRERVNASREVEPVEPENCHLIEELGIKISRHAKLCAR

SEQ ID NO: 10662 - protein, 46 aa, Homo sapiens
MGKLVALVLLGVGLSLVGEMFLAFRVGFYLLQRKGECLSRSGASRT

SEQ ID NO: 10663 - protein, 46 aa, Homo sapiens; identical to SEQ ID NO: 10662

SEQ ID NO: 10664 - protein, 808 aa, Homo sapiens
MIPFLPMFSLLLLLIVNPINANNHYDKILAHSRIRGRDQGPNVCALQQILGTKKKYFSTCKNWYKKSICGQKTTVLYECCPGYMRMEGMKGCPAVLPIDHVYGTLGIVGATTTQRYSDASKLREEIEGKGSFTYFAPSNEAWDNLDSDIRRGLESNVNVELLNALHSHMINKRMLTKDLKNGMIIPSMYNNLGLFINHYPNGVVTVNCARIIHGNQIATNGVVHVIDRVLTQIGTSIQDFIEAEDDLSSFRAAAITSDILEALGRDGHFTLFAPTNEAFEKLPRGVLERIMGDKVASEALMKYHILNTLQCSESIMGGAVFETLEGNTIEIGCDGDSITVNGIKMVNKKDIVTNNGVIHLIDQVLIPDSAKQVIELAGKQQTTFTDLVAQLGLASALRPDGEYTLLAPVNNAFSDDTLSMDQRLLKLILQNHILKVKVGLNELYNGQILETIGGKQLRVFVYRTAVCIENSCMEKGSKQGRNGAIHIFREIIKPAEKSLHEKLKQDKRFSTFLSLLEAADLKELLTQPGDWTLFVPTNDAFKGMTSEEKEILIRDKNALQNIILYHLTPGVFIGKGFEPGVTNILKTTQGSKIFLKEVNDTLLVNELKSKESDIMTTNGVIHVVDKLLYPADTPVGNDQLLEILNKLIKYIQIKFVRGSTFKEIPVTVYTTKIITKVVEPKIKVIEGSLQPIIKTEGPTLTKVKIEGEPEFRLIKEGETITEVIHGEPIIKKYTKIIDGVPVEITEKETREERIITGPEIKYTRISTGGGETEETLKKLLQEDTPVRKLQANKKVQGSRRRLREGRSQ

SEQ ID NO: 10665 - protein, 779 aa, Homo sapiens
MIPFLPMFSLLLLLIVNPINANNHYDKILAHSRIRGRDQGPNVCALQQILGTKKKYFSTCKNWYKKSICGQKTTVLYECCPGYMRMEGMKGCPAVLPIDHVYGTLGIVGATTTQRYSDASKLREEIEGKGSFTYFAPSNEAWDNLDSDIRRGLESNVNVELLNALHSHMINKRMLTKDLKNGMIIPSMYNNLGLFINHYPNGVVTVNCARIIHGNQIATNGVVHVIDRVLTQIGTSIQDFIEAEDDLSSFRAAAITSDILEALGRDGHFTLFAPTNEAFEKLPRGVLERIMGDKVASEALMKYHILNTLQCSESIMGGAVFETLEGNTIEIGCDGDSITVNGIKMVNKKDIVTNNGVIHLIDQVLIPDSAKQVIELAGKQQTTFTDLVAQLGLASALRPDGEYTLLAPVNNAFSDDTLSMDQRLLKLILQNHILKVKVGLNELYNGQILETIGGKQLRVFVYRTAVCIENSCMEKGSKQGRNGAIHIFREIIKPAEKSLHEKLKQDKRFSTFLSLLEAADLKELLTQPGDWTLFVPTNDAFKGMTSEEKEILIRDKNALQNIILYHLTPGVFIGKGFEPGVTNILKTTQGSKIFLKEVNDTLLVNELKSKESDIMTTNGVIHVVDKLLYPADTPVGNDQLLEILNKLIKYIQIKFVRGSTFKEIPVTVYKPIIKKYTKIIDGVPVEITEKETREERIITGPEIKYTRISTGGGETEETLKKLLQEEVTKVTKFIEGGDGHLFEDEEIKRLLQGDTPVRKLQANKKVQGSRRRLREGRSQ

SEQ ID NO: 10666 - protein, 809 aa, Homo sapiens
MIPFLPMFSLLLLLIVNPINANNHYDKILAHSRIRGRDQGPNVCALQQILGTKKKYFSTCKNWYKKSICGQKTTVLYECCPGYMRMEGMKGCPAVLPIDHVYGTLGIVGATTTQRYSDASKLREEIEGKGSFTYFAPSNEAWDNLDSDIRRGLESNVNVELLNALHSHMINKRMLTKDLKNGMIIPSMYNNLGLFINHYPNGVVTVNCARIIHGNQIATNGVVHVIDRVLTQIGTSIQDFIEAEDDLSSFRAAAITSDILEALGRDGHFTLFAPTNEAFEKLPRGVLERIMGDKVASEALMKYHILNTLQCSESIMGGAVFETLEGNTIEIGCDGDSITVNGIKMVNKKDIVTNNGVIHLIDQVLIPDSAKQVIELAGKQQTTFTDLVAQLGLASALRPDGEYTLLAPVNNAFSDDTLSMDQRLLKLILQNHILKVKVGLNELYNGQILETIGGKQLRVFVYRTAVCIENSCMEKGSKQGRNGAIHIFREIIKPAEKSLHEKLKQDKRFSTFLSLLEAADLKELLTQPGDWTLFVPTNDAFKGMTSEEKEILIRDKNALQNIILYHLTPGVFIGKGFEPGVTNILKTTQGSKIFLKEVNDTLLVNELKSKESDIMTTNGVIHVVDKLLYPADTPVGNDQLLEILNKLIKYIQIKFVRGSTFKEIPVTVYRPTLTKVKIEGEPEFRLIKEGETITEVIHGEPIIKKYTKIIDGVPVEITEKETREERIITGPEIKYTRISTGGGETEETLKKLLQEEVTKVTKFIEGGDGHLFEDEEIKRLLQGDTPVRKLQANKKVQGSRRRLREGRSQ

SEQ ID NO: 10667 - protein, 836 aa, Homo sapiens
MIPFLPMFSLLLLLIVNPINANNHYDKILAHSRIRGRDQGPNVCALQQILGTKKKYFSTCKNWYKKSICGQKTTVLYECCPGYMRMEGMKGCPAVLPIDHVYGTLGIVGATTTQRYSDASKLREEIEGKGSFTYFAPSNEAWDNLDSDIRRGLESNVNVELLNALHSHMINKRMLTKDLKNGMIIPSMYNNLGLFINHYPNGVVTVNCARIIHGNQIATNGVVHVIDRVLTQIGTSIQDFIEAEDDLSSFRAAAITSDILEALGRDGHFTLFAPTNEAFEKLPRGVLERIMGDKVASEALMKYHILNTLQCSESIMGGAVFETLEGNTIEIGCDGDSITVNGIKMVNKKDIVTNNGVIHLIDQVLIPDSAKQVIELAGKQQTTFTDLVAQLGLASALRPDGEYTLLAPVNNAFSDDTLSMDQRLLKLILQNHILKVKVGLNELYNGQILETIGGKQLRVFVYRTAVCIENSCMEKGSKQGRNGAIHIFREIIKPAEKSLHEKLKQDKRFSTFLSLLEAADLKELLTQPGDWTLFVPTNDAFKGMTSEEKEILIRDKNALQNIILYHLTPGVFIGKGFEPGVTNILKTTQGSKIFLKEVNDTLLVNELKSKESDIMTTNGVIHVVDKLLYPADTPVGNDQLLEILNKLIKYIQIKFVRGSTFKEIPVTVYTTKIITKVVEPKIKVIEGSLQPIIKTEGPTLTKVKIEGEPEFRLIKEGETITEVIHGEPIIKKYTKIIDGVPVEITEKETREERIITGPEIKYTRISTGGGETEETLKKLLQEEVTKVTKFIEGGDGHLFEDEEIKRLLQGDTPVRKLQANKKVQGSRRRLREGRSQ

SEQ ID NO: 10668 - protein, 781 aa, Homo sapiens
MIPFLPMFSLLLLLIVNPINANNHYDKILAHSRIRGRDQGPNVCALQQILGTKKKYFSTCKNWYKKSICGQKTTVLYECCPGYMRMEGMKGCPAVLPIDHVYGTLGIVGATTTQRYSDASKLREEIEGKGSFTYFAPSNEAWDNLDSDIRRGLESNVNVELLNALHSHMINKRMLTKDLKNGMIIPSMYNNLGLFINHYPNGVVTVNCARIIHGNQIATNGVVHVIDRVLTQIGTSIQDFIEAEDDLSSFRAAAITSDILEALGRDGHFTLFAPTNEAFEKLPRGVLERIMGDKVASEALMKYHILNTLQCSESIMGGAVFETLEGNTIEIGCDGDSITVNGIKMVNKKDIVTNNGVIHLIDQVLIPDSAKQVIELAGKQQTTFTDLVAQLGLASALRPDGEYTLLAPVNNAFSDDTLSMDQRLLKLILQNHILKVKVGLNELYNGQILETIGGKQLRVFVYRTAVCIENSCMEKGSKQGRNGAIHIFREIIKPAEKSLHEKLKQDKRFSTFLSLLEAADLKELLTQPGDWTLFVPTNDAFKGMTSEEKEILIRDKNALQNIILYHLTPGVFIGKGFEPGVTNILKTTQGSKIFLKEVNDTLLVNELKSKESDIMTTNGVIHVVDKLLYPADTPVGNDQLLEILNKLIKYIQIKFVRGSTFKEIPVTVYRPTLTKVKIEGEPEFRLIKEGETITEVIHGEPIIKKYTKIIDGVPVEITEKETREERIITGPEIKYTRISTGGGETEETLKKLLQEDTPVRKLQANKKVQGSRRRLREGRSQ

SEQ ID NO: 10669 - protein, 749 aa, Homo sapiens
MIPFLPMFSLLLLLIVNPINANNHYDKILAHSRIRGRDQGPNVCALQQILGTKKKYFSTCKNWYKKSICGQKTTVLYECCPGYMRMEGMKGCPAVLPIDHVYGTLGIVGATTTQRYSDASKLREEIEGKGSFTYFAPSNEAWDNLDSDIRRGLESNVNVELLNALHSHMINKRMLTKDLKNGMIIPSMYNNLGLFINHYPNGVVTVNCARIIHGNQIATNGVVHVIDRVLTQIGTSIQDFIEAEDDLSSFRAAAITSDILEALGRDGHFTLFAPTNEAFEKLPRGVLERIMGDKVASEALMKYHILNTLQCSESIMGGAVFETLEGNTIEIGCDGDSITVNGIKMVNKKDIVTNNGVIHLIDQVLIPDSAKQVIELAGKQQTTFTDLVAQLGLASALRPDGEYTLLAPVNNAFSDDTLSMDQRLLKLILQNHILKVKVGLNELYNGQILETIGGKQLRVFVYRTAVCIENSCMEKGSKQGRNGAIHIFREIIKPAEKSLHEKLKQDKRFSTFLSLLEAADLKELLTQPGDWTLFVPTNDAFKGMTSEEKEILIRDKNALQNIILYHLTPGVFIGKGFEPGVTNILKTTQGSKIFLKEVNDTLLVNELKSKESDIMTTNGVIHVVDKLLYPADTPVGNDQLLEILNKLIKYIQIKFVRGSTFKEIPVTVYSPEIKYTRISTGGGETEETLKKLLQEEVTKVTKFIEGGDGHLFEDEEIKRLLQGDTPVRKLQANKKVQGSRRRLREGRSQ

SEQ ID NO: 10670 - protein, 128 aa, Homo sapiens
MSLRLDTTPSCNSARPLHALQVLLLLSLLLTALASSTKGQTKRNLAKGKEESLDSDLYAELRCMCIKTTSGIHPKNIQSLEVIGKGTHCNQVEVIATLKDGRKICLDPDAPRIKKIVQKKLAGDESAD

SEQ ID NO: 10671 - protein, 216 aa, Homo sapiens
MLRLSERNMKVLLAAALIAGSVFFLLLPGPSAADEKKKGPKVTVKVYFDLRIGDEDVGRVIFGLFGKTVPKTVDNFVALATGEKGFGYKNSKFHRVIKDFMIQGGDFTRGDGTGGKSIYGERFPDENFKLKHYGPGWVSMANAGKDTNGSQFFITTVKTAWLDGKHVVFGKVLEGMEVVRKVESTKTDSRDKPLKDVIIADCGKIEVEKPFAIAKE

SEQ ID NO: 10672 - protein, 212 aa, Homo sapiens
MGPGPRLLLPLVLCVGLGALVFSSGAEGFRKRGPSVTAKVFFDVRIGDKDVGRIVIGLFGKVVPKTVENFVALATGEKGYGYKGSKFHRVIKDFMIQGGDITTGDGTGGVSIYGETFPDENFKLKHYGIGWVSMANAGPDTNGSQFFITLTKPTWLDGKHVVFGKVIDGMTVVHSIELQATDGHDRPLTNCSIINSGKIDVKTPFVVEIADW

SEQ ID NO: 10673 - protein, 140 aa, Homo sapiens
MGRTVVVLGGGISGLAASYHLSRAPCPPKVMLGGSWLQTLEASGCVLSQELFQQRAQEAAATQLGLKEMPSHCLVHLHKNCIPQYTLGHWQKLESARQFLTAHRLPLTLAGASYEGVAVNDCIESGRQAAVSVLGTEPNS

SEQ ID NO: 10674 - protein, 156 aa, Homo sapiens
MGRTVVVLGGGISGLAASYHLSRAPCPPKVMLGGSWLQTLEASGCVLSQELFQQRAQEAAATQLGLKEMPSHCLVHLHKTKNQLKWRQSHDRTVEWPKEYPGRSRKQAPSILHVPGCQLLRCRDRDHLGAVSEQPRSSAESRVGVASSTFSTFPLF

SEQ ID NO: 10675 - protein, 78 aa, Homo sapiens
MGRTVVVLGGGISGLAASYHLSRAPCPPKVVLVESSERLGGWIRSVRGPNGAIFELGPRGIRPAGALGARTLLLFLLF

SEQ ID NO: 10676 - protein, 185 aa, Homo sapiens
MGRTVVVLGGGISGLAASYHLSRAPCPPKVVLVESSERLGGWIRSVRGPNGAIFELGPRGIRPAGALGARTLLLVMLGGSWLQTLEASGCVLSQELFQQRAQEAAATQLGLKEMPSHCLVHLHKNCIPQYTLGHWQKLESARQFLTAHRLPLTLAGASYEGVAVNDCIESGRQAAVSVLGTEPNS

SEQ ID NO: 10677 - protein, 188 aa, Homo sapiens
MGRTVVVLGGGISGLAASYHLSRAPCPPKVVLVESSERLGGWIRSVRGPNGAIFELGPRGIRPAGALGARTLLLVMLGGSWLQTLEASGCVLSQELFQQRAQEAAATQLGLKEMPSHCLVHLHKTKNQLKWRQSHDRTVEWPKEYPGRSRKQAPSILHVPGCQLLRCRDRDHLGAVSEQPRSSAESRV

SEQ ID NO: 10678 - protein, 184 aa, Homo sapiens
MGRTVVVLGGGISGLAASYHLSRAPCPPKVVLVESSERLGGWIRSVRGPNGAIFELGPRGIRPAGALGARTLLLVSELGLDSEVLPVRGDHPAAQNRFLYVGGALHALPTGLRGLLRPSPPFSKPLFWAGLRELTKPRGKEPDETVHSFAQRRLGPEGGPHSQTQHSFARPWLSAGASGHFVEV

SEQ ID NO: 10679 - protein, 477 aa, Homo sapiens
MGRTVVVLGGGISGLAASYHLSRAPCPPKVVLVESSERLGGWIRSVRGPNGAIFELGPRGIRPAGALGARTLLLVSELGLDSEVLPVRGDHPAAQNRFLYVGGALHALPTGLRGLLRPSPPFSKPLFWAGLRELTKPRGKEPDETVHSFAQRRLGPEVASLAMDSLCRGVFAGNSRELSIRSCFPSLFQAEQTHRSILLGLLLGAGRTPQPDSALIRQALAERWSQWSLRGGLEMLPQALETHLTSRGVSVLRGQPVCGLSLQAEGRWKVSLRDSSLEADHVISAIPASVLSELLPAEAAPLARALSAITAVSVAVVNLQYQGAHLPVQGFGHLVPSSEDPGVLGIVYDSVAFPEQDGSPPGLRVTVMLGGSWLQTLEASGCVLSQELFQQRAQEAAATQLGLKEMPSHCLVHLHKNCIPQYTLGHWQKLESARQFLTAHRLPLTLAGASYEGVAVNDCIESGRQAAVSVLGTEPNS

SEQ ID NO: 10680 - protein, 477 aa, Homo sapiens; identical to SEQ ID NO: 10679

SEQ ID NO: 10681 - protein, 113 aa, Homo sapiens
MGRTVVVLGGGISGLAASYHLSRAPCPPKVVLVESSERLGGWIRSVRGPNGAIFELGPRGIRPAGALGARTLLLVSLRDSSLEADHVISAIPASGIWTFGAIFRRSRSPGNRV

SEQ ID NO: 10682 - protein, 161 aa, Homo sapiens
  SITE 1: note = misc_feature - Xaa can be any naturally occurring amino acid
XADHVISAIPASVLSELLPAEAAPLARALSAITAVSVAVVNLQYQGAHLPVQGFGHLVPSSEDPGVLGIVYDSVAFPEQDGSPPGLRVTVMLGGSWLQTLEASGCVLSQELFQQRAQEAAATQLGLKEMPSHCLVHLHKNCIPQYTLGHWQKLGKLGKQLG

SEQ ID NO: 10683 - protein, 230 aa, Homo sapiens
  SITE 1: note = misc_feature - Xaa can be any naturally occurring amino acid
XQAEQTHRSILLGLLLGAGRTPQPDSALIRQALAERWSQWSLRGGLEMLPQALETHLTSRGVSVLRGQPVCGLSLQAEGRWKGFGHLVPSSEDPGVLGIVYDSVAFPEQDGSPPGLRVTVMLGGSWLQTLEASGCVLSQELFQQRAQEAAATQLGLKEMPSHCLVHLHKNCIPQYTLGHWQKLESARQFLTAHRLPLTLAGASYEGVAVNDCIESGRQAAVSVLGTEPNS

SEQ ID NO: 10684 - protein, 180 aa, Homo sapiens [sequence omitted]

SEQ ID NO: 10685 - protein, 169 aa, Homo sapiens
MRQRADRRSMVSTSGAATASSAAGPSRGAAHSPSSAPHASRHRPPFSSRATGLLQQRQHCVHHCTQLCPRVQTPCLPPPPAPATELHSYLQQGGERGLLDTTPVQGSRPGKNVQLTENEIRGLCLKSREIFLSQPILLELEAPLKICGDIHGQYYDLLRLFEYGGFPPE

SEQ ID NO: 10686 - protein, 286 aa, Homo sapiens
MSDSEKLNLDSIIGRLLEGDIHGQYYDLLRLFEYGGFPPESNYLFLGDYVDRGKQSLETICLLLAYKIKYPENFFLLRGNHECASINRIYGFYDECKRRYNIKLWKTFTDCFNCLPIAAIVDEKIFCCHGGLSPDLQSMEQIRRIMRPTDVPDQGLLCDLLWSDPDKDVQGWGENDRGVSFTFGAEVVAKFLHKHDLDLICRAHQVVEDGYEFFAKRQLVTLFSAPNYCGEFDNAGAMMSVDETLMCSFQILKPADKNKGKYGQFSGLNPGGRPITPPRNSAKAKK

SEQ ID NO: 10687 - protein, 341 aa, Homo sapiens
MSDSEKLNLDSIIGRLLEGSRVLTPHCAPVQGSRPGKNVQLTENEIRGLCLKSREIFLSQPILLELEAPLKICGDIHGQYYDLLRLFEYGGFPPESNYLFLGDYVDRGKQSLETICLLLAYKIKYPENFFLLRGNHECASINRIYGFYDECKRRYNIKLWKTFTDCFNCLPIAAIVDEKIFCCHGGLSPDLQSMEQIRRIMRPTDVPDQGLLCDLLWSDPDKDVQGWGENDRGVSFTFGAEVVAKFLHKHDLDLICRAHQVVEDGYEFFAKRQLVTLFSAPNYCGEFDNAGAMMSVDETLMCSFQILKPADKNKGKYGQFSGLNPGGRPITPPRNSAKAKK

SEQ ID NO: 10688 - protein, 330 aa, Homo sapiens
MSDSEKLNLDSIIGRLLEVQGSRPGKNVQLTENEIRGLCLKSREIFLSQPILLELEAPLKICGDIHGQYYDLLRLFEYGGFPPESNYLFLGDYVDRGKQSLETICLLLAYKIKYPENFFLLRGNHECASINRIYGFYDECKRRYNIKLWKTFTDCFNCLPIAAIVDEKIFCCHGGLSPDLQSMEQIRRIMRPTDVPDQGLLCDLLWSDPDKDVQGWGENDRGVSFTFGAEVVAKFLHKHDLDLICRAHQVVEDGYEFFAKRQLVTLFSAPNYCGEFDNAGAMMSVDETLMCSFQILKPADKNKGKYGQFSGLNPGGRPITPPRNSAKAKK

SEQ ID NO: 10689 - protein, 253 aa, Homo sapiens
MSDSEKLNLDSIIGRLLEVQGSRPGKNVQLTENEIRGLCLKSREIFLSQPILLELEAPLKICGDIHGQYYDLLRLFEYGGFPPESNYLFLGDYVDRGKQSLETICLLLAYKIKYPENFFLLRGNHECASINRIYGFYDECLSPDLQSMEQIRRIMRPTDVPDQGLLCDLLWSDPDKDVQGWGENDRGVSFTFGAEVVAKFLHKHDLDLICRAHQVVEDGYEFFAKRQLVTLFSAPNYCGEFDNAGAMMSVDET

SEQ ID NO: 10690 - protein, 87 aa, Homo sapiens
MALKKFVMVKFLNDSIVDPVDSEWFGFYRSGQAKETIPLQETSLYTQDRLGLKEMDNAGQLVFLATEGDHLQLSEEWFYAHIIPFLG

SEQ ID NO: 10691 - protein, 52 aa, Homo sapiens
MASPGCLWLLAVALLPWTCASRALQHLDPPAPLPLVIWHGMASCKPNTGMTP

SEQ ID NO: 10692 - protein, 46 aa, Homo sapiens
MASPGCLWLLAVALLPWTCASRALQHLDPPAPLPLVIWHGMAVAIP

SEQ ID NO: 10693 - protein, 46 aa, Homo sapiens; identical to SEQ ID NO: 10692

SEQ ID NO: 10694 - protein, 305 aa, Homo sapiens
MASPGCLWLLAVALLPWTCASRALQHLDPPAPLPLVIWHGMDSCCNPLSMGAIKKMVEKKIPGIYVLSLEIGKTLMEDVENSFFLNVNSQVTTVCQALAKDPKLQQGYNAMGFSQGGQFLRAVAQRCPSPPMINLISVGGQHQGVFGLPRCPGESSHICDFIRKTLNAGAYSKVVQERLVQAEYWHDPIKEDVYRNHSIFLADINQERGINESYKKNLMALKKFVMVKFLNDSIVDPVDSEWFGFYRSGQAKETIPLQETSLYTQDRLGLKEMDNAGQLVFLATEGDHLQLSEEWFYAHIIPFLG

SEQ ID NO: 10695 - protein, 282 aa, Homo sapiens
MASPGCLWLLAVALLPWTCASRALQHLDPPAPLPLVIWHGMGDSCCNPLSMGAIKKMVEKKIPGIYVLSLEIGKTLMEDVENSFFLNVNSQVTTVCQALAKDPKLQQGYNAMGFSQGGQFLRAVAQRCPSPPMINLISVGGQHQGVFGLPRCPGESSHICDFIRKTLNAGAYSKVVQERLVQAEYWHDPIKEDVYRNHSIFLADINQERGINESYKKNLMALKKFVMVKFLNDSIVDPVDSEDRLGLKEMDNAGQLVFLATEGDHLQLSEEWFYAHIIPFLG

SEQ ID NO: 10696 - protein, 306 aa, Homo sapiens
MASPGCLWLLAVALLPWTCASRALQHLDPPAPLPLVIWHGMGDSCCNPLSMGAIKKMVEKKIPGIYVLSLEIGKTLMEDVENSFFLNVNSQVTTVCQALAKDPKLQQGYNAMGFSQGGQFLRAVAQRCPSPPMINLISVGGQHQGVFGLPRCPGESSHICDFIRKTLNAGAYSKVVQERLVQAEYWHDPIKEDVYRNHSIFLADINQERGINESYKKNLMALKKFVMVKFLNDSIVDPVDSEWFGFYRSGQAKETIPLQETSLYTQDRLGLKEMDNAGQLVFLATEGDHLQLSEEWFYAHIIPFLG

SEQ ID NO: 10697 - protein, 301 aa, Homo sapiens
MASPGCLWLLAVALLPWTCASRALQHLDPPAPLPLVIWHGMGDSCCNPLSMGAIKKMVEKKIPGIYVLSLEIGKTLMEDVENSFFLNVNSQVTTVCQALAKDPKLQQGYNAMGFSQGGQFLRAVAQRCPSPPMINLISVGGQHQGVFGLPRCPGESSHICDFIRKTLNAGAYSKVVQERLVQAEYWHDPIKEDVYRNHSIFLADINQERGINESYKKNLMALKKFVMVKFLNDSIVDPVDSEWFGFYRSGQAKETIPLQETSLYTQFCSLPRLECNGMISAHCNLRLPGSSEFSCLSLPSS

SEQ ID NO: 10698 - protein, 306 aa, Homo sapiens; identical to SEQ ID NO: 10696

SEQ ID NO: 10699 - protein, 148 aa, Homo sapiens
MASPGCLWLLAVALLPWTCASRALQHLDPPAPLPLVIWHGMGDSCCNPLSMGAIKKMVEKKIPGIYVLSLEIGKTLMEDVENSFFLNVNSQVTTVCQALAKDPKLQQGYNAMGFSQGGQFLRAVAQRCPSPPMINLISVGGQHQVPCA

SEQ ID NO: 10700 - protein, 208 aa, Homo sapiens
MASPGCLWLLAVALLPWTCASRALQHLDPPAPLPLVIWHGMGDSCCNPLSMGAIKKMVEKKIPGIYVLSLEIGKTLMEEGSGSEMPFTSHDQSDLGWGTTSSLVQAEYWHDPIKEDVYRNHSIFLADINQERGINESYKKNLMALKKFVMVKFLNDSIVDPVDSEWFGFYRSGQAKETIPLQETSLYTQDRLGLKEMDNAGQLVFLAT

SEQ ID NO: 10701 - protein, 55 aa, Homo sapiens
MASPGCLWLLAVALLPWTCASRALQHLDPPAPLPLVIWHGMGERQLLQSLKHGCY

SEQ ID NO: 10702 - protein, 335 aa, Homo sapiens
MASPGCLWLLAVALLPWTCASRALQHLDPPAPLPLVIWHGMGSRYVAQTGLELLASSNPPASSYQSAGMIGDSCCNPLSMGAIKKMVEKKIPGIYVLSLEIGKTLMEDVENSFFLNVNSQVTTVCQALAKDPKLQQGYNAMGFSQGGQFLRAVAQRCPSPPMINLISVGGQHQGVFGLPRCPGESSHICDFIRKTLNAGAYSKVVQERLVQAEYWHDPIKEDVYRNHSIFLADINQERGINESYKKNLMALKKFVMVKFLNDSIVDPVDSEWFGFYRSGQAKETIPLQETSLYTQDRLGLKEMDNAGQLVFLATEGDHLQLSEEWFYAHIIPFLG

SEQ ID NO: 10703 - protein, 203 aa, Homo sapiens
MASPGCLWLLAVALLPWTCASRALQHLDPPAPLPLVIWHGMGVFGLPRCPGESSHICDFIRKTLNAGAYSKVVQERLVQAEYWHDPIKEDVYRNHSIFLADINQERGINESYKKNLMALKKFVMVKFLNDSIVDPVDSEWFGFYRSGQAKETIPLQETSLYTQDRLGLKEMDNAGQLVFLATEGDHLQLSEEWFYAHIIPFLG

SEQ ID NO: 10704 - protein, 35 aa, Homo sapiens
  SITE 1: note = misc_feature - Xaa can be any naturally occurring amino acid
XLAVALLPWTCASRALQHLDPPAPLPLVIWHGMGE

SEQ ID NO: 10705 - protein, 323 aa, Homo sapiens
  SITE 1: note = misc_feature - Xaa can be any naturally occurring amino acid
XLLAVALLPWTCASRALQHLDPPAPLPLVIWHGMGDSCCNPLSMGAIKKMVEKKIPGIYVLSLEIGKTLMEDVENSFFLNVNSQVTTVCQALAKDPKLQQGYNAMGFSQGGQFLRAVAQRCPSPPMINLISVGGQHQGVFGLPRCPGESSHICDFIRKTLNAGAYSKVVQERLVQAEYWHDPIKEDVYRNHSIFLADINQERGINESYKKNLMALKKFVMVKFLNDSIVDPVDSEWFGFYRSGQAKETIPLQETSLYTQVTGRESILGGWCFFSSQFLKLLCSLVLEPFPLHLRALGPPGAKGNGQCRTASVSGYRRGPSSVV

SEQ ID NO: 10706 - protein, 78 aa, Homo sapiens
  SITE 1: note = misc_feature - Xaa can be any naturally occurring amino acid
XPPMINLISVGGQHQGVFGLPRCPGESSHICDFIRKTLNAGAYSKVVQERGLDFTEVAKPRKPFPYRRPPCTHRTAWG

SEQ ID NO: 10707 - protein, 308 aa, Homo sapiens
MKSCGSMLGLCGQRLPAAWVLLLLPFLPLLLLAAPAPHRASYKPVIVVHGLFDSSYSFRHLLEYINETHPGTVVTVLDLFDGRESLRPLWEQVQGFREAVVPIMAKAPQGVHLICYSQGGLVCRALLSVMDDHNVDSFISLSSPQMGQYGDTDYLKWLFPTSMRSNLYRICYSPWGQEFSICNYWHDPHHDDLYLNASSFLALINGERDHPNATVWRKNFLRVGHLVLIGGPDDGVITPWQSSFFGFYDANETVLEMEEQLVYLRDSFGLKTLLARGAIVRCPMAGISHTAWHSNRTLYETCIEPWLS

SEQ ID NO: 10708 - protein, 97 aa, Homo sapiens
MLGLCGQRLPAAWVLLLLPFLPLLLLAAPAPHRASYKPVIVVHGLFDSSYSFRHLLEYINEGALCAGLCFLSWMITTWILSSPSPLHRWDSMETRTT

SEQ ID NO: 10709 - protein, 158 aa, Homo sapiens
MLGLCGQRLPAAWVLLLLPFLPLLLLAAPAPHRASYKPVIVVHGLFDSSYSFRHLLEYINEMGQYGDTDYLKWLFPTSMRSNLYRICYSPWGQEFSICNYWHDPHHDDLYLNASSFLALINGERDHPNATVWRKNFLRVGHLVLIGGPDDGVITPWQS

SEQ ID NO: 10710 - protein, 180 aa, Homo sapiens
MLGLCGQRLPAAWVLLLLPFLPLLLLAAPAPHRASYKPVIVVHGLFDSSYSFRHLLEYINETHPGTVVTVLDLFDGRESLRPLWEQVQGFREAVVPIMAKAPQGVHLICYSQGGLVCRALLSVMDDHNVDSFISLSSPQMGQYGDTDYLKWLFPTSMRSNLYRICYSPWGQEFSICNYWH

SEQ ID NO: 10711 - protein, 302 aa, Homo sapiens
MLGLCGQRLPAAWVLLLLPFLPLLLLAAPAPHRASYKPVIVVHGLFDSSYSFRHLLEYINETHPGTVVTVLDLFDGRESLRPLWEQVQGFREAVVPIMAKAPQGVHLICYSQGGLVCRALLSVMDDHNVDSFISLSSPQMGQYGDTDYLKWLFPTSMRSNLYRICYSPWGQEFSICNYWHDPHHDDLYLNASSFLALINGERDHPNATVWRKNFLRVGHLVLIGGPDDGVITPWQSSFFGFYDANETVLEMEEQLVYLRDSFGLKTLLARGAIVRCPMAGISHTAWHSNRTLYETCIEPWLS

SEQ ID NO: 10712 - protein, 302 aa, Homo sapiens; identical to SEQ ID NO: 10711

SEQ ID NO: 10713 - protein, 302 aa, Homo sapiens; identical to SEQ ID NO: 10711

SEQ ID NO: 10714 - protein, 302 aa, Homo sapiens; identical to SEQ ID NO: 10711

SEQ ID NO: 10715 - protein, 79 aa, Homo sapiens
MAAARLCLSLLLLSTCVALLLQPLLGAQGAPLEPVYPGDNATPEQMAQYAADLRRYINMLTRPRPRPMCPGQDGAYRQI

SEQ ID NO: 10716 - protein, 95 aa, Homo sapiens
MAAARLCLSLLLLSTCVALLLQPLLGAQGAPLEPVYPGDNATPEQMAQYAADLRRYINMLTRPRYGKRHKEDTLAFSEWGSPHAAVPRELSPLDL

SEQ ID NO: 10717 - protein, 95 aa, Homo sapiens; identical to SEQ ID NO: 10716

SEQ ID NO: 10718 - protein, 105 aa, Homo sapiens
MAAARLCLSLLLLSTCVALLLQPLLGAQGAPLEPVYPGDNATPEQMAQYAADLRRYINMLTRPSACPCCLFPPRYGKRHKEDTLAFSEWGSPHAAVPRELSPLDL

SEQ ID NO: 10719 - protein, 132 aa, Homo sapiens
  SITE 1: note = misc_feature - Xaa can be any naturally occurring amino acid
XQYAADLRRYINMLTRPRCVPQLGREIPAPGTLGPLHIPGHTLSPAPAPAPSRPALGKTGHLCSTGLDQCALGKMVPTGRYETGGLAPGHSACPCCLFPPRYGKRHKEDTLAFSEWGSPHAAVPRELSPLDL

SEQ ID NO: 10720 - protein, 90 aa, Homo sapiens
MDRRRMALRPGSRRPTAFFFHSRWLVPNLLAFFLGLSGAGPIHLPMPWPNGRRHRVLDPHTQLSTHEAPGRWKPVAPRTMKACPQVLLEW

SEQ ID NO: 10721 - protein, 140 aa, Homo sapiens
MEPQVRALRCGCWNRDSKRASGGSIQVNPKKSVCGGVHTTNYYGEEDKEDMDRRRMALRPGSRRPTAFFFHSRWLVPNLLAFFLGLSGAGPIHLPMPWPNGRRHRVLDPHTQLSTHEAPGRWKPVAPRTMKACPQVLLEW

SEQ ID NO: 10722 - protein, 188 aa, Homo sapiens
MVPGAAGWCCLVLWLPACVAAHGFRIHDYLYFQVLSPGDIRYIFTATPAKDFGGIFHTRYEQIHLVPAEPPEACGELSNGFFIQDQIALVERGGCSFLSKTRVVQEHGGRAVIISDNAVDNDSFYVEMIQDSTQRTADIPALFLLGRDGYMIRRSLEQHGLPWAIISIPVNVTSIPTFELLQPPWTFW

SEQ ID NO: 10723 - protein, 151 aa, Homo sapiens
MRRLLLVTSLVVVLLWEAGAVPAPKVPIKMQVKHWPSEQDPEKAWGARVVEPPEKDDQLVVLFPVQKPKLLTTEEKPRGQGRGPILPGTKAWMETEDTLGHVLSPEPDHDSLYHPPPEEDQGEERPRLWVMPNHQVLLGPEEDQDHIYHPQ

SEQ ID NO: 10724 - protein, 142 aa, Homo sapiens
MRRLLLVTSLVVVLLWEAGAVPAPKVPIKMQVKHWPSEQDPEKAWGARVVEPPEKDDQLVVLFPVQKPKLLTTEEKPRGTKAWMETEDTLGHVLSPEPDHDSLYHPPPEEDQGEERPRLWVMPNHQVLLGPEEDQDHIYHPQ

SEQ ID NO: 10725 - protein, 178 aa, Homo sapiens
MLLILLSVALLALSSAQNLNEDVSQEESPSLIAGNPQGPSPQGGNKPQGPPPPPGKPQGPPPQGGNKPQGPPPPGKPQGPPPQGDKSRSPRSPPGKPQGPPPQGGKPQGPPAQGGSKSQSARSPPGKPQGPPQQEGNNPQGPPPPAGGNPQQPQAPPAGQPQGPPRPPQGGRPSRPPQ

SEQ ID NO: 10726 - protein, 198 aa, Homo sapiens
MLLILLSVALLALSSAQNLNEDVSQEESPSLIAGNPQGPSPQGGNKPQGPPPPPGKPQGPPPQGGNKPQGPPPPGKPQGPPPQGDKSRSPRSPPGKPQGPPPQGGKPQGPPPQGGNKPQGPPPPGKPQGPPAQGGSKSQSARSPPGKPQGPPQQEGNNPQGPPPPAGGNPQQPQAPPAGQPQGPPRPPQGGRPSRPPQ

SEQ ID NO: 10727 - protein, 151 aa, Homo sapiens
MLLILLSVALLALSSAQNLNEDVSQEESPSLIAGNPQGPSPQGGNKPQGPPPPPGKPQGPPPQGGNKPQGPPPPGKPQGPPPQGDKSRSPRSPPGKPQGPPPQGGNQPQGPPPPPGKPQGPPPQGGNRPQGPPPPGKPQGPPPQGDKSRSP

SEQ ID NO: 10728 - protein, 330 aa, Homo sapiens
MLLILLSVALLALSSAQNLNEDVSQEESPSLIAGNPQGPSPQGGNKPQGPPPPPGKPQGPPPQGGNKPQGPPPPGKPQGPPPQGDKSRSPRSPPGKPQGPPPQGGNQPQGPPPPPGKPQGPPPQGGNRPQGPPPPGKPQGPPPQGDKSRSPSPPGKPQGPPPQGGNQPQGPPPPPGKPQGPPPQGGKKPQGPPPPGKPQGPPPQGDKSRSSQSPPGKPQGPPPQGGNQPQGPPPPPGKPQGPPPQGGNKPQGPPPPGKPQGPPAQGGSKSQSARSPPGKPQGPPQQEGNNPQGPPPPAGGNPQQPQAPPAGQPQGPPRPPQGGRPSRPPQ

SEQ ID NO: 10729 - protein, 21 aa, Homo sapiens
MLLILLSVALLALSSAQNLNE

SEQ ID NO: 10730 - protein, 416 aa, Homo sapiens
MLLILLSVALLALSSAQNLNEDVSQEESPSLIAGNPQGAPPQGGNKPQGPPSPPGKPQGPPPQGGNQPQGPPPPPGKPQGPPPQGGNKPQGPPPPGKPQGPPPQGDKSRSPRSPPGKPQGPPPQGGNQPQGPPPPPGKPQGPPPQGGNKPQGPPPPGKPQGPPPQGDNKSRSSRSPPGKPQGPPPQGGNQPQGPPPPPGKPQGPPPQGGNKPQGPPPPGKPQGPPPQGDNKSQSARSPPGKPQGPPPQGGNQPQGPPPPPGKPQGPPPQGGNKPQGPPPPGKPQGPPPQGGSKSRSSRSPPGKPQGPPPQGGNQPQGPPPPPGKPQGPPPQGGNKPQGPPPPGKPQGPPPQGGSKSRSARSPPGKPQGPPQQEGNNPQGPPPPAGGNPQQPQAPPAGQPQGPPRPPQGGRPSRPPQ

SEQ ID NO: 10731 - protein, 351 aa, Homo sapiens
MLLILLSVALLALSSAQSLNEDVSQEESPSVISGKPEGRRPQGGNQPQRTPPPPGKPEGRPPQGGNQSQGPPPRPGKPEGPPPQGGNQSQGPPPRPGKPEGQPPQGGNQSQGPPPRPGKPEGPPPQGGNQSQGPPPRPGKPEGPPPQGGNQSQGPPPRPGKPEGPPPQGGNQSQGPPPHPGKPEGPPPQGGNQSQGPPPRPGKPEGPPPQGGNQSQGPPPRPGKPEGPPPQGGNKPQGPPPRPGKPEGPPPQGGNQSQGPPPRPGKPEGPPSQGGNKPQGPPPHPGKPQGPPPQEGNKPQRPPPPGRPQGPPPPGGNPQQPLPPPAGKPQGPPPPPQGGRPHRPPQGQPPQ

SEQ ID NO: 10732 - protein, 309 aa, Homo sapiens
MLLILLSVALLALSSAQSLNEDVSQEESPSVISGKPEGRRPQGGNQPQRTPPPPGKPEGRPPQGGNQSQGPPPRPGKPEGPPPQGGNQSQGPPPRPGKPEGQPPQGGNQSQGPPPRPGKPEGPPPQGGNQSQGPPPRPGKPEGPPPQGGNQSQGPPPRPGKPEGPPPQGGNQSQGPPPHPGKPEGPPPQGGNQSQGPPPRPGKPEGPPPQGGNQSQGPPPRPGKPEGPPSQGGNKPQGPPPHPGKPQGPPPQEGNKPQRPPPPGRPQGPPPPGGNPQQPLPPPAGKPQGPPPPPQGGRPHRPPQGQPPQ

SEQ ID NO: 10733 - protein, 178 aa, Homo sapiens
MLLILLSVALLALSSAESSSEDVSQEESLFLISGKPEGRRPQGGNQPQRPPPPPGKPQGPPPQGGNQSQGPPPPPGKPEGRPPQGGNQSQGPPPHPGKPERPPPQGGNQSQGKPQGPPQQEGNKPQGPPPPGKPQGPPPAGGNPQQPQAPPAGKPQGPPPPPQGGRPPRPAQGQQPPQ

SEQ ID NO: 10734 - protein, 178 aa, Homo sapiens; identical to SEQ ID NO: 10733

SEQ ID NO: 10735 - protein, 247 aa, Homo sapiens
MLLILLSVALLALSSAESSSEDVSQEESLFLISGKPEGRRPQGGNQPQRPPPPPGKPQGPPPQGGNQSQGPPPPPGKPEGRPPQGGNQSQGPPPHPGKPERPPPQGGNQSQGTPPPPGKPERPPPQGGNQSHRPPPPPGKPERPPPQGGNQSQGPPPHPGKPEGPPPQEGNKSRSARSPPGKPQGPPQQEGNKPQGPPPPGKPQGPPPAGGNPQQPQAPPAGKPQGPPPPPQGGRPPRPAQGQQPPQ

SEQ ID NO: 10736 - protein, 247 aa, Homo sapiens; identical to SEQ ID NO: 10735

SEQ ID NO: 10737 - protein, 54 aa, Homo sapiens
MCTTLFLLSTLAMLWRRRFANRVQPEPSDVDGAARGSSLDADPQSSGREKEPLK

SEQ ID NO: 10738 - protein, 54 aa, Homo sapiens; identical to SEQ ID NO: 10737

SEQ ID NO: 10739 - protein, 164 aa, Homo sapiens [sequence omitted]

SEQ ID NO: 10740 - protein, 517 aa, Homo sapiens
MGRRALLLLLLSFLAPWATIALRPALRALGSLHLPTNPTSLPAVAKNYSVLYFQQKALAAGQLHICIIQLNHYKTPLVDHFGFNTVKTFNQRYLVADKYWKKNGGSILFYTGNEGDIIWFCNNTGFMWDVAEELKAMLVFAEHRYYGESLPFGDNSFKDSRHLNFLTSEQALADFAELIKHLKRTIPGAENQPVIAIGGSYGGMLAAWFRMKYPHMVVGALAASAPIWQFEDLVPCGVFMKIVTTDFRKSGPHCSESIHRSWDAINRLSNTGSGLQWLTGALHLCSPLTSQDIQHLKDWISETWVNLAMVDYPYASNFLQPLPAWPIKVVCQYLKNPNVSDSLLLQNIFQALNVYYNYSGQVKCLNISETATSSLGTLGWSYQACTEVVMPFCTNGVDDMFEPHSWNLKELSDDCFQQWGVRPRPSWITTMYGGKNISSHTNIVFSNGELDPWSGGGVTKDITDTLVAVTISEGAHHLDLRTKNALDPMSVLLARSLEVRHMKNWIRDFYDSAGKQH

SEQ ID NO: 10741 - protein, 496 aa, Homo sapiens
MGRRALLLLLLSFLAPWATIALRPALRALGSLHLPTNPTSLPAVAKNYSVLYFQQKVDHFGFNTVKTFNQRYLVADKYWKKNGGSILFYTGNEGDIIWFCNNTGFMWDVAEELKAMLVFAEHRYYGESLPFGDNSFKDSRHLNFLTSEQALADFAELIKHLKRTIPGAENQPVIAIGGSYGGMLAAWFRMKYPHMVVGALAASAPIWQFEDLVPCGVFMKIVTTDFRKSGPHCSESIHRSWDAINRLSNTGSGLQWLTGALHLCSPLTSQDIQHLKDWISETWVNLAMVDYPYASNFLQPLPAWPIKVVCQYLKNPNVSDSLLLQNIFQALNVYYNYSGQVKCLNISETATSSLGTLGWSYQACTEVVMPFCTNGVDDMFEPHSWNLKELSDDCFQQWGVRPRPSWITTMYGGKNISSHTNIVFSNGELDPWSGGGVTKDITDTLVAVTISEGAHHLDLRTKNALDPMSVLLARSLEVRHMKNWIRDFYDSAGKQH

SEQ ID NO: 10742 - protein, 116 aa, Homo sapiens
MKVDHFGFNTVKTFNQRYLVADKYWKKNGGSILFYTGNEGDIIWFCNNTGFMWDVAEELKAMLVFAEHRYYGESLPFGDNSFKDSRHLNFLTSEQALADFAELIKHLKRTIPGAEN

SEQ ID NO: 10743 - protein, 26 aa, Homo sapiens
MWDVAEELKAMLVFAEHRYYGESLPF

SEQ ID NO: 10744 - protein, 43 aa, Homo sapiens
MWDVAEELKAMLVFAEHRYYGESLPFGDNSFKDSRHLNFLTSE

SEQ ID NO: 10745 - protein, 100 aa, Homo sapiens
MWDVAEELKAMLVFAEHRYYGESLPFGDNSFKDSRHLNFLTSEQALADFAELIKHLKRTIPGAENQPVIAIGGSYGGMLAAWFRMKYPHMVVGALAASAP

SEQ ID NO: 10746 - protein, 145 aa, Homo sapiens
MWDVAEELKAMLVFAEHRYYGESLPFGDNSFKDSRHLNFLTSEQALADFAELIKHLKRTIPGAENQPVIAIGGSYGGMLAAWFRMKYPHMVVGALAASAPIWQFEDLVPCGVFMKIVTTDFRKSGPHCSESIHRSWDAINRLSNT

SEQ ID NO: 10747 - protein, 148 aa, Homo sapiens
MWDVAEELKAMLVFAEHRYYGESLPFGDNSFKDSRHLNFLTSEQALADFAELIKHLKRTIPGAENQPVIAIGGSYGGMLAAWFRMKYPHMVVGALAASAPIWQFEDLVPCGVFMKIVTTDFRKSGPHCSESIHRSWDAINRLSNTGSG

SEQ ID NO: 10748 - protein, 183 aa, Homo sapiens
MWDVAEELKAMLVFAEHRYYGESLPFGDNSFKDSRHLNFLTSEQALADFAELIKHLKRTIPGAENQPVIAIGGSYGGMLAAWFRMKYPHMVVGALAASAPIWQFEDLVPCGVFMKIVTTDFRKSGPHCSESIHRSWDAINRLSNTGSGLQWLTGALHLCSPLTSQDIQHLKDWISETWVNLAM

SEQ ID NO: 10749 - protein, 192 aa, Homo sapiens
MWDVAEELKAMLVFAEHRYYGESLPFGDNSFKDSRHLNFLTSEQALADFAELIKHLKRTIPGAENQPVIAIGGSYGGMLAAWFRMKYPHMVVGALAASAPIWQFEDLVPCGVFMKIVTTDFRKSGPHCSESIHRSWDAINRLSNTGSGLQWLTGALHLCSPLTSQDIQHLKDWISETWVNLAMVDYPYASNF

SEQ ID NO: 10750 - protein, 234 aa, Homo sapiens
MWDVAEELKAMLVFAEHRYYGESLPFGDNSFKDSRHLNFLTSEQALADFAELIKHLKRTIPGAENQPVIAIGGSYGGMLAAWFRMKYPHMVVGALAASAPIWQFEDLVPCGVFMKIVTTDFRKSGPHCSESIHRSWDAINRLSNTGSGLQWLTGALHLCSPLTSQDIQHLKDWISETWVNLAMVDYPYASNFLQPLPAWPIKVVCQYLKNPNVSDSLLLQNIFQALNVYYNYSG

SEQ ID NO: 10751 - protein, 367 aa, Homo sapiens
MMGSVLPAEALVLKTGLKAPGLALAEVITSDILHSFLYGRWRNVLGEQLFEDKSHHASPKTAFTAEVLAQSFSGEVQKLSSLVLPAEVIIAQSSIPGEGLGIFSKTWIKAGTEMGPFTGRVIAPEHVDICKNNNLMWEVFNEDGTVRYFIDASQEDHRSWMTYIKCARNEQEQNLEVVQIGTSIFYKAIEMIPPDQELLVWYGNSHNTFLGIPGVPGLEEDQKKNKHEDFHPADSAAGPAGRMRCVICHRGFNSRSNLRSHMRIHTLDKPFVCRFCNRRFSQSSTLRNHVRLHTGERPYKCQVCQSAYSQLAGLRAHQKSARHRPPSTALQAHSPALPAPHAHAPALAAAAAAAAAAAAHHLPAMVL

SEQ ID NO: 10752 - protein, 185 aa, Homo sapiens
MDHRSRLRGTGLNRIPGTQSRAPRVPLPFHVQQEAREGEDWEREPPRQRPPIYEPPESEELPDNVMVSKPAPYWEGTAVIDGEFKELKLTDYRGKYLVFFFYPLDFTFVCPTEIIAFGDRLEEFRSINTEVVACSVDSQFTHLAWINTPRRQGGLGPIRIPLLSDLTHQISKDYGVYLEDSGHTL

SEQ ID NO: 10753 - protein, 271 aa, Homo sapiens
MEALPLLAATTPDHGRHRRLLLLPLLLFLLPAGAVQGWETEERPRTREEECHFYAGGQVYPGEASRVSVADHSLHLSKAKISKPAPYWEGTAVIDGEFKELKLTDYRGKYLVFFFYPLDFTFVCPTEIIAFGDRLEEFRSINTEVVACSVDSQFTHLAWINTPRRQGGLGPIRIPLLSDLTHQISKDYGVYLEDSGHTLRGLFIIDDKGILRQITLNDLPVGRSVDETLRLVQAFQYTDKHGEVCPAGWKPGSETIIPDPAGKLKYFDKLN

SEQ ID NO: 10754 - protein, 186 aa, Homo sapiens
MEALPLLAATTPDHGRHRRLLLLPLLLFLLPAGAVQGWETEERPRTREEECHFYAGGQVYPGEASRVSVADHSLHLSKAKISKPAPYWEGTAVIDGEFKELKLTDYRGKYLVFFFYPLDFTFVCPTEIIAFGDRLEEFRSINTEVVACSVDSQFTHLAWSVSYTYIRRKKRMDLLLKHGQITLDMI

SEQ ID NO: 10755 - protein, 161 aa, Homo sapiens
  SITE 1: note = misc_feature - Xaa can be any naturally occurring amino acid
XCPTEIIAFGDRLEEFRSINTEVVACSVDSQFTHLAWINTPRRQGGLGPIRIPLLSDLTHQISKDYGVYLEDSGHTLRGLFIIDDKGILRQITLNDLPVGRSVDETLRLVQAFQYTDKHGEVCPAGWKPGSETIKPEDTMKAWWPRESYNPRSSWKAEVFR

SEQ ID NO: 10756 - protein, 382 aa, Homo sapiens
MRSPLCWLLPLLILASVAQGQPTRRPRPGTGPGRRPRPRPRPTPSFPQPDEPAEPTDLPPPLPPGPPSIFPDCPRECYCPPDFPSALYCDSRNLRKVPVIPPRIHYLYLQNNFITELPVESFQNATGLRWINLDNNRIRKIDQRVLEKLPGLVFLYMEKNQLEEVPSALPRNLEQLRLSQNHISRIPPGVFSKLENLLLLDLQHNRLSDGVFKPDTFHGLKNLMQLNLAHNILRKMPPRVPTAIHQLYLDSNKIETIPNGYFKSFPNLAFIRLNYNKLTDRGLPKNSFNISNLLVLHLSHNRISSVPAINNRLEHLYLNNNSIEKINGTQICPNDLVAFHDFSSDLENVPHLRYLRLDGNYLKPPIPLDLMMCFRLLQSVVI

SEQ ID NO: 10757 - protein, 555 aa, Homo sapiens
MAARLLLLGILLLLLPLPVPAPCHTAARSECKRSHKFVPGAWLAGEGVDVTSLRRSGSFPVDTQRFLRPDGTCTLCENALQEGTLQRLPLALTNWRAQGSGCQRHVTRAKVSSTEAVARDAARSIRNDWKVGLDVTPKPTSNVHVSVAGSHSQAANFAAQKTHQDQYSFSTDTVECRFYSFHVVHTPPLHPDFKRALGDLPHHFNASTQPAYLRLISNYGTHFIRAVELGGRISALTALRTCELALEGLTDNEVEDCLTVEAQVNIGIHGSISAEAKACEEKKKKHKMTASFHQTYRERHSEVVGGHHTSINDLLFGIQAGPEQYSAWVNSLPGSPGLVDYTLEPLHVLLDSQDPRREALRRALSQYLTDRARWRDCSRPCPPGRQKSPRDPCQCVCHGSAVTTQDCCPRQRGLAQLEVTFIQAWGLWGDWFTATDAYVKLFFGGQELRTSTVWDNNNPIWSVRLDFGDVLLATGGPLRLQVWDQDSGRDDDLLGTCDQAPKSGSHEVRCNLNHGHLKFRYHARCLPHLGGGTCLDYVPQMLLGEPPGNRSGAVW

SEQ ID NO: 10758 - protein, 555 aa, Homo sapiens; identical to SEQ ID NO: 10757

SEQ ID NO: 10759 - protein, 232 aa, Homo sapiens
MAARLLLLGILLLLLPLPVPAPCHTAARSECKRSHKFVPGAWLAGEGVDVTSLRRSGSFPVDTQRFLRPDGTCTLCENALQEGTLQRLPLALTNWRAQGSGCQRHVTRAKVSSTEAVARDAARSIRNDWKVGLDVTPKPTSNVHVSVAGSHSQAANFAAQKTHQDQYSFSTDTVECRFYSSSAIVSASGFYMWPNTILLPTWPREAKRLDTHQTDGKGRFRLFFREVAGFTR

SEQ ID NO: 10760 - protein, 211 aa, Homo sapiens
MKLPLLLALLFGAVSALHLRSETSTFETPLGAKTLPEDEETPEQEMEETPCRELEEEEEWGSGSEDASKKDGAVESISVPDMVDKNLTCPEEEDTVKVVGIPGCQTCRYLLFTCRRCYRGNLVSIHNFNINYRIQCSVSALNQGQVWIGGRITGSGRCRRFQWVDGSRWNFAYWAAHQPWSRGGHCVALCTRGGHWRRAHCLRRLPFICSY

SEQ ID NO: 10761 - protein, 222 aa, Homo sapiens
MKLPLLLALLFGAVSALHLRSETSTFETPLGAKTLPEDEETPEQEMEETPCRELEEEEEWGSGSEDASKKDGAVESISVPDMVDKNLTCPEEEDTVKVVGIPGCQTCRYLLVRSLQTFSQAWFTCRRCYRGNLVSIHNFNINYRIQCSVSALNQGQVWIGGRITGSGRCRRFQWVDGSRWNFAYWAAHQPWSRGGHCVALCTRGGHWRRAHCLRRLPFICSY

SEQ ID NO: 10762 - protein, 222 aa, Homo sapiens; identical to SEQ ID NO: 10761

SEQ ID NO: 10763 - protein, 225 aa, Homo sapiens
MQCLLLLPFLLLGTVSALHLENDAPHLESLETQADLGQDLDSSKEQERDLALTEEVIQAEGEEVKASACQDNFEDEEAMESDPAALDKDFQCPREEDIVEVQGSPRCKICRYLLVRTPKTFAEAQNVCSRCYGGNLVSIHDFNFNYRIQCCTSTVNQAQVWIGGNLRGWFLWKRFCWTDGSHWNFAYWSPGQPGNGQGSCVALCTKGGYWRRAQCDKQLPFVCSF

SEQ ID NO: 10764 - protein, 1404 aa, Homo sapiens
MAWKTLPIYLLLLLSVFVIQQVSSQDLSSCAGRCGEGYSRDATCNCDYNCQHYMECCPDFKRVCTAELSCKGRCFESFERGRECDCDAQCKKYDKCCPDYESFCAEVHNPTSPPSSKKAPPPSGASQTIKSTTKRSPKPPNKKKTKKVIESEEITEEHSVSENQESSSSSSSSSSSSTIRKIKSSKNSAANRELQKKLKVKDNKKNRTKKKPTPKPPVVDEAGSGLDNGDFKVTTPDTSTTQHNKVSTSPKITTAKPINPRPSLPPNSDTSKETSLTVNKETTVETKETTTTNKQTSTDGKEKTTSAKETQSIEKTSAKDLAPTSKVLAKPTPKAETTTKGPALTTPKEPTPTTPKEPASTTPKEPTPTTIKSAPTTPKEPAPTTTKSAPTTPKEPAPTTTKEPAPTTPKEPAPTTTKEPAPTTTKSAPTTPKEPAPTTPKKPAPTTPKEPAPTTPKEPTPTTPKEPAPTTKEPAPTTPKEPAPTAPKKPAPTTPKEPAPTTPKEPAPTTTKEPSPTTPKEPAPTTTKSAPTTTKEPAPTTTKSAPTTPKEPSPTTTKEPAPTTPKEPAPTTPKKPAPTTPKEPAPTTPKEPAPTTTKKPAPTTPKEPAPTTPKETAPTTPKKLTPTTPEKLAPTTPEKPAPTTPEELAPTTPEEPTPTTPEEPAPTTPKAAAPNTPKEPAPTTPKEPAPTTPKEPAPTTPKETAPTTPKGTAPTTLKEPAPTTPKKPAPKELAPTTTKEPTSTTSDKPAPTTPKGTAPTTPKEPAPTTPKEPAPTTPKGTAPTTLKEPAPTTPKKPAPKELAPTTTKGPTSTTSDKPAPTTPKETAPTTPKEPAPTTPKKPAPTTPETPPPTTSEVSTPTTTKEPTTIHKSPDESTPELSAEPTPKALENSPKEPGVPTTKTPAATKPEMTTTAKDKTTERDLRTTPETTTAAPKMTKETATTTEKTTESKITATTTQVTSTTTQDTTPFKITTLKTTTLAPKVTTTKKTITTTEIMNKPEETAKPKDRATNSKATTPKPQKPTKAPKKPTSTKKPKTMPRVRKPKTTPTPRKMTSTMPELNPTSRIAEAMLQTTTRPNQTPNSKLVEVNPKSEDAGGAEGETPHMLLRPHVFMPEVTPDMDYLPRVPNQGIIINPMLSDETNICNGKPVDGLTTLRNGTLVAFRGHYFWMLSPFSPPSPARRITEVWGIPSPIDTVFTRCNCEGKTFFFKDSQYWRFTNDIKDAGYPKPIFKGFGGLTGQIVAALSTAKYKNWPESVYFFKRGGSIQQYIYKQEPVQKCPGRRPALNYPVYGETTQVRRRRFERAIGPSQTHTIRIQYSPARLAYQDKGVLHNEVKVSILWRGLPNVVTSAISLPNIRKPDGYDYYAFSKDQYYNIDVPSRTARAITTRSGQTLSKVWYNCP

SEQ ID NO: 10765 - protein, 1361 aa, Homo sapiens
MAWKTLPIYLLLLLSVFVIQQVSSQDLSSCAGRCGEGYSRDATCNCDYNCQHYMECCPDFKRVCTAELSCKGRCFESFERGRECDCDAQCKKYDKCCPDYESFCAEVHNPTSPPSSKKAPPPSGASQTIKSTTKRSPKPPNKKKTKKVIESEEITEVKDNKKNRTKKKPTPKPPVVDEAGSGLDNGDFKVTTPDTSTTQHNKVSTSPKITTAKPINPRPSLPPNSDTSKETSLTVNKETTVETKETTTTNKQTSTDGKEKTTSAKETQSIEKTSAKDLAPTSKVLAKPTPKAETTTKGPALTTPKEPTPTTPKEPASTTPKEPTPTTIKSAPTTPKEPAPTTTKSAPTTPKEPAPTTTKEPAPTTPKEPAPTTTKEPAPTTTKSAPTTPKEPAPTTPKKPAPTTPKEPAPTTPKEPTPTTPKEPAPTTKEPAPTTPKEPAPTAPKKPAPTTPKEPAPTTPKEPAPTTTKEPSPTTPKEPAPTTTKSAPTTTKEPAPTTTKSAPTTPKEPSPTTTKEPAPTTPKEPAPTTPKKPAPTTPKEPAPTTPKEPAPTTTKKPAPTTPKEPAPTTPKETAPTTPKKLTPTTPEKLAPTTPEKPAPTTPEELAPTTPEEPTPTTPEEPAPTTPKAAAPNTPKEPAPTTPKEPAPTTPKEPAPTTPKETAPTTPKGTAPTTLKEPAPTTPKKPAPKELAPTTTKEPTSTTSDKPAPTTPKGTAPTTPKEPAPTTPKEPAPTTPKGTAPTTLKEPAPTTPKKPAPKELAPTTTKGPTSTTSDKPAPTTPKETAPTTPKEPAPTTPKKPAPTTPETPPPTTSEVSTPTTTKEPTTIHKSPDESTPELSAEPTPKALENSPKEPGVPTTKTPAATKPEMTTTAKDKTTERDLRTTPETTTAAPKMTKETATTTEKTTESKITATTTQVTSTTTQDTTPFKITTLKTTTLAPKVTTTKKTITTTEIMNKPEETAKPKDRATNSKATTPKPQKPTKAPKKPTSTKKPKTMPRVRKPKTTPTPRKMTSTMPELNPTSRIAEAMLQTTTRPNQTPNSKLVEVNPKSEDAGGAEGETPHMLLRPHVFMPEVTPDMDYLPRVPNQGIIINPMLSDETNICNGKPVDGLTTLRNGTLVAFRGHYFWMLSPFSPPSPARRITEVWGIPSPIDTVFTRCNCEGKTFFFKDSQYWRFTNDIKDAGYPKPIFKGFGGLTGQIVAALSTAKYKNWPESVYFFKRGGSIQQYIYKQEPVQKCPGRRPALNYPVYGETTQVRRRRFERAIGPSQTHTIRIQYSPARLAYQDKGVLHNEVKVSILWRGLPNVVTSAISLPNIRKPDGYDYYAFSKDQYYNIDVPSRTARAITTRSGQTLSKVWYNCP

SEQ ID NO: 10766 - protein, 1311 aa, Homo sapiens
MAWKTLPIYLLLLLSVFVIQQVSSQDLSSCAGRCGEGYSRDATCNCDYNCQHYMECCPDFKRVCTAELSCKGRCFESFERGRECDCDAQCKKYDKCCPDYESFCAEVKDNKKNRTKKKPTPKPPVVDEAGSGLDNGDFKVTTPDTSTTQHNKVSTSPKITTAKPINPRPSLPPNSDTSKETSLTVNKETTVETKETTTTNKQTSTDGKEKTTSAKETQSIEKTSAKDLAPTSKVLAKPTPKAETTTKGPALTTPKEPTPTTPKEPASTTPKEPTPTTIKSAPTTPKEPAPTTTKSAPTTPKEPAPTTTKEPAPTTPKEPAPTTTKEPAPTTTKSAPTTPKEPAPTTPKKPAPTTPKEPAPTTPKEPTPTTPKEPAPTTKEPAPTTPKEPAPTAPKKPAPTTPKEPAPTTPKEPAPTTTKEPSPTTPKEPAPTTTKSAPTTTKEPAPTTTKSAPTTPKEPSPTTTKEPAPTTPKEPAPTTPKKPAPTTPKEPAPTTPKEPAPTTTKKPAPTTPKEPAPTTPKETAPTTPKKLTPTTPEKLAPTTPEKPAPTTPEELAPTTPEEPTPTTPEEPAPTTPKAAAPNTPKEPAPTTPKEPAPTTPKEPAPTTPKETAPTTPKGTAPTTLKEPAPTTPKKPAPKELAPTTTKEPTSTTSDKPAPTTPKGTAPTTPKEPAPTTPKEPAPTTPKGTAPTTLKEPAPTTPKKPAPKELAPTTTKGPTSTTSDKPAPTTPKETAPTTPKEPAPTTPKKPAPTTPETPPPTTSEVSTPTTTKEPTTIHKSPDESTPELSAEPTPKALENSPKEPGVPTTKTPAATKPEMTTTAKDKTTERDLRTTPETTTAAPKMTKETATTTEKTTESKITATTTQVTSTTTQDTTPFKITTLKTTTLAPKVTTTKKTITTTEIMNKPEETAKPKDRATNSKATTPKPQKPTKAPKKPTSTKKPKTMPRVRKPKTTPTPRKMTSTMPELNPTSRIAEAMLQTTTRPNQTPNSKLVEVNPKSEDAGGAEGETPHMLLRPHVFMPEVTPDMDYLPRVPNQGIIINPMLSDETNICNGKPVDGLTTLRNGTLVAFRGHYFWMLSPFSPPSPARRITEVWGIPSPIDTVFTRCNCEGKTFFFKDSQYWRFTNDIKDAGYPKPIFKGFGGLTGQIVAALSTAKYKNWPESVYFFKRGGSIQQYIYKQEPVQKCPGRRPALNYPVYGETTQVRRRRFERAIGPSQTHTIRIQYSPARLAYQDKGVLHNEVKVSILWRGLPNVVTSAISLPNIRKPDGYDYYAFSKDQYYNIDVPSRTARAITTRSGQTLSKVWYNCP

SEQ ID NO: 10767 - protein, 162 aa, Homo sapiens
MAWKTLPIYLLLLLSVFVIQQVSSQELSCKGRCFESFERGRECDCDAQCKKYDKCCPDYESFCAEEHSVSENQESSSSSSSSSSSSTIRKIKSSKNSAANRELQKKLKVKDNKKNRTKKKPTPKPPVVDEAGSGLDNGDFKVTTPDTSTTQHNKVSTSPKIT

SEQ ID NO: 10768 - protein, 1363 aa, Homo sapiens
MAWKTLPIYLLLLLSVFVIQQVSSQELSCKGRCFESFERGRECDCDAQCKKYDKCCPDYESFCAEVHNPTSPPSSKKAPPPSGASQTIKSTTKRSPKPPNKKKTKKVIESEEITEEHSVSENQESSSSSSSSSSSSTIRKIKSSKNSAANRELQKKLKVKDNKKNRTKKKPTPKPPVVDEAGSGLDNGDFKVTTPDTSTTQHNKVSTSPKITTAKPINPRPSLPPNSDTSKETSLTVNKETTVETKETTTTNKQTSTDGKEKTTSAKETQSIEKTSAKDLAPTSKVLAKPTPKAETTTKGPALTTPKEPTPTTPKEPASTTPKEPTPTTIKSAPTTPKEPAPTTTKSAPTTPKEPAPTTTKEPAPTTPKEPAPTTTKEPAPTTTKSAPTTPKEPAPTTPKKPAPTTPKEPAPTTPKEPTPTTPKEPAPTTKEPAPTTPKEPAPTAPKKPAPTTPKEPAPTTPKEPAPTTTKEPSPTTPKEPAPTTTKSAPTTTKEPAPTTTKSAPTTPKEPSPTTTKEPAPTTPKEPAPTTPKKPAPTTPKEPAPTTPKEPAPTTTKKPAPTTPKEPAPTTPKETAPTTPKKLTPTTPEKLAPTTPEKPAPTTPEELAPTTPEEPTPTTPEEPAPTTPKAAAPNTPKEPAPTTPKEPAPTTPKEPAPTTPKETAPTTPKGTAPTTLKEPAPTTPKKPAPKELAPTTTKEPTSTTSDKPAPTTPKGTAPTTPKEPAPTTPKEPAPTTPKGTAPTTLKEPAPTTPKKPAPKELAPTTTKGPTSTTSDKPAPTTPKETAPTTPKEPAPTTPKKPAPTTPETPPPTTSEVSTPTTTKEPTTIHKSPDESTPELSAEPTPKALENSPKEPGVPTTKTPAATKPEMTTTAKDKTTERDLRTTPETTTAAPKMTKETATTTEKTTESKITATTTQVTSTTTQDTTPFKITTLKTTTLAPKVTTTKKTITTTEIMNKPEETAKPKDRATNSKATTPKPQKPTKAPKKPTSTKKPKTMPRVRKPKTTPTPRKMTSTMPELNPTSRIAEAMLQTTTRPNQTPNSKLVEVNPKSEDAGGAEGETPHMLLRPHVFMPEVTPDMDYLPRVPNQGIIINPMLSDETNICNGKPVDGLTTLRNGTLVAFRGHYFWMLSPFSPPSPARRITEVWGIPSPIDTVFTRCNCEGKTFFFKDSQYWRFTNDIKDAGYPKPIFKGFGGLTGQIVAALSTAKYKNWPESVYFFKRGGSIQQYIYKQEPVQKCPGRRPALNYPVYGETTQVRRRRFERAIGPSQTHTIRIQYSPARLAYQDKGVLHNEVKVSILWRGLPNVVTSAISLPNIRKPDGYDYYAFSKDQYYNIDVPSRTARAITTRSGQTLSKVWYNCP

SEQ ID NO: 10769 - protein, 854 aa, Homo sapiens [sequence omitted]

SEQ ID NO: 10770 - protein, 140 aa, Homo sapiens
GPPLGGQQSQPSAGDGNQDDGPQQGPPQQGGQQQQGPPPPQGKPQGPPQQGGQQQQGPPPPQGKPQGPPQQGGHPPPPQGRPQGPPQQGGHPRPPRGRPQGPPQQGGHQQGPPPPPPGKPQGPPPQGGRPQGPPQGQSPQ

SEQ ID NO: 10771 - protein, 175 aa, Homo sapiens
MLLILLSVALLAFSSAQDLNEDGGDSEQFLDEERQGPPLGGQQSQPSAGDGNQDDGPQQGPPQQGGQQQQGPPPPQGKPQGPPQQGGQQQQGPPPPQGKPQGPPQQGGHPPPPQGRPQGPPQQGGHPRPPRGRPQGPPQQGGHQQGPPPPPPGKPQGPPPQGGRPQGPPQGQSPQ

SEQ ID NO: 10772 - protein, 187 aa, Homo sapiens
MLLILLSVALLAFSSAQDLNEDVSQEDVPLVISDGGDSEQFLDEERQGPPLGGQQSQPSAGDGNQDDGPQQGPPQQGGQQQQGPPPPQGKPQGPPQQGGQQQQGPPPPQGKPQGPPQQGGHPPPPQGRPQGPPQQGGHPRPPRGRPQGPPQQGGHQQGPPPPPPGKPQGPPPQGGRPQGPPQGQSPQ

SEQ ID NO: 10773 - protein, 166 aa, Homo sapiens
MLLILLSVALLAFSSAQDLDEDVSQEDVPLVISDGGDSEQFIDEERQGPPLGGQQSQPSAGDGNQNDGPQQGPPQQGGQQQQGPPPPQGKPQGPPQQGGHPPPPQGRPQGPPQQGGHPRPPRGRPQGPPQQGGHQQGPPPPPPGKPQGPPPQGGRPQGPPQGQSPQ

SEQ ID NO: 10774 - protein, 166 aa, Homo sapiens; identical to SEQ ID NO: 10773

SEQ ID NO: 10775 - protein, 82 aa, Homo sapiens
METVISSDSSPAVENEHPQETPESNNSVYTSFMKSHRCYDLIPTSSKLVVFDTSLQSCPCGFAFMIITVLATGEESFFCFGD

SEQ ID NO: 10776 - protein, 331 aa, Homo sapiens
METVISSDSSPAVENEHPQETPESNNSVYTSFMKSHRCYDLIPTSSKLVVFDTSLQVKKAFFALVTNGVRAAPLWDSKKQSFVGMLTITDFINILHRYYKSALVQIYELEEHKIETWREVYLQDSFKPLVCISPNASLFDAVSSLIRNKIHRLPVIDPESGNTLYILTHKRILKFLKLFITEFPKPEFMSKSLEELQIGTYANIAMVRTTTPVYVALGIFVQHRVSALPVVDEKGRVVDIYSKFDVINLAAEKTYNNLDVSVTKALQHRSHYFEGVLKCYLHETLETIINRLVEAEVHRLVVVDENDVVKGIVSLSDILQALVLTGGEKKP

SEQ ID NO: 10777 - protein, 340 aa, Homo sapiens
METVISSDSSPAVENEHPQETPESNNSVYTSFMKSHRCYDLIPTSSKLVVFDTSLQVKKAFFALVTNGVRAAPLWDSKKQSFVVLRALSCPLGMLTITDFINILHRYYKSALVQIYELEEHKIETWREVYLQDSFKPLVCISPNASLFDAVSSLIRNKIHRLPVIDPESGNTLYILTHKRILKFLKLFITEFPKPEFMSKSLEELQIGTYANIAMVRTTTPVYVALGIFVQHRVSALPVVDEKGRVVDIYSKFDVINLAAEKTYNNLDVSVTKALQHRSHYFEGVLKCYLHETLETIINRLVEAEVHRLVVVDENDVVKGIVSLSDILQALVLTGGEKKP

SEQ ID NO: 10778 - protein, 43 aa, Homo sapiens
MFSLTGVMVISSDSSPAVENEHPQETPESNNSVYTSFMKSHRC

SEQ ID NO: 10779 - protein, 69 aa, Homo sapiens
MKSHRCYDLIPTSSKLVVFDTSLQVKKAFFALVTNGVRAAPLWDSKKQSFVGMLTITDFINILHRYYKS

SEQ ID NO: 10780 - protein, 82 aa, Homo sapiens
MKSHRCYDLIPTSSKLVVFDTSLQVKKAFFALVTNGVRAAPLWDSKKQSFVGMLTITDFINILHRYYKSALVQIYELEEHKI

SEQ ID NO: 10781 - protein, 125 aa, Homo sapiens
MKSHRCYDLIPTSSKLVVFDTSLQVKKAFFALVTNGVRAAPLWDSKKQSFVGMLTITDFINILHRYYKSALVQIYELEEHKIETWREVYLQDSFKPLVCISPNASLFDAVSSLIRNKIHRLPVID

SEQ ID NO: 10782 - protein, 161 aa, Homo sapiens
MKSHRCYDLIPTSSKLVVFDTSLQVKKAFFALVTNGVRAAPLWDSKKQSFVGMLTITDFINILHRYYKSALVQIYELEEHKIETWREVYLQDSFKPLVCISPNASLFDAVSSLIRNKIHRLPVIDPESGNTLYILTHKRILKFLKLFITEFPKPEFMSKSL

SEQ ID NO: 10783 - protein, 299 aa, Homo sapiens
MKSHRCYDLIPTSSKLVVFDTSLQVKKAFFALVTNGVRAAPLWDSKKQSFVGMLTITDFINILHRYYKSALVQIYELEEHKIETWREVYLQDSFKPLVCISPNASLFDAVSSLIRNKIHRLPVIDPESGNTLYILTHKRILKFLKLFITEFPKPEFMSKSLEELQIGTYANIAMVRTTTPVYVALGIFVQHRVSALPVVDEKGRVVDIYSKFDVINLAAEKTYNNLDVSVTKALQHRSHYFEGVLKCYLHETLETIINRLVEAEVHRLVVVDENDVVKGIVSLSDILQALVLTGGEKKP

SEQ ID NO: 10784 - protein, 28 aa, Homo sapiens
MLTITDFINILHRYYKSALVQIYELEEH

SEQ ID NO: 10785 - protein, 145 aa, Homo sapiens
MLTITDFINILHRYYKSALVQIYELEEHKIETWREVYLQDSFKPLVCISPNASLFDAVSSLIRNKIHRLPVIDPESGNTLYILTHKRILKFLKLFITEFPKPEFMSKSLEELQIGTYANIAMVRTTTPVYVALGIFVQHRVSALP

SEQ ID NO: 10786 - protein, 203 aa, Homo sapiens [sequence omitted]

SEQ ID NO: 10787 - protein, 280 aa, Homo sapiens
MSILKVKKAFFALVTNGVRAAPLWDSKKQSFVGMLTITDFINILHRYYKSALVQIYELEEHKIETWREVYLQDSFKPLVCISPNASLFDAVSSLIRNKIHRLPVIDPESGNTLYILTHKRILKFLKLFITEFPKPEFMSKSLEELQIGTYANIAMVRTTTPVYVALGIFVQHRVSALPVVDEKGRVVDIYSKFDVINLAAEKTYNNLDVSVTKALQHRSHYFEGVLKCYLHETLETIINRLVEAEVHRLVVVDENDVVKGIVSLSDILQALVLTGGEKKP

SEQ ID NO: 10788 - protein, 251 aa, Homo sapiens
NSVYTSFMKSHRCYDLIPTSSKLVVFDTSLQVKKAFFALVTNGVRAAPLWDSKKQSFVGMLTITDFINILHRYYKSALVQIYELEEHKIETWREVYLQDSFKPLVCISPNARSLSSPSQSSCPSLWKSYRLAPMPILLWFALPPPSMWLWGFLYSIESQPCQWWMRRNLAAEKTYNNLDVSVTKALQHRSHYFEGVLKCYLHETLETIINRLVEAEVHRLVVVDENDVVKGIVSLSDILQALVLTGGEKKP

SEQ ID NO: 10789 - protein, 93 aa, Homo sapiens
RVVDIYSKFDVINLAAEKTYNNLDVSVTKALQHRSHYFEGVLKCYLHETLETIINRLVEAEVHRLVVVDENDVVKGICPTHCLLEALWESDET

SEQ ID NO: 10790 - protein, 200 aa, Homo sapiens
AEEEEEEEDSEVQGEQPKPASPAEEDKMPPYDEQTQAFIDAAQEARNKFEEAERSLKDMEESIRNLEQEISFDFGPNGEFAYLYSQCYELTTNEYVYRLCPFKLVSQKPKLGGSPTSLGTWGSWIGPDHDKFSAMKYEQGTGCWQGPNRSTTVRLLCGKETMVTSTTEPSRCEYLMELMTPAACPEPPPEAPTEDDHDEL

SEQ ID NO: 10791 - protein, 62 aa, Homo sapiens
MLLPLLLLLPMCWAVEVKRPRGVSLTNHHFYDESKPFTCLDGSATIPFDQVNDDYCDCKDGS

SEQ ID NO: 10792 - protein, 140 aa, Homo sapiens
MLLPLLLLLPMCWAVEVKRPRGVSLTNHHFYDESKPFTCLDGSATIPFDQVNDDYCDCKDGSDEPGTAACPNGSFHCTNTGYKPLYIPSNRVNDGVCDCCDGTDEYNSGVICENTCKEKGRKERESLQQMAEVTREGFRL

SEQ ID NO: 10793 - protein, 144 aa, Homo sapiens
MLLPLLLLLPMCWAVEVKRPRGVSLTNHHFYDESKPFTCLDGSATIPFDQVNDDYCDCKDGSDEPGTAACPNGSFHCTNTGYKPLYIPSNRVNDGVCDCCDGTDEYNSGVICENTCKEKGRKERESLQQMAEVTREGFRLKKIL

SEQ ID NO: 10794 - protein, 168 aa, Homo sapiens
MLLPLLLLLPMCWAVEVKRPRGVSLTNHHFYDESKPFTCLDGSATIPFDQVNDDYCDCKDGSDEPGTAACPNGSFHCTNTGYKPLYIPSNRVNDGVCDCCDGTDEYNSGVICENTCKEKGRKERESLQQMAEVTREGFRLKKILIEDWKKAREEKQKKLIELQAGKKS

SEQ ID NO: 10795 - protein, 535 aa, Homo sapiens
MLLPLLLLLPMCWAVEVKRPRGVSLTNHHFYDESKPFTCLDGSATIPFDQVNDDYCDCKDGSDEPGTAACPNGSFHCTNTGYKPLYIPSNRVNDGVCDCCDGTDEYNSGVICENTCKEKGRKERESLQQMAEVTREGFRLKKILIEDWKKAREEKQKKLIELQAGKKSLEDQVEMLRTVKEEAEKPEREAKEQHQKLWEEQLAAAKAQQEQELAADAFKELDDDMDGTVSVTELQTHPELDTDGDGALSEAEAQALLSGDTQTDATSFYDRVWAAIRDKYRSEALPTDLPAPSAPDLTEPKEEQPPVPSSPTEEEEEEEEEEEEEAEEEEEEEDSEVQGEQPKEAPPPLSPPQPASPAEEDKMPPYDEQTQAFIDAAQEARNKFEEAERSLKDMEESIRNLEQEISFDFGPNGEFAYLYSQCYELTTNEYVYRLCPFKLVSQKPKLGGSPTSLGTWGSWIGPDHDKFSAMKYEQGTGCWQGPNRSTTVRLLCGKETMVTSTTEPSRCEYLMELMTPAACPEPPPEAPTEDDHDEL

SEQ ID NO: 10796 - protein, 528 aa, Homo sapiens
MLLPLLLLLPMCWAVEVKRPRGVSLTNHHFYDESKPFTCLDGSATIPFDQVNDDYCDCKDGSDEPGTAACPNGSFHCTNTGYKPLYIPSNRVNDGVCDCCDGTDEYNSGVICENTCKEKGRKERESLQQMAEVTREGFRLKKILIEDWKKAREEKQKKLIELQAGKKSLEDQVEMLRTVKEEAEKPEREAKEQHQKLWEEQLAAAKAQQEQELAADAFKELDDDMDGTVSVTELQTHPELDTDGDGALSEAEAQALLSGDTQTDATSFYDRVWAAIRDKYRSEALPTDLPAPSAPDLTEPKEEQPPVPSSPTEEEEEEEEEEEEEAEEEEEEEDSEEAPPPLSPPQPASPAEEDKMPPYDEQTQAFIDAAQEARNKFEEAERSLKDMEESIRNLEQEISFDFGPNGEFAYLYSQCYELTTNEYVYRLCPFKLVSQKPKLGGSPTSLGTWGSWIGPDHDKFSAMKYEQGTGCWQGPNRSTTVRLLCGKETMVTSTTEPSRCEYLMELMTPAACPEPPPEAPTEDDHDEL

SEQ ID NO: 10797 - protein, 525 aa, Homo sapiens
MLLPLLLLLPMCWAVEVKRPRGVSLTNHHFYDESKPFTCLDGSATIPFDQVNDDYCDCKDGSDEPGTAACPNGSFHCTNTGYKPLYIPSNRVNDGVCDCCDGTDEYNSGVICENTCKEKGRKERESLQQMAEVTREGFRLKKILIEDWKKAREEKQKKLIELQAGKKSLEDQVEMLRTVKEEAEKPEREAKEQHQKLWEEQLAAAKAQQEQELAADAFKELDDDMDGTVSVTELQTHPELDTDGDGALSEAEAQALLSGDTQTDATSFYDRVWAAIRDKYRSEALPTDLPAPSAPDLTEPKEEQPPVPSSPTEEEEEEEEEEEEEAEEEEEEEDSEVQGEQPKPASPAEEDKMPPYDEQTQAFIDAAQEARNKFEEAERSLKDMEESIRNLEQEISFDFGPNGEFAYLYSQCYELTTNEYVYRLCPFKLVSQKPKLGGSPTSLGTWGSWIGPDHDKFSAMKYEQGTGCWQGPNRSTTVRLLCGKETMVTSTTEPSRCEYLMELMTPAACPEPPPEAPTEDDHDEL

SEQ ID NO: 10798 - protein, 525 aa, Homo sapiens; identical to SEQ ID NO: 10797

SEQ ID NO: 10799 - protein, 132 aa, Homo sapiens
MLLPLLLLLPMCWAVEVKRPRGVSLTSESSCSPSRQAGGGRGQHWALGIGIYSLLTQFPGSAPLVGMGGQRWYLVEKALTCPGLSFLYPADHHFYDESKPFTCLDGSATIPFDQVNDDYCDCKDGSDEPGTA

SEQ ID NO: 10800 - protein, 80 aa, Homo sapiens
EVLRNKGYNRSLDMWSVGVIIYVSLSGTFPFNEDEDIHDQIQNAAFMYPPNPWKEISHEDVDLIQYNTYILGCLSSHCTA

SEQ ID NO: 10801 - protein, 117 aa, Homo sapiens
MILSPPQPCGTFPECGFYGMYDKILLFRHDPTSENILQLVKAASDIQEGDLIEVVLSASATFEDFQIRPHALFVHSYRAPAFCDHCGEMLWGLVRQGLKCEGCGLNYHKRCAFKIPN

SEQ ID NO: 10802 - protein, 912 aa, Homo sapiens
MSAPPVLRPPSPLLPVAAAAAAAAAALVPGSGPGPAPFLAPVAAPVGGISFHLQIGLSREPVLLLQDSSGDYSLAHVREMACSIVDQKFPECGFYGMYDKILLFRHDPTSENILQLVKAASDIQEGDLIEVVLSASATFEDFQIRPHALFVHSYRAPAFCDHCGEMLWGLVRQGLKCEGCGLNYHKRCAFKIPNNCSGVRRRRLSNVSLTGVSTIRTSSAELSTSAPDEPLLQKSPSESFIGREKRSNSQSYIGRPIHLDKILMSKVKVPHTFVIHSYTRPTVCQYCKKLLKGLFRQGLQCKDCRFNCHKRCAPKVPNNCLGEVTINGDLLSPGAESDVVMEEGSDDNDSERNSGLMDDMEEAMVQDAEMAMAECQNDSGEMQDPDPDHEDANRTISPSTSNNIPLMRVVQSVKHTKRKSSTVMKEGWMVHYTSKDTLRKRHYWRLDSKCITLFQNDTGSRYYKEIPLSEILSLEPVKTSALIPNGANPHCFEITTANVVYYVGENVVNPSSPSPNNSVLTSGVGADVARMWEIAIQHALMPVIPKGSSVGTGTNLHRDISVSISVSNCQIQENVDISTVYQIFPDEVLGSGQFGIVYGGKHRKTGRDVAIKIIDKLRFPTKQESQLRNEVAILQNLHHPGVVNLECMFETPERVFVVMEKLHGDMLEMILSSEKGRLPEHITKFLITQILVALRHLHFKNIVHCDLKPENVLLASADPFPQVKLCDFGFARIIGEKSFRRSVVGTPAYLAPEVLRNKGYNRSLDMWSVGVIIYVSLSGTFPFNEDEDIHDQIQNAAFMYPPNPWKEISHEAIDLINNLLQVKMRKRYSVDKTLSHPWLQDYQTWLDLRELECKIGERYITHESDDLRWEKYAGEQGLQYPTHLINPSASHSDTPETEETEMKALGERVSIL

SEQ ID NO: 10803 - protein, 912 aa, Homo sapiens; identical to SEQ ID NO: 10802

SEQ ID NO: 10804 - protein, 920 aa, Homo sapiens
MSAPPVLRPPSPLLPVAAAAAAAAAALVPGSGPGPAPFLAPVAAPVGGISFHLQIGLSREPVLLLQDSSGDYSLAHVREMACSIVDQKFPECGFYGMYDKILLFRHDPTSENILQLVKAASDIQEGDLIEVVLSASATFEDFQIRPHALFVHSYRAPAFCDHCGEMLWGLVRQGLKCEGCGLNYHKRCAFKIPNNCSGVRRRRLSNVSLTGVSTIRTSSAELSTSAPDEPLLSPVSPGFEQKSPSESFIGREKRSNSQSYIGRPIHLDKILMSKVKVPHTFVIHSYTRPTVCQYCKKLLKGLFRQGLQCKDCRFNCHKRCAPKVPNNCLGEVTINGDLLSPGAESDVVMEEGSDDNDSERNSGLMDDMEEAMVQDAEMAMAECQNDSGEMQDPDPDHEDANRTISPSTSNNIPLMRVVQSVKHTKRKSSTVMKEGWMVHYTSKDTLRKRHYWRLDSKCITLFQNDTGSRYYKEIPLSEILSLEPVKTSALIPNGANPHCFEITTANVVYYVGENVVNPSSPSPNNSVLTSGVGADVARMWEIAIQHALMPVIPKGSSVGTGTNLHRDISVSISVSNCQIQENVDISTVYQIFPDEVLGSGQFGIVYGGKHRKTGRDVAIKIIDKLRFPTKQESQLRNEVAILQNLHHPGVVNLECMFETPERVFVVMEKLHGDMLEMILSSEKGRLPEHITKFLITQILVALRHLHFKNIVHCDLKPENVLLASADPFPQVKLCDFGFARIIGEKSFRRSVVGTPAYLAPEVLRNKGYNRSLDMWSVGVIIYVSLSGTFPFNEDEDIHDQIQNAAFMYPPNPWKEISHEAIDLINNLLQVKMRKRYSVDKTLSHPWLQDYQTWLDLRELECKIGERYITHESDDLRWEKYAGEQGLQYPTHLINPSASHSDTPETEETEMKALGERVSIL

SEQ ID NO: 10805 - protein, 157 aa, Homo sapiens
SSTVMKEGWMVHYTSKDTLRKRHYWRLDSKCITLFQNDTGSRYYKEIPLSEILSLEPVKTSALIPNGANPHCFEITTANVVYYVGENVVNPSSPSPNNSVLTSGVGADVARMWEIAIQHALMPVIPKGSSVGTGTNLHSESASFLTSPKLIMCLPLA

SEQ ID NO: 10806 - protein, 228 aa, Homo sapiens
MNIKGSPWKAGSLLLLLVSNLLLCQSVAPLPICPGGAARCQVTLRDLFDRAVVLSHYIHNLSSEMFSEFDKRYTHGRGFITKAINSCHTSSLATPEDKEQAQQMNQKDFLSLIVSILRSWNEPLYHLVTEVRGMQEAPEAILSKAVEIEEQTKRLLEGMELIVSQVHPETKENEIYPVWSGLPSLQMADEESRLSAYYNLLHCLRRDSHKIDNYLKLLKCRIIHNNNC

SEQ ID NO: 10807 - protein, 227 aa, Homo sapiens
MNIKGSPWKGSLLLLLVSNLLLCQSVAPLPICPGGAARCQVTLRDLFDRAVVLSHYIHNLSSEMFSEFDKRYTHGRGFITKAINSCHTSSLATPEDKEQAQQMNQKDFLSLIVSILRSWNEPLYHLVTEVRGMQEAPEAILSKAVEIEEQTKRLLEGMELIVSQVHPETKENEIYPVWSGLPSLQMADEESRLSAYYNLLHCLRRDSHKIDNYLKLLKCRIIHNNNC

SEQ ID NO: 10808 - protein, 196 aa, Homo sapiens
MNIKGSPWKGSLLLLLVSNLLLSHYIHNLSSEMFSEFDKRYTHGRGFITKAINSCHTSSLATPEDKEQAQQMNQKDFLSLIVSILRSWNEPLYHLVTEVRGMQEAPEAILSKAVEIEEQTKRLLEGMELIVSQVHPETKENEIYPVWSGLPSLQMADEESRLSAYYNLLHCLRRDSHKIDNYLKLLKCRIIHNNNC

SEQ ID NO: 10809 - protein, 87 aa, Homo sapiens
MKVLRAWLLCLLMLGLALRGAASRTHRHSMEIRTPDINPAWYASRGIRPVGRFGRRRATLGDVPKPGLRPRLTCFPLEGGAMSSQDG

SEQ ID NO: 10810 - protein, 33 aa, Homo sapiens
MKENVASATVFTLLLFLNTCLLNDPFCWAANRV

SEQ ID NO: 10811 - protein, 34 aa, Homo sapiens
MKENVASATVFTLLLFLNTCLLNERHSCMNVQTT

SEQ ID NO: 10812 - protein, 34 aa, Homo sapiens; identical to SEQ ID NO: 10811

SEQ ID NO: 10813 - protein, 34 aa, Homo sapiens
MKENVASATVFTLLLFLNTCLLNGQLPPGKPEIF

SEQ ID NO: 10814 - protein, 62 aa, Homo sapiens
MKENVASATVFTLLLFLNTCLLNGQLPPGKPEIFKCRSPNKETFTCWWRPGTDGGLPTNYSL

SEQ ID NO: 10815 - protein, 103 aa, Homo sapiens
MKENVASATVFTLLLFLNTCLLNGQLPPGKPEIFKCRSPNKETFTCWWRPGTDGGLPTNYSLTYHREGETLMHECPDYITGGPNSCHFGKQYTSMWRTYIMMV

SEQ ID NO: 10816 - protein, 111 aa, Homo sapiens
MKENVASATVFTLLLFLNTCLLNGQLPPGKPEIFKCRSPNKETFTCWWRPGTDGGLPTNYSLTYHREGETLMHECPDYITGGPNSCHFGKQYTSMWRTYIMMVNATNQMGS

SEQ ID NO: 10817 - protein, 120 aa, Homo sapiens
MKENVASATVFTLLLFLNTCLLNGQLPPGKPEIFKCRSPNKETFTCWWRPGTDGGLPTNYSLTYHREGETLMHECPDYITGGPNSCHFGKQYTSMWRTYIMMVNATNQMGSSFSDELYVD

SEQ ID NO: 10818 - protein, 376 aa, Homo sapiens
MKENVASATVFTLLLFLNTCLLNGQLPPGKPEIFKCRSPNKETFTCWWRPGTDGGLPTNYSLTYHREGETLMHECPDYITGGPNSCHFGKQYTSMWRTYIMMVNATNQMGSSFSDELYVDVTYIVQPDPPLELAVEVKQPEDRKPYLWIKWSPPTLIDLKTGWFTLLYEIRLKPEKAAEWEIHFAGQQTEFKILSLHPGQKYLVQVRCKPDHGYWSAWSPATFIQIPSDFTMNDTTVWISVAVLSAVICLIIVWAVALKGYSMVTCIFPPVPGPKIKGFDAHLLEKGKSEELLSALGCQDFPPTSDYEDLLVEYLEVDDSEDQHLMSVHSKEHPSQGDPLMLGASHYKNLKSYRPRKISSQGRLAVFTKATLTTVQ

SEQ ID NO: 10819 - protein, 349 aa, Homo sapiens
MKENVASATVFTLLLFLNTCLLNGQLPPGKPEIFKCRSPNKETFTCWWRPGTDGGLPTNYSLTYHREGETLMHECPDYITGGPNSCHFGKQYTSMWRTYIMMVNATNQMGSSFSDELYVDVTYIVQPDPPLELAVEVKQPEDRKPYLWIKWSPPTLIDLKTGWFTLLYEIRLKPEKAAEWEIHFAGQQTEFKILSLHPGQKYLVQVRCKPDHGYWSAWSPATFIQIPSDFTMNDTTVWISVAVLSAVICLIIVWAVALKGYSMVTCIFPPVPGPKIKGFDAHLLEKGKSEELLSALGCQDFPPTSDYEDLLVEYLEVDDSEDQHLMSVHSKEHPSQEREQRQAQEARDS

SEQ ID NO: 10820 - protein, 288 aa, Homo sapiens
MKENVASATVFTLLLFLNTCLLNGQLPPGKPEIFKCRSPNKETFTCWWRPGTDGGLPTNYSLTYHREGETLMHECPDYITGGPNSCHFGKQYTSMWRTYIMMVNATNQMGSSFSDELYVDVTYIVQPDPPLELAVEVKQPEDRKPYLWIKWSPPTLIDLKTGWFTLLYEIRLKPEKAAEWEIHFAGQQTEFKILSLHPGQKYLVQVRCKPDHGYWSAWSPATFIQIPSDFTMNDTTVWISVAVLSAVICLIIVWAVALKGYSMVTCIFPPVPGPKIKGFDAHLLEVTP

SEQ ID NO: 10821 - protein, 622 aa, Homo sapiens
MKENVASATVFTLLLFLNTCLLNGQLPPGKPEIFKCRSPNKETFTCWWRPGTDGGLPTNYSLTYHREGETLMHECPDYITGGPNSCHFGKQYTSMWRTYIMMVNATNQMGSSFSDELYVDVTYIVQPDPPLELAVEVKQPEDRKPYLWIKWSPPTLIDLKTGWFTLLYEIRLKPEKAAEWEIHFAGQQTEFKILSLHPGQKYLVQVRCKPDHGYWSAWSPATFIQIPSDFTMNDTTVWISVAVLSAVICLIIVWAVALKGYSMVTCIFPPVPGPKIKGFDAHLLEKGKSEELLSALGCQDFPPTSDYEDLLVEYLEVDDSEDQHLMSVHSKEHPSQGMKPTYLDPDTDSGRGSCDSPSLLSEKCEEPQANPSTFYDPEVIEKPENPETTHTWDPQCISMEGKIPYFHAGGSKCSTWPLPQPSQHNPRSSYHNITDVCELAVGPAGAPATLLNEAGKDALKSSQTIKSREEGKATQQREVESFHSETDQDTPWLLPQEKTPFGSAKPLDYVEIHKVNKDGALSLLPKQRENSGKPKKPGTPENNKEYAKVSGVMDNNILVLVPDPHAKNVACFEESAKEAPPSLEQNQAEKALANFTATSSKCRLQLGGLDYLDPACFTHSFH

SEQ ID NO: 10822 - protein, 288 aa, Homo sapiens; identical to SEQ ID NO: 10820

SEQ ID NO: 10823 - protein, 376 aa, Homo sapiens; identical to SEQ ID NO: 10818

SEQ ID NO: 10824 - protein, 349 aa, Homo sapiens; identical to SEQ ID NO: 10819

SEQ ID NO: 10825 - protein, 268 aa, Homo sapiens
MKENVASATVFTLLLFLNTCLLNGQLPPGKPEIFKCRSPNKETFTCWWRPGTDGGLPTNYSLTYHREGETLMHECPDYITGGPNSCHFGKQYTSMWRTYIMMVNATNQMGSSFSDELYVDVTYIVQPDPPLELAVEVKQPEDRKPYLWIKWSPPTLIDLKTGWFTLLYEIRLKPEKAAEWEIHFAGQQTEFKILSLHPGQKYLVQVRCKPDHGYWSAWSPATFIQIPSGDPLMLGASHYKNLKSYRPRKISSQGRLAVFTKATLTTVQ

SEQ ID NO: 10826 - protein, 268 aa, Homo sapiens; identical to SEQ ID NO: 10825

SEQ ID NO: 10827 - protein, 521 aa, Homo sapiens
MKENVASATVFTLLLFLNTCLLNVQPDPPLELAVEVKQPEDRKPYLWIKWSPPTLIDLKTGWFTLLYEIRLKPEKAAEWEIHFAGQQTEFKILSLHPGQKYLVQVRCKPDHGYWSAWSPATFIQIPSDFTMNDTTVWISVAVLSAVICLIIVWAVALKGYSMVTCIFPPVPGPKIKGFDAHLLEKGKSEELLSALGCQDFPPTSDYEDLLVEYLEVDDSEDQHLMSVHSKEHPSQGMKPTYLDPDTDSGRGSCDSPSLLSEKCEEPQANPSTFYDPEVIEKPENPETTHTWDPQCISMEGKIPYFHAGGSKCSTWPLPQPSQHNPRSSYHNITDVCELAVGPAGAPATLLNEAGKDALKSSQTIKSREEGKATQQREVESFHSETDQDTPWLLPQEKTPFGSAKPLDYVEIHKVNKDGALSLLPKQRENSGKPKKPGTPENNKEYAKVSGVMDNNILVLVPDPHAKNVACFEESAKEAPPSLEQNQAEKALANFTATSSKCRLQLGGLDYLDPACFTHSFH

SEQ ID NO: 10828 - protein, 521 aa, Homo sapiens; identical to SEQ ID NO: 10827

SEQ ID NO: 10829 - protein, 217 aa, Homo sapiens
MANLGCWMLVLFVATWSDLGLCKKRPKPGGWNTGGSRYPGQGSPGGNRYPPQGGGGWGQPHGGGWGQPHGGGWGQPHGGGWGQPHGGGWGQGGGTHSQWNKPSKPKTNMKHMAGAAAAGAVVGGLGGYMLGSAMSRPIIHFGSDYEDRYYRENMHRYPNQVYYRPMDEYSNQNNFVHDCVNITIKQHTVTTTTKGENFTETDVKMMERVVEQMCITQ

SEQ ID NO: 10830 - protein, 249 aa, Homo sapiens
MANLGCWMLVLFVATWSDLGLCKKRPKPGGWNTGGSRYPGQGSPGGNRYPPQGGGGWGQPHGGGWGQPHGGGWGQPHGGGWGQPHGGGWGQGGGTHSQWNKPSKPKTNMKHMAGAAAAGAVVGGLGGYMLGSAMSRPIIHFGSDYEDRYYRENMHRYPNQVYYRPMDEYSNQNNFVHDCVNITIKQHTVTTTTKGENFTETDVKMMERVVEQMCITQYERESQAYYQRGSSMVLFSSPPVILLISFLIF

SEQ ID NO: 10831 - protein, 253 aa, Homo sapiens
MANLGCWMLVLFVATWSDLGLCKKRPKPGGWNTGGSRYPGQGSPGGNRYPPQGGGGWGQPHGGGWGQPHGGGWGQPHGGGWGQPHGGGWGQGGGTHSQWNKPSKPKTNMKHMAGAAAAGAVVGGLGGYMLGSAMSRPIIHFGSDYEDRYYRENMHRYPNQVYYRPMDEYSNQNNFVHDCVNITIKQHTVTTTTKGENFTETDVKMMERVVEQMCITQYERESQAYYQRGSSMVLFSSPPVILLISFLIFLIVG

SEQ ID NO: 10832 - protein, 253 aa, Homo sapiens; identical to SEQ ID NO: 10831

SEQ ID NO: 10833 - protein, 94 aa, Homo sapiens
MQHSLVFFFAVILHLSHLLHLDASIHPFRLPFSSKPFLLIPMSNTTLPHTAWPLSFLHQTVSTLKAVAVTHSLWHLQIPVDCQACNRKSKKIYC

SEQ ID NO: 10834 - protein, 116 aa, Homo sapiens
MWQLTSLLLFVATWGISGTPAPLDSVFSSSERAHQVLRIRKRANSFLEELRHSSLERECIEEICDFEEAKEIFQNVDDTLAFWSKHVDGDQCLVLPLEHPCASLCCGHGTCIDGIG

SEQ ID NO: 10835 - protein, 126 aa, Homo sapiens
MWQLTSLLLFVATWGISGTPAPLDSVFSSSERAHQVLRIRKRANSFLEELRHSSLERECIEEICDFEEAKEIFQNVDDTLAFWSKHVDGDQCLVLPLEHPCASLCCGHGTCIDGIGSFSCDCRSGW

SEQ ID NO: 10836 - protein, 175 aa, Homo sapiens
MWQLTSLLLFVATWGISGTPAPLDSVFSSSERAHQVLRIRKRANSFLEELRHSSLERECIEEICDFEEAKEIFQNVDDTLAFWSKHVDGDQCLVLPLEHPCASLCCGHGTCIDGIGSFSCDCRSGWEGRFCQREEVGWRRCSCAPGYKLGDDLLQCHPAVKFPCGRPWKRMEKKR

SEQ ID NO: 10837 - protein, 461 aa, Homo sapiens
MWQLTSLLLFVATWGISGTPAPLDSVFSSSERAHQVLRIRKRANSFLEELRHSSLERECIEEICDFEEAKEIFQNVDDTLAFWSKHVDGDQCLVLPLEHPCASLCCGHGTCIDGIGSFSCDCRSGWEGRFCQREVSFLNCSLDNGGCTHYCLEEVGWRRCSCAPGYKLGDDLLQCHPAVKFPCGRPWKRMEKKRSHLKRDTEDQEDQVDPRLIDGKMTRRGDSPWQVVLLDSKKKLACGAVLIHPSWVLTAAHCMDESKKLLVRLGEYDLRRWEKWELDLDIKEVFVHPNYSKSTTDNDIALLHLAQPATLSQTIVPICLPDSGLAERELNQAGQETLVTGWGYHSSREKEAKRNRTFVLNFIKIPVVPHNECSEVMSNMVSENMLCAGILGDRQDACEGDSGGPMVASFHGTWFLVGLVSWGEGCGLLHNYGVYTKVSRYLDWIHGHIRDKEAPQKSWAP

SEQ ID NO: 10838 - protein, 495 aa, Homo sapiens
MWQLTSLLLFVATWGISGTPAPLDSVFSSSERAHQVLRIRKRANSFLEELRHSSLERECIEEICDFEEAKEIFQNVDDTLAFWSKHVDGDQCLVLPLEHPCASLCCGHGTCIDGIGSFSCDCRSGWEGRFCQRGEGERWMLAGGGAGLGPGWGRGTSTSCPRPPLPAEVSFLNCSLDNGGCTHYCLEEVGWRRCSCAPGYKLGDDLLQCHPAVKFPCGRPWKRMEKKRSHLKRDTEDQEDQVDPRLIDGKMTRRGDSPWQVVLLDSKKKLACGAVLIHPSWVLTAAHCMDESKKLLVRLGEYDLRRWEKWELDLDIKEVFVHPNYSKSTTDNDIALLHLAQPATLSQTIVPICLPDSGLAERELNQAGQETLVTGWGYHSSREKEAKRNRTFVLNFIKIPVVPHNECSEVMSNMVSENMLCAGILGDRQDACEGDSGGPMVASFHGTWFLVGLVSWGEGCGLLHNYGVYTKVSRYLDWIHGHIRDKEAPQKSWAP

SEQ ID NO: 10839 - protein, 52 aa, Homo sapiens
MWQLTSLLLFVATWGISGTPAPLGAADPQTCQLLPGGAPSQQPGAGVHRGDL

SEQ ID NO: 10840 - protein, 52 aa, Homo sapiens; identical to SEQ ID NO: 10839

SEQ ID NO: 10841 - protein, 236 aa, Homo sapiens
  SITE 1: note = misc_feature - Xaa can be any naturally occurring amino acid
XCSLDNGGCTHYCLEEVGWRRCSCAPGYKLGDDLLQCHPAGEYDLRRWEKWELDLDIKEVFVHPNYSKSTTDNDIALLHLAQPATLSQTIVPICLPDSGLAERELNQAGQETLVTGWGYHSSREKEAKRNRTFVLNFIKIPVVPHNECSEVMSNMVSENMLCAGILGDRQDACEGDSGGPMVASFHGTWFLVGLVSWGEGCGLLHNYGVYTKVSRYLDWIHGHIRDKEAPQKSWAP

SEQ ID NO: 10842 - protein, 105 aa, Homo sapiens
MRGATRVSIMLLLVTVSDCAVITGACERDVQCGAGTCCAISLWLRGLRMCTPLGREGEECHPGSHKVPFFRKRKHHTCPCLPNLLCSRFPDGRYRCSMDLKNINF

SEQ ID NO: 10843 - protein, 129 aa, Homo sapiens
MRSLCCAPLLLLLLLPPLLLTPRAGDAAVITGACDKDSQCGGGMCCAVSIWVKSIRICTPMGKLGDSCHPLTRKNNFGNGRQERRKRKRSKRKKEVPFFGRRMHHTCPCLPGLACLRTSFNRFICLAQK

SEQ ID NO: 10844 - protein, 108 aa, Homo sapiens
MRSLCCAPLLLLLLLPPLLLTPRAGDAAVITGACDKDSQCGGGMCCAVSIWVKSIRICTPMGKLGDSCHPLTRKVPFFGRRMHHTCPCLPGLACLRTSFNRFICLAQK

SEQ ID NO: 10845 - protein, 14 aa, Homo sapiens
MALVLGSLLLLGLC

SEQ ID NO: 10846 - protein, 40 aa, Homo sapiens
MALVLGSLLLLGLCGNSFSGGQPSSTDAPKAWNYELPATN

SEQ ID NO: 10847 - protein, 58 aa, Homo sapiens
MALVLGSLLLLGLCGNSFSGGQPSSTDAPKAWNYELPATNYETQDSHKAGPIGILFEL

SEQ ID NO: 10848 - protein, 856 aa, Homo sapiens
MALVLGSLLLLGLCGNSFSGGQPSSTDAPKAWNYELPATNYETQDSHKAGPIGILFELVHIFLYVVQPRDFPEDTLRKFLQKAYESKIDYDKIVYYEAGIILCCVLGLLFIILMPLVGYFFCMCRCCNKCGGEMHQRQKENGPFLRKCFAISLLVICIIISIGIFYGFVANHQVRTRIKRSRKLADSNFKDLRTLLNETPEQIKYILAQYNTTKDKAFTDLNSINSVLGGGILDRLRPNIIPVLDEIKSMATAIKETKEALENMNSTLKSLHQQSTQLSSSLTSVKTSLRSSLNDPLCLVHPSSETCNSIRLSLSQLNSNPELRQLPPVDAELDNVNNVLRTDLDGLVQQGYQSLNDIPDRVQRQTTTVVAGIKRVLNSIGSDIDNVTQRLPIQDILSAFSVYVNNTESYIHRNLPTLEEYDSYWWLGGLVICSLLTLIVIFYYLGLLCGVCGYDRHATPTTRGCVSNTGGVFLMVGVGLSFLFCWILMIIVVLTFVFGANVEKLICEPYTSKELFRVLDTPYLLNEDWEYYLSGKLFNKSKMKLTFEQVYSDCKKNRGTYGTLHLQNSFNISEHLNINEHTGSISSELESLKVNLNIFLLGAAGRKNLQDFAACGIDRMNYDSYLAQTGKSPAGVNLLSFAYDLEAKANSLPPGNLRNSLKRDAQTIKTIHQQRVLPIEQSLSTLYQSVKILQRTGNGLLERVTRILASLDFAQNFITNNTSSVIIEETKKYGRTIIGYFEHYLQWIEFSISEKVASCKPVATALDTAVDVFLCSYIIDPLNLFWFGIGKATVFLLPALIFAVKLAKYYRRMDSEDVYDDVETIPMKNMENGNNGYHKDHVYGIHNPVMTSPSQH

SEQ ID NO: 10849 - protein, 856 aa, Homo sapiens; identical to SEQ ID NO: 10848

SEQ ID NO: 10850 - protein, 865 aa, Homo sapiens
MALVLGSLLLLGLCGNSFSGGQPSSTDAPKAWNYELPATNYETQDSHKAGPIGILFELVHIFLYVVQPRDFPEDTLRKFLQKAYESKIDYDKPETVILGLKIVYYEAGIILCCVLGLLFIILMPLVGYFFCMCRCCNKCGGEMHQRQKENGPFLRKCFAISLLVICIIISIGIFYGFVANHQVRTRIKRSRKLADSNFKDLRTLLNETPEQIKYILAQYNTTKDKAFTDLNSINSVLGGGILDRLRPNIIPVLDEIKSMATAIKETKEALENMNSTLKSLHQQSTQLSSSLTSVKTSLRSSLNDPLCLVHPSSETCNSIRLSLSQLNSNPELRQLPPVDAELDNVNNVLRTDLDGLVQQGYQSLNDIPDRVQRQTTTVVAGIKRVLNSIGSDIDNVTQRLPIQDILSAFSVYVNNTESYIHRNLPTLEEYDSYWWLGGLVICSLLTLIVIFYYLGLLCGVCGYDRHATPTTRGCVSNTGGVFLMVGVGLSFLFCWILMIIVVLTFVFGANVEKLICEPYTSKELFRVLDTPYLLNEDWEYYLSGKLFNKSKMKLTFEQVYSDCKKNRGTYGTLHLQNSFNISEHLNINEHTGSISSELESLKVNLNIFLLGAAGRKNLQDFAACGIDRMNYDSYLAQTGKSPAGVNLLSFAYDLEAKANSLPPGNLRNSLKRDAQTIKTIHQQRVLPIEQSLSTLYQSVKILQRTGNGLLERVTRILASLDFAQNFITNNTSSVIIEETKKYGRTIIGYFEHYLQWIEFSISEKVASCKPVATALDTAVDVFLCSYIIDPLNLFWFGIGKATVFLLPALIFAVKLAKYYRRMDSEDVYDDVETIPMKNMENGNNGYHKDHVYGIHNPVMTSPSQH

SEQ ID NO: 10851 - protein, 865 aa, Homo sapiens; identical to SEQ ID NO: 10850

SEQ ID NO: 10852 - protein, 834 aa, Homo sapiens
MALVLGSLLLLGLCGNSFSGGQPSSTDAPKAWNYELPATNYETQDSHKAGPIGILFELVHIFLYVVQPRDFPEDTLRKFLQKAYESKIDYDKPETVILGLKIVYYEAGIILCCVLGLLFIILMPLVGYFFCMCRCCNKCGGEMHQRQKENGPFLRKCFAISLLVICIIISIGIFYGFVANHQVRTRIKRSRKLADSNFKDLRTLLNETPEQIKYILAQYNTTKDKAFTDLNSINSVLGGGILDRLRPNIIPVLDEIKSMATAIKETKEALENMNSTLKSLHQQSTQLSSSLTSVKTSLRSSLNDPLCLVHPSSETCNSIRLSLSQLNSNPELRQLPPVDAELDNVNNVLRTDLDGLVQQGYQSLNDIPDRVQRQTTTVVAGIKRVLNSIGSDIDNVTQRLPIQDILSAFSVYVNNTESYIHRNLPTLEEYDSYWWLGGLVICSLLTLIVIFYYLGLLCGVCGYDRHATPTTRGCVSNTGGVFLMVGVGLSFLFCWILMIIVVLTFVFGANVEKLICEPYTSKELFRVLDTPYLLNEDWEYYLSGKLFNKSKMKLTFEQVYSDCKKNRGTYGTLHLQNSFNISEHLNINEHTGSISSELESLKVNLNIFLLGAAGRKNLQDFAACGIDRMNYDSYLAQTGKSPAGVNLLSFAYDLEAKANSLPPGNLRNSLKRDAQTIKTIHQQRVLPIEQSLSTLYQSVKILQRTGNGLLERVTRILASLDFAQNFITNNTSSVIIEETKKYGRTIIGYFEHYLQWIEFSISEKVASCKPVATALDTAVDVFLCSYIIDPLNLFWFGIGKATVFLLPALIFAVKLAKYYRRMDSEDVYDDPSQH

SEQ ID NO: 10853 - protein, 842 aa, Homo sapiens
MALVLGSLLLLGLCGNSFSGGQPSSTDAPKAWNYELPATNYETQDSHKAGPIGILFELVHIFLYVVQPRDFPEDTLRKFLQKAYESKIDYDKPETVILGLKIVYYEAGIILCCVLGLLFIILMPLVGYFFCMCRCCNKCGGEMHQRQKENGPFLRKCFAISLLVICIIISIGIFYGFVANHQVRTRIKRSRKLADSNFKDLRTLLNETPEQIKYILAQYNTTKDKAFTDLNSINSVLGGGILDRLRPNIIPVLDEIKSMATAIKETKEALENMNSTLKSLHQQSTQLSSSLTSVKTSLRSSLNDPLCLVHPSSETCNSIRLSLSQLNSNPELRQLPPVDAELDNVNNVLRTDLDGLVQQGYQSLNDIPDRVQRQTTTVVAGIKRVLNSIGSDIDNVTQRLPIQDILSAFSVYVNNTESYIHRNLPTLEEYDSYWWLGGLVICSLLTLIVIFYYLGLLCGVCGYDRHATPTTRGCVSNTGGVFLMVGVGLSFLFCWILMIIVVLTFVFGANVEKLICEPYTSKELFRVLDTPYLLNEDWEYYLSGKLFNKSKMKLTFEQVYSDCKKNRGTYGTLHLQNSFNISEHLNINEHTGSISSELESLKVNLNIFLLGAAGRKNLQDFAACGIDRMNYDSYLAQTGKSPAGVNLLSFAYDLEAKANSLPPGNLRNSLKRDAQTIKTIHQQRVLPIEQSLSTLYQSVKILQRTGNGLLERVTRILASLDFAQNFITNNTSSVIIEETKKYGRTIIGYFEHYLQWIEFSISEKVASCKPVATALDTAVDVFLCSYIIDPLNLFWFGIGKATVFLLPALIFAVKLAKYYRRMDSEDVYDDVETIPMKNPSQH

SEQ ID NO: 10854 - protein, 93 aa, Homo sapiens
  SITE 1: note = misc_feature - Xaa can be any naturally occurring amino acid
XEHYLQWIEFSISEKVASCKPVATALDTAVDVFLCSYIIDPLNLFWFGIGKATVFLLPALIFAVKLAKYYRRMDSEDVYDDVETIPMKNPSQH

SEQ ID NO: 10855 - protein, 54 aa, Homo sapiens
  SITE 1: note = misc_feature - Xaa can be any naturally occurring amino acid
XQDSHKAGPIGILFELVHIFLYVVQPRDFPEDENTKAQIGEACSFKTLQPNESW

SEQ ID NO: 10856 - protein, 65 aa, Homo sapiens
  SITE 1: note = misc_feature - Xaa can be any naturally occurring amino acid
XVDVFLCSYIIDPLNLFWFGIGKATVFLLPALIFAVKLAKYYRRMDSEDVYDDVETIPMKNPSQH

SEQ ID NO: 10857 - protein, 231 aa, Homo sapiens
MRVLGGRCGALLACLLLVLPVSEANFCLYFRNDFIYNRACISVLVGLSGCNFFYSICFLSKQQASQVLVRKRRANSLLEETKQGNLERECIEELCNKEEAREVFENDPETDYFYPKYLVCLRSFQTGLFTAARQSTNAYPDLRSCVNAIPDQCSPLPCNEDGYMSCKDGKASFTCTCKPGWQGEKCEFDINECKDPSNINGGCSQICDNTPGSYHCSCKNGFVMLSNKKDC

SEQ ID NO: 10858 - protein, 676 aa, Homo sapiens
MRVLGGRCGALLACLLLVLPVSEANFLSKQQASQVLVRKRRANSLLEETKQGNLERECIEELCNKEEAREVFENDPETDYFYPKYLVCLRSFQTGLFTAARQSTNAYPDLRSCVNAIPDQCSPLPCNEDGYMSCKDGKASFTCTCKPGWQGEKCEFDINECKDPSNINGGCSQICDNTPGSYHCSCKNGFVMLSNKKDCKDVDECSLKPSICGTAVCKNIPGDFECECPEGYRYNLKSKSCEDIDECSENMCAQLCVNYPGGYTCYCDGKKGFKLAQDQKSCEVVSVCLPLNLDTKYELLYLAEQFAGVVLYLKFRLPEISRFSAEFDFRTYDSEGVILYAESIDHSAWLLIALRGGKIEVQLKNEHTSKITTGGDVINNGLWNMVSVEELEHSISIKIAKEAVMDINKPGPLFKPENGLLETKVYFAGFPRKVESELIKPINPRLDGCIRSWNLMKQGASGIKEIIQEKQNKHCLVTVEKGSYYPGSGIAQFHIDYNNVSSAEGWHVNVTLNIRPSTGTGVMLALVSGNNTVPFAVSLVDSTSEKSQDILLSVENTVIYRIQALSLCSDQQSHLEFRVNRNNLELSTPLKIETISHEDLQRQLAVLDKAMKAKVATYLGGLPDVPFSATPVNAFYNGCMEVNINGVQLDLDEAISKHNDIRAHSCPSVWKKTKNS

SEQ ID NO: 10859 - protein, 56 aa, Homo sapiens
MSCKDGKASFTCTCKPGWQGEKCEFDINECKDPSNINGGCSQICDNTPGSYHCSCK

SEQ ID NO: 10860 - protein, 545 aa, Homo sapiens
MSCKDGKASFTCTCKPGWQGEKCEFDINECKDPSNINGGCSQICDNTPGSYHCSCKNGFVMLSNKKDCKDVDECSLKPSICGTAVCKNIPGDFECECPEGYRYNLKSKSCEDIDECSENMCAQLCVNYPGGYTCYCDGKKGFKLAQDQKSCEVVSVCLPLNLDTKYELLYLAEQFAGVVLYLKFRLPEISRFSAEFDFRTYDSEGVILYAESIDHSAWLLIALRGGKIEVQLKNEHTSKITTGGDVINNGLWNMVSVEELEHSISIKIAKEAVMDINKPGPLFKPENGLLETKVYFAGFPRKVESELIKPINPRLDGCIRSWNLMKQGASGIKEIIQEKQNKHCLVTVEKGSYYPGSGIAQFHIDYNNVSSAEGWHVNVTLNIRPSTGTGVMLALVSGNNTVPFAVSLVDSTSEKSQDILLSVENTVIYRIQALSLCSDQQSHLEFRVNRNNLELSTPLKIETISHEDLQRQLAVLDKAMKAKVATYLGGLPDVPFSATPVNAFYNGCMEVNINGVQLDLDEAISKHNDIRAHSCPSVWKKTKNS

SEQ ID NO: 10861 - protein, 422 aa, Homo sapiens
MAGCVPLLQGLVLVLALHRVEPSATSLKERHGLHSDSACTGVQESLFLPASKANDVLVRWKRAGSYLLEELFEGNLEKECYEEICVYEEAREVFENEVVTDEFWRRYKGGSPCISQPCLHNGSCQDSIWGYTCTCSPGYEGSNCELAKNECHPERTDGCQHFCLPGQESYTCSCAQGYRLGEDHKQCVPHDQCACGVLTSEKRAPDLQDLPWQVKLTNSEGKDFCGGVIIRENFVLTTAKCSLLHRNITVKTYFNRTSQDPLMIKITHVHVHMRYDADAGENDLSLLELEWPIQCPGAGLPVCTPEKDFAEHLLIPRTRGLLSGWARNGTDLGNSLTTRPVTLVEGEECGQVLNVTVTTRTYCERSSVAAMHWMDGSVVTREHRGSWFLTGVLGSQPVGGQAHMVLVTKVSRYSLWFKQIMN

SEQ ID NO: 10862 - protein, 400 aa, Homo sapiens
MAGCVPLLQGLVLVLALHRVEPSVFLPASKANDVLVRWKRAGSYLLEELFEGNLEKECYEEICVYEEAREVFENEVVTDEFWRRYKGGSPCISQPCLHNGSCQDSIWGYTCTCSPGYEGSNCELAKNECHPERTDGCQHFCLPGQESYTCSCAQGYRLGEDHKQCVPHDQCACGVLTSEKRAPDLQDLPWQVKLTNSEGKDFCGGVIIRENFVLTTAKCSLLHRNITVKTYFNRTSQDPLMIKITHVHVHMRYDADAGENDLSLLELEWPIQCPGAGLPVCTPEKDFAEHLLIPRTRGLLSGWARNGTDLGNSLTTRPVTLVEGEECGQVLNVTVTTRTYCERSSVAAMHWMDGSVVTREHRGSWFLTGVLGSQPVGGQAHMVLVTKVSRYSLWFKQIMN

SEQ ID NO: 10863 - protein, 26 aa, Homo sapiens
MKLLLWACIVCVAFARKNAGLGFLWL

SEQ ID NO: 10864 - protein, 219 aa, Homo sapiens
MKLLLWACIVCVAFARKRRFPFIGEDDNDDGHPLHPSLNIPYGIRNLPPPLYYRPVNTVPSYPGNTYTDTGLPSYPWILTSPGFPYVYHIRGFPLATQLNVPPLPPRGFPFVPPSRFFSAAAAPAAPPIAAEPAAAAPLTATPVAAEPAAGAPVAAEPAAEAPVGAEPAAEAPVAAEPAAEAPVGVEPAAEEPSPAEPATAKPAAPEPHPSPSLEQANQ

SEQ ID NO: 10865 - protein, 219 aa, Homo sapiens; identical to SEQ ID NO: 10864

SEQ ID NO: 10866 - protein, 61 aa, Homo sapiens
  SITE 1: note = misc_feature - Xaa can be any naturally occurring amino acid
XAEAPVGAEPAAEAPVAAEPAAEAPVGVEPAAEEPSPAEPATAKPAAPEPHPSPSLEQANQ

SEQ ID NO: 10867 - protein, 65 aa, Homo sapiens
MLLVLLSVVLLALSSAQSTDNDVNYEDFTFTIPACRKHHHSSRGTDQQDIPRSNHSGNLEFSGRK

SEQ ID NO: 10868 - protein, 78 aa, Homo sapiens
MLLVLLSVVLLALSSAQSTDNDVNYEDFTFTIPATTTPTRTPSTLSTPISFCQPAGSIIILPEGQTSKTSPGATTLVI

SEQ ID NO: 10869 - protein, 134 aa, Homo sapiens
MLLVLLSVVLLALSSAQSTDNDVNYEDFTFTIPDVEDSSQRPDQGPQRPPPEGLLPRPPGDSGNQDDGPQQRPPKPGGHHRHPPPPPFQNQQRPPRRGHRQLSLPRFPSVSLQEASSFFQRDRPARHPQEQPLW

SEQ ID NO: 10870 - protein, 98 aa, Homo sapiens
MRGHPSLLLLYMALTTCLDTSPSEETDQEVFLGPPEAQSFLSSHTRIPRANHWDLELLTPGNLERECLEERCSWEEAREYFEDNTLTERFWESYIYNG

SEQ ID NO: 10871 - protein, 202 aa, Homo sapiens
MRGHPSLLLLYMALTTCLDTSPSEETDQEVFLGPPEAQSFLSSHTRIPRANHWDLELLTPGNLERECLEERCSWEEAREYFEDNTLTERFWESYIYNGKGGRGRVDVASLAVGLTGGILLIVLAGLGAFWYLRWRQHRGQQPCPQEAGLISPLSPLNPLGPPTPLPPPPPPPPGLPTYEQALAASGVHDAPPPPYTSLRRPH

SEQ ID NO: 10872 - protein, 96 aa, Homo sapiens
MRGHPSLLLLYMALTTCLDTSPSEETDQVLPLPGVQDPAPSSFRPRNLDSQPLLLPPGPHCFPSPYDSSPRDPPFFCPSCLWVQKSSWVPQRPRAS

SEQ ID NO: 10873 - protein, 981 aa, Homo sapiens
MASSPWGCVCGLLLLLLPLLGTGPALGRGFPRPLENSEIPMIPGAHPKGSVGSEPQAFDVFPENPRADSHRNSDVRHAPAEEMPEKPVASPLGPALYGPKAAQGAQRERLPVTDDLQMAQGPSSHGWTGPLDSQELLQQEAVAPHPVGHPHLTFIPTTPRRQLRVATVPPSLQHEGQEGQWPPRDEGLKAKTKSRVPPTSPSDHQGPPHTLVSHSGTVKRPVLEGQGGFEEHLQEAAQGPHFTQQDPAAPDVGSVPPVEVVYSQEPGAQPDLALARSLPPAEELPVETPKRAGAEVSWEVSSPGPPPKQADLPDAKDSPGPQPTDPPASEAPDRPSKPERAAMNGADPISPQRVRGAVEAPGTPKSLIPGPSDPGPAVNRTESPMGALQPDEAEEWPGRPQSHPPAPPVQAPSTSRRGLIRVTTQRALGQPPPPEPTASSMASAPASSPPANATAPPLRWGPLRRVLSFSWELHVYGVGVLFLLPALLALAALAAAPAGPRLALVAAVLVLVASALRSAYMLTDPYGSQARLGVRGGLVLYNLPFPLLLTALAALTLLGLGAGLPPPLQNPLLLGAVALVHGVGLLATDLLSTWSVLNLLTQGLSCAWGAAVALGTLCLCRRRLLDGPRGWDASPGPRLLAVAGALGLLASGLQLAAALWLYPGPGRVGRFSWAWWGVHFWLRLLELTWALALALAAVAAARPRPPTEHACWAKLMRLACPAPSGKSEVPERPNNCYAGPSNVGAGSLDISKSLIRNPAESGQLATPSSGAWGSAASLGRGPQGGPGLSRNGVGPAPSLSELDLRPPSPINLSRSIDAALFREHLVRDSVFQRCGLRGLASPPPGGALRPRRGSHPKAELDDAGSSLLRGRCRSLSDVRVRGPVPQHVVEAPDGAAAAASGSSLDSFSRGSLKISWNPWRHGLSSVDSLPLDELPSTVQLLPAPTPAPDSTAARQGDGQGEVQPRGKPGESRSASSDTIEL

SEQ ID NO: 10874 - protein, 981 aa, Homo sapiens; identical to SEQ ID NO: 10873

SEQ ID NO: 10875 - protein, 421 aa, Homo sapiens
MASSPWGCVCGLLLLLLPLLGTGPALGRGFPRPLENSEIPMIPGAHPKGSVGSEPQAFDVFPENPRADSHRNSDVRHAPAEEMPEKPVASPLGPALYGPKAAQGAQRERLPVTDDLQMAQGPSSHGWTGPLDSQELLQQEAVAPHPVGHPHLTFIPTTPRRQLRVATVPPSLQHEGQEGQWPPRDEGLKAKTKSRVPPTSPSDHQGPPHTLVSHSGTVKRPVLEGQGGFEEHLQEAAQGPHFTQQDPAAPDVGSVPPVEVVYSQEPGAQPDLALARSLPPAEELPVETPKRAGAEVSWEVSSPGPPPKQADLPDAKDSPGPQPTDPPASEAPDRPSKPERAAMNGADPISPQRVRGAVEAPGTPKSLIPGPSDPGPAVNRTESPMGALQPGESMAGVWGEGVLCLVTENLCWGCMGAEGGE

SEQ ID NO: 10876 - protein, 205 aa, Homo sapiens
MARHGCLGLGLFCCVLFAATVGPQPTPSIPGAPATTLTPVPQSEASMLSLNLGLNFKFHLRGPAAVWGSPVTETQPLSLGPGQEPGEEVASGLRTDPLWELLVGSSGNSLTEWGSTEGGSKPRASSLLPESTSRRSGPSDGPTAPYQPRRSTVTWDTALMVTALPSSAPRPHQSELELKFDMALRAGAAPTLGHRTLPLLPSLRA

SEQ ID NO: 10877 - protein, 208 aa, Homo sapiens
MARHGCLGLGLFCCVLFAATVGPQPTPSIPGAPATTLTPVPQSEASMLSLNLGLNFKFHLRGPAAVWGSPVTETQPLSLGPGQEPGEEVASGLRTDPLWELLVGSSGNSLTEWGSTEGGSKPRASSLLPESTSRRSGPSDGPTAPYQPRRSTVTWDTALMVTALPSSAPRPHQSELELKFDMALRAGAAPTLGHRTLPLLPSLRASLA

SEQ ID NO: 10878 - protein, 899 aa, Homo sapiens
MARHGCLGLGLFCCVLFAATVGPQPTPSIPGAPATTLTPVPQSEASMLSLNLGLNFKFHLRGPAAVWGSPVTETQPLSLGPGQEPGEEVASGLRTDPLWELLVGSSGNSLTEWGSTEGGSKPRASSLLPESTSRRSGPSDGPTAPYQPRRSTVTWDTALMVTALPSSAPRPHQSELELKFDMALRAGAAPTLGHRTLPLLPSLRASLAEIAGRLGPFGFFGTTLSPLRNFSGLSPPGETTSTSSASGVSGSLGFLGTTLSLPPYSLERKLSSPSPLDPAASLSFASIATTSLDPTVPISGPDDLSPPASLGNPSGQPECGPGSCSVGELPEREGQPPEAPRPLFFLTLEADWAEARARWGLAWEAHVYGVGALFGLVALLALLALALLPWRCPPGAPCLALLDLLLLSAGTTRAFPLFYDAYGHRDRLPALAWLLLQDLPLPCLAAGLGLACLLLARPRPPRCPTGLAALLLLGLGLAAAAALGSAAHRPLRPLRLASRGLHAFLAAFLSGLLLALSCWGGRRRRAGAPLGGSGFKGATPLPQGRSPFAPRESWRRAARTAPVAGTFGLLSGALQGYEVLHALGYGGQSGLEGPWPWWAFQLGLRLGEVGVALPLALLGLYPALCSPRVPPRCWAKLFRLSPGHAAPLLPGGWVTGPPDKEPLGSAIARGDAELLQLCALAGPGPDLLLQGGGCRGFEGAAANPAPSPASSPCSDYTVDFRPPSPINLRRSIEEALCSEALLAPGLFQGPAFEDALPGLGLYRTASLGTGGRASERSGEASGPAAPPELPSPGAWPAGSSVSSGSFCGLSRDSSSMLLCSSPDRPPRCPLVCVLSPPRPSGSSPSLPASGSYQALSPPSRDSPEPASELQAEEALLQEQFLDACRQIDELSVGSDTIDL

SEQ ID NO: 10879 - protein, 899 aa, Homo sapiens; identical to SEQ ID NO: 10878

SEQ ID NO: 10880 - protein, 480 aa, Homo sapiens
MARHGCLGLGLFCCVLFAATVGPQPTPSIPGAPATTLTPVPQSEASMLSLNLGLNFKFHLRGPAAVWGSPVTETQPLSLGPGQEPGEEVASGLRTDPLWELLVGSSGNSLTEWGSTEGGSKPRASSLLPESTSRRSGPSDGPTAPYQPRRSTVTWDTALMVTALPSSAPRPHQSELELKFDMALRAGAAPTLGHRTLPLLPSLRASLAEIAGRLGPFGFFGTTLSPLRNFSGLSPPGETTSTSSASGVSGSLGFLGTTLSLPPYSLERKLSSPSPLDPAASLSFASIATTSLDPTVPISGPDDLSPPASLGNPSGQPECGPGSCSVGELPEREGQPPEAPRPLFFLTLEADWAEARARWGLAWEAHVYGVGALFGLVALLALLALALLPWRCPPGAPCLALLDLLLLSAGTTRAFPLFYDAYGHRDRLPALAWLLLQDLPLPCLAAGLGLACLLLARPRPPRCPTGLAALLLLGLGLAAA

SEQ ID NO: 10881 - protein, 429 aa, Homo sapiens
MARHGCLGLGLFCCVLFAATVGPQPTPSIPGAPATTLTPVPQSEASMLSLNLGLNFKFHLRGPAAVWGSPVTETQPLSLGPGQEPGEEVASGLRTDPLWELLVGSSGNSLTEWGSTEGGSKPRASSLLPESTSRRSGPSDGPTAPYQPRRSTVTWDTALMVTALPSSAPRPHQSELELKFDMALRAGAAPTLGHRTLPLLPSLRASLAEIAGRLGPFGFFGTTLSPLRNFSGLSPPGETTSTSSASGVSGSLGFLGTTLSLPPYSLERKLSSPSPLDPAASLSFASIATTSLDPTVPISGPDDLSPPASLGNPSGQPECGPGSCSVGELPEREGQPPEAPRPLFFLTLEADWAEARARWGLAWEAHVYGRLHRGLPPALPNQPATQHRGGPLQRGPACAWPLPGPCLRGRSAWARTLPHRLAGDRGQGQ

SEQ ID NO: 10882 - protein, 419 aa, Homo sapiens
  SITE 1: note = misc_feature - Xaa can be any naturally occurring amino acid
XSKPRASSLLPESTSRRSGPSDGPTAPYQPRRSTVTWDTALMVTALPSSAPRPHQSELELKFDMALRAGAAPTLGHRTLPLLPSLRASLAEIAGRLGPFGFFGTTLSPLRNFSGLSPPGETTSTSSASGVSGSLGFLGTTLSLPPYSLERKLSSPILACRRAAGPSSSACPRATRLRCCREAGSLGPQTRSPWGAPSLAGTRSCCSCARWQGQAQTSYSRAEVAGASKARRPTRPRPRLPLPAAITPWTSARPPQSTCDAASRRPSAARPCLRLASSRALPSRTLCLGSDSTAPPRWGPGAGPVRDQGRPLAPLRPRSSPPLGLGPQAAASHLARSADSRGTARPCCCVPAPTGPRAALWSASSVPRGPQEAAPASRPQDPTRPCPHPLATPQSLLLSCRPRRPCCRSSSWTPADRSTS

SEQ ID NO: 10883 - protein, 261 aa, Homo sapiens
MNPLLILTFVAAALAAPFDDDDKIVGGYNCEENSVPYQVSLNSGYHFCGGSLINEQWVVSAGHCYKSAIKSKFSGRGCEYHRIQVRLGEHNIEVLEGNEQFINAAKIIRHPQYDRKTLNNDIMLIKLSSRAVINARVSTISLPTAPPATGTKCLISGWGNTASSGADYPDELQCLDAPVLSQAKCEASYPGKITSNMFCVGFLEGGKDSCQGDSGGPVVCNGQLQGVVSWGDGCAQKNKPGVYTKVYNYVKWIKNTIAANS

SEQ ID NO: 10884 - protein, 247 aa, Homo sapiens
MNPLLILTFVAAALAAPFDDDDKIVGGYNCEENSVPYQVSLNSGYHFCGGSLINEQWVVSAGHCYKSRIQVRLGEHNIEVLEGNEQFINAAKIIRHPQYDRKTLNNDIMLIKLSSRAVINARVSTISLPTAPPATGTKCLISGWGNTASSGADYPDELQCLDAPVLSQAKCEASYPGKITSNMFCVGFLEGGKDSCQGDSGGPVVCNGQLQGVVSWGDGCAQKNKPGVYTKVYNYVKWIKNTIAANS

SEQ ID NO: 10885 - protein, 237 aa, Homo sapiens
MNPLLILTFVAAALAAPFDDDDKIVGGYNCEENSVPYQVSLNSGYHFCGGSLINEQWVVSAGHCYKSRIQVRLGEHNINAAKIIRHPQYDRKTLNNDIMLIKLSSRAVINARVSTISLPTAPPATGTKCLISGWGNTASSGADYPDELQCLDAPVLSQAKCEASYPGKITSNMFCVGFLEGGKDSCQGDSGGPVVCNGQLQGVVSWGDGCAQKNKPGVYTKVYNYVKWIKNTIAANS

SEQ ID NO: 10886 - protein, 142 aa, Homo sapiens
SLINEQWVVSAGHCYKSRIQVRLGEHNIEVLEGNEQFINAAKIIRHPQYDRKTLNNDIMLIKLSSRAVINARVSTISLPTAPPATGTKCLISGWGNTASSGADYPDELQCLDAPVLSQAKCEASYPGKITSNMFCVGFLEGG

SEQ ID NO: 10887 - protein, 875 aa, Homo sapiens
MTLARFVLALMLGALPEVVGFDSVLNDSLHHSHRHSPPAGPHYPYYLPTQQRPPRTRPPPPLPRFPRPPRALPAQRPHALQAGHTPRPHPWGCPAGEPWVSVTDFGAPCLRWAEVPPFLERSPPASWAQLRGQRHNFCRSPDGAGRPWCFYGDARGKVDWGYCDCRHGSVRLRGGKNEFEGTVEVYASGVWGTVCSSHWDDSDASVICHQLQLGGKGIAKQTPFSGLGLIPIYWSNVRCRGDEENILLCEKDIWQGGVCPQKMAAAVTCSFSHGPTFPIIRLAGGSSVHEGRVELYHAGQWGTVCDDQWDDADAEVICRQLGLSGIAKAWHQAYFGEGSGPVMLDEVRCTGNELSIEQCPKSSWGEHNCGHKEDAGVSCTPLTDGVIRLAGGKGSHEGRLEVYYRGQWGTVCDDGWTELNTYVVCRQLGFKYGKQASANHFEESTGPIWLDDVSCSGKETRFLQCSRRQWGRHDCSHREDVSIACYPGGEGHRLSLGFPVRLMDGENKKEGRVEVFINGQWGTICDDGWTDKDAAVICRQLGYKGPARARTMAYFGEGKGPIHVDNVKCTGNERSLADCIKQDIGRHNCRHSEDAGVICDYFGKKASGNSNKESLSSVCGLRLLHRRQKRIIGGKNSLRGGWPWQVSLRLKSSHGDGRLLCGATLLSSCWVLTAAHCFKRYGNSTRSYAVRVGDYHTLVPEEFEEEIGVQQIVIHREYRPDRSDYDIALVRLQGPEEQCARFSSHVLPACLPLWRERPQKTASNCYITGWGDTGRAYSRTLQQAAIPLLPKRFCEERYKGRFTGRMLCAGNLHEHKRVDSCQGDSGGPLMCERPGESWVVYGVTSWGYGCGVKDSPGVYTKVSAFVPWIKSVTKL

SEQ ID NO: 10888 - protein, 92 aa, Homo sapiens
MAVWLAQWLGPLLLVSLWGLLAPASLLRRLGEHIQQFQESSAQGLGLSLGPGAAALPKVGWLEQLLDPFNVSDRRSFLQAIPQPWPQPGAPW

SEQ ID NO: 10889 - protein, 257 aa, Homo sapiens
MAVWLAQWLGPLLLVSLWGLLAPASLLRRLGEHIQQFQESSAQGLGLSLGPGAAALPKVGWLEQLLDPFNVSDRRSFLQIVLHSLGQKCLSFSRAETVAQLRSTEPQLSGVGDRQWLYQTCTEFGFYVTCENPRCPFSQLPALPSQLDLCEQVFGLSALSVAQAVAQTNSYYGGQTPGANKVLFVNGDTDPWHVLSVTQALGSSESTLLIRTGSHCLDMAPERPSDSPSLRLGRQNIFQQLQTWLKLAKESQIKGEV

SEQ ID NO: 10890 - protein, 99 aa, Homo sapiens
MAVWLAQWLGPLLLVSLWGLLAPASLLRRLGEHIQQFQESSAQGLGLSLGPGAAALPKVGWLEQLLDPFNVSDRRSFLQMSPVRIPDVLSPSSQHCPPS

SEQ ID NO: 10891 - protein, 145 aa, Homo sapiens
MAVWLAQWLGPLLLVSLWGLLAPASLLRRLGEHIQQFQESSAQGLGLSLGPGAAALPKVGWLEQLLDPFNVSDRRSFLQRYWVNDQHWVGQDGPIFLHLGGEGSLGPGSVMRDCLAQPGPEVFKLFPSRDSGTAEEHRTSTVWCG

SEQ ID NO: 10892 - protein, 514 aa, Homo sapiens
MAVWLAQWLGPLLLVSLWGLLAPASLLRRLGEHIQQFQESSAQGLGLSLGPGAAALPKVGWLEQLLDPFNVSDRRSFLQRYWVNDQHWVGQDGPIFLHLGGEGSLGPGSVMRGHPAALAPAWGALVISLEHRFYGLSIPAGGLEMAQLRFLSSRLALADVVSARLALSRLFNISSSSPWICFGGSYAGSLAAWARLKFPHLIFASVASSAPVRAVLDFSEYNDVVSRSLMSTAIGGSLECRAAVSVAFAEVERRLRSGGAAQAALRTELSACGPLGRAENQAELLGALQALVGGVVQYDGQTGAPLSVRQLCGLLLGGGGNRSHSTPYCGLRRAVQIVLHSLGQKCLSFSRAETVAQLRSTEPQLSGVGDRQWLYQTCTEFGFYVTCENPRCPFSQLPALPSQLDLCEQVFGLSALSVAQAVAQTNSYYGGQTPGANKVLFVNGDTDPWHVLSVTQALGSSESTLLIRTGSHCLDMAPERPSDSPSLRLGRQNIFQQLQTWLKLAKESQIKGEV

SEQ ID NO: 10893 - protein, 166 aa, Homo sapiens
MAVWLAQWLGPLLLVSLWGLLAPASLLRRLGEHIQQFQESSAQGLGLSLGPGAAALPKVGWLEQLLDPFNVSDRRSFLQRYWVNDQHWVGQDGPIFLHLGGEGSLGPGSVMRGHPAALAPAWGALVISLEHRFYGLSIPAGGLEMAQLRFLSSRLALSCTAWARSV

SEQ ID NO: 10894 - protein, 165 aa, Homo sapiens
  SITE 1: note = misc_feature - Xaa can be any naturally occurring amino acid
XVMRGHPAALAPAWGALVISLEHRFYGLSIPAGGLEMAQLRFLSSRLALADVVSARLALSRLFNISSSSPWICFGGSYAGSLAAWARLKFPHLIFASVASSAPVRAVLDFSEYNDIVLHSLGQKCLSFSRAETVAQLRSTEPQLSGVGDRQWLYQTCTEFGFYVT

SEQ ID NO: 10895 - protein, 139 aa, Homo sapiens
  SITE 1: note = misc_feature - Xaa can be any naturally occurring amino acid
XVMRGHPAALAPAWGALVISLEHRFYGLSIPAGGLEMAQLRFLSSRLALADVVSARLALSRLFNISSSSPWICFGGSYAGSLAAWARLKIVLHSLGQKCLSFSRAETVAQLRSTEPQLSGVGDRQWLYQTCTEFGFYVT

SEQ ID NO: 10896 - protein, 246 aa, Homo sapiens
MNLLLILTFVAAAVAAPFDDDDKIVGGYICEENSVPYQVSLNSGYHFCGGSLISEQWVVSAGHCYKSAINSKLSGRGCEYHRIQVRLGEHNIEVLEGNEQFINAAKIIRHPKYNSRTLDNDILLIKLSSPAVINSRESLISGWGNTLSSGADYPDELQCLDAPVLSQAECEASYPGKITNNMFCVGFLEGGKDSCQGDSGGPVVSNGELQGIVSWGYGCAQKNRPGVYTKVYNYVDWIKDTIAANS

SEQ ID NO: 10897 - protein, 261 aa, Homo sapiens
MNLLLILTFVAAAVAAPFDDDDKIVGGYICEENSVPYQVSLNSGYHFCGGSLISEQWVVSAGHCYKSAINSKLSGRGCEYHRIQVRLGEHNIEVLEGNEQFINAAKIIRHPKYNSRTLDNDILLIKLSSPAVINSRVSAISLPTAPPAAGTESLISGWGNTLSSGADYPDELQCLDAPVLSQAECEASYPGKITNNMFCVGFLEGGKDSCQGDSGGPVVSNGELQGIVSWGYGCAQKNRPGVYTKVYNYVDWIKDTIAANS

SEQ ID NO: 10898 - protein, 247 aa, Homo sapiens
MNLLLILTFVAAAVAAPFDDDDKIVGGYICEENSVPYQVSLNSGYHFCGGSLISEQWVVSAGHCYKSRIQVRLGEHNIEVLEGNEQFINAAKIIRHPKYNSRTLDNDILLIKLSSPAVINSRVSAISLPTAPPAAGTESLISGWGNTLSSGADYPDELQCLDAPVLSQAECEASYPGKITNNMFCVGFLEGGKDSCQGDSGGPVVSNGELQGIVSWGYGCAQKNRPGVYTKVYNYVDWIKDTIAANS

SEQ ID NO: 10899 - protein, 247 aa, Homo sapiens
MNPLLILAFVGAAVAAPFDDDDKIVGGYICEENSVPYQVSLNSGYHFCGGSLISEQWVVSAGHCYKSRIQVRLGEHNIEVLEGNEQFINAAKIIRHPKYNSRTLDNDILLIKLSSPAVINSRVSAISLPTAPPAAGTESLISGWGNTLSSGADYPDELQCLDAPVLSQAECEASYPGKITNNMFCVGFLEGGKDSCQGDSGGPVVSNGELQGIVSWGYGCAQKNRPGVYTKVYNYVDWIKDTIAANS

SEQ ID NO: 10900 - protein, 81 aa, Homo sapiens
ARGAAAGAAAGSGWTQEAGVAGGGAVIRTMRPTGHHVAHRGWRGRRTRALAVAGEPAPVGFPRMRSEPAQPPLGTHGGALL

SEQ ID NO: 10901 - protein, 300 aa, Homo sapiens
MGARGALLLALLLARAGLRKPESQEAAPLSGPCGRRVITSRIVGGEDAELGRWPWQGSLRLWDSHVCGVSLLSHRWALTAAHCFETYSDLSDPSGWMVQFGQLTSMPSFWSLQAYYTRYFVSNIYLSPRYLGNSPYDIALVKLSAPVTYTKHIQPICLQASTFEFENRTDCWVTGWGYIKEDEALPSPHTLQEVQVAIINNSMCNHLFLKYSFRKDIFGDMGDSGGPLACNKNGLWYQIGVVSWGVGCGRPNRPGVYTNISHHFEWIQKLMAQSGMSQPDPSWPLLFFPLLWALPLLGPV

SEQ ID NO: 10902 - protein, 314 aa, Homo sapiens
MGARGALLLALLLARAGLRKPESQEAAPLSGPCGRRVITSRIVGGEDAELGRWPWQGSLRLWDSHVCGVSLLSHRWALTAAHCFETYSDLSDPSGWMVQFGQLTSMPSFWSLQAYYTRYFVSNIYLSPRYLGNSPYDIALVKLSAPVTYTKHIQPICLQASTFEFENRTDCWVTGWGYIKEDEALPSPHTLQEVQVAIINNSMCNHLFLKYSFRKDIFGDMVCAGNAQGGKDACFGDSGGPLACNKNGLWYQIGVVSWGVGCGRPNRPGVYTNISHHFEWIQKLMAQSGMSQPDPSWPLLFFPLLWALPLLGPV

SEQ ID NO: 10903 - protein, 218 aa, Homo sapiens
  SITE 1: note = misc_feature - Xaa can be any naturally occurring amino acid
XLALLLARAGLRKPESQEAAPLSGPCGRRVITSRIVGGEDAELGRWPWQGSLRLWDSHVCGVSLLSHRWALTAAHCFETDLSDPSGWMVQFGQLTSMPSFWSLQAYYTRYFVSNIYLSPRYLGNSPYDIALVKLSAPVTYTKHIQPICLQASTFEFENRTDCWVTGWGYIKEDEGSSGRHHKQLYVQPPLPQVQFPQGHLWRHGLCWQCPRREGCLLR

SEQ ID NO: 10904 - protein, 81 aa, Homo sapiens
  SITE 1: note = misc_feature - Xaa can be any naturally occurring amino acid
XRGAAAGAAAGSGWTQEAGVAGGGAVIRTMRPTGHHVAHRGWRGRRTRALAVAGEPAPVGFPRMRSEPAQPPLGTHGGALL

SEQ ID NO: 10905 - protein, 256 aa, Homo sapiens
  SITE 1: note = misc_feature - Xaa can be any naturally occurring amino acid
XSLRLWDSHVCGVSLLSHRWALTAAHCFETDLSDPSGWMVQFGQLTSMPSFWSLQAYYTRYFVSNIYLSPRYLGNSPYDIALVKLSAPVTYTKHIQPICLQASTFEFENRTDCWVTGWGYIKEDEALPSPHTLQEVQVAIINNSMCNHLFLKYSFRKDIFGDMVCAGNAQGGKDACFGDSGGPLACNKNGLWYQIGVVSWGVGCGRPNRPGVYTNISHHFEWIQKLMAQSGMSQPDPSWPLLFFPLLWALPLLGPV

SEQ ID NO: 10906 - protein, 317 aa, Homo sapiens
MVVSGAPPALGGGCLGTFTSLLLLASTAILNAARIPVPPACGKPQQLNRVVGGEDSTDSEWPWIVSIQKNGTHHCAGSLLTSRWVITAAHCFKDNLNKPYLFSVLLGAWQLGNPGSRSQKVGVAWVEPHPVYSWKEGACADIALVRLERSIQFSERVLPICLPDASIHLPPNTHCWISGWGSIQDGVPLPHPQTLQKLKVPIIDSEVCSHLYWRGAGQGPITEDMLCAGYLEGERDACLGDSGGPLMCQVDGAWLLAGIISWGEGCAERNRPGVYISLSAHRSWVEKIVQGVQLRGRAQGGGALRAPSQGSGAAARS

SEQ ID NO: 10907 - protein, 207 aa, Homo sapiens
MVVSGAPPALGGGCLGTFTSLLLLASTAILNAARIPVPPACGKPQQLNRVVGGEDSTDSEWPWIVSIQKNGTHHCAVPLPHPQTLQKLKVPIIDSEVCSHLYWRGAGQGPITEDMLCAGYLEGERDACLGDSGGPLMCQVDGAWLLAGIISWGEGCAERNRPGVYISLSAHRSWVEKIVQGVQLRGRAQGGGALRAPSQGSGAAARS

SEQ ID NO: 10908 - protein, 116 aa, Homo sapiens
  SITE 1: note = misc_feature - Xaa can be any naturally occurring amino acid
XLLSASALFISCSLTALCLGFFYGCEDETENAASTQRASVSSYRRRRHRLLPLASVFSHLLVLRCLPLGKHRFVLFLPQEVRGGHTSGSSVQSRGAQPSSMRPGYLFPQPVGSPSS

SEQ ID NO: 10909 - protein, 154 aa, Homo sapiens
MAGIPGLLFLLFFLLCAVGQVSPYSAPWKPTWPAYRLPVVLPQSTLNLAKPDFGAEAKLEVSSSCGPQCHKGTPLPTYEEAKQYLSYETLYANGSRTETQVGIYILSSSGDGAQHRDSGSSGKSRRKRQIYGYDSRFSIFGKDFLLNYPFSTSV

SEQ ID NO: 10910 - protein, 383 aa, Homo sapiens
MAGIPGLLFLLFFLLCAVGQVSPYSAPWKPTWPAYRLPVVLPQSTLNLAKPDFGAEAKLEVSSSCGPQCHKGTPLPTYEEAKQYLSYETLYANGSRTETQVGIYILSSSGDGAQHRDSGSSGKSRRKRQIYGYDSRFSIFGKDFLLNYPFSTSVKLSTGCTGTLVAEKHVLTAAHCIHDGKTYVKGTQKLRVGFLKPKFKDGGRGANDSTSAMPEQMKFQWIRVKRTHVPKGWIKGNANDIGMDYDYALLELKKPHKRKFMKIGVSPPAKQLPGGRIHFSGYDNDRPGNLVYRFCDVKDETYDLLYQQCDAQPGASGSGVYVRMWKRQQQKWERKIIGIFSGHQWVDMNGSPQDFNVAVRITPLKYAQICYWIKGNYLDCREG

SEQ ID NO: 10911 - protein, 82 aa, Homo sapiens
MSRMRPVCQPWPSPHAPTTVKREGSTVSNSIQPPPPEYQLGSRTWLEAETPGQKRQCSAFMEFTEESRRASHFSSILKIEPV

SEQ ID NO: 10912 - protein, 91 aa, Homo sapiens
MSRMRPVCQPWPSPHAPTTVKREGSTVSNSIQPPPPEYQLGSRTWLEAETPGQKRQCSAFMEFTEESRRIHQSVGTLLPRVKSFGRPNPHA

SEQ ID NO: 10913 - protein, 290 aa, Homo sapiens
MRRPAAVPLLLLLCFGSQRAKAATACGRPRMLNRMVGGQDTQEGEWPWQVSIQRNGSHFCGGSLIAEQWVLTAAHCFRNTSETSLYQVLLGARQLVQPGPHAMYARVRQVESNPLYQGTASSADVALVELEAPVPFTNYILPVCLPDPSVIFETGMNCWVTGWGSPSEEDLLPEPRILQKLAVPIIDTPKCNLLYSKDTEFGYQPKTIKNDMLCAGFEEGKKDACKGDSGGPLVCLVGQSWLQAGVISWGEGCARQNRPGVYIRVTAHHNWIHRIIPKLQFQPARLGGQK

SEQ ID NO: 10914 - protein, 40 aa, Homo sapiens
MRRPAAVPLLLLLCFGSQRAKAATAPLRRPCTRSCWGQGS

SEQ ID NO: 10915 - protein, 40 aa, Homo sapiens; identical to SEQ ID NO: 10914

SEQ ID NO: 10916 - protein, 304 aa, Homo sapiens
MCGPDDRCPARWPGPGRAVKCGKGLAAARPGRVERGGAQRGGAGLELHPLLGGRTWRAARDADGCEALGTVAVPFDDDDKIVGGYTCEENSLPYQVSLNSGSHFCGGSLISEQWVVSAAHCYKTRIQVRLGEHNIKVLEGNEQFINAAKIIRHPKYNRDTLDNDIMLIKLSSPAVINARVSTISLPTTPPAAGTECLISGWGNTLSFGADYPDELKCLDAPVLTQAECKASYPGKITNSMFCVGFLEGGKDSCQRDSGGPVVCNGQLQGVVSWGHGCAWKNRPGVYTKVYNYVDWIKDTIAANS

SEQ ID NO: 10917 - protein, 240 aa, Homo sapiens
MGPAGEVAVPFDDDDKIVGGYTCEENSLPYQVSLNSGSHFCGGSLISEQWVVSAAHCYKTRIQVRLGEHNIKVLEGNEQFINAAKIIRHPKYNRDTLDNDIMLIKLSSPAVINARVSTISLPTTPPAAGTECLISGWGNTLSFGADYPDELKCLDAPVLTQAECKASYPGKITNSMFCVGFLEGGKDSCQRDSGGPVVCNGQLQGVVSWGHGCAWKNRPGVYTKVYNYVDWIKDTIAANS

SEQ ID NO: 10918 - protein, 261 aa, Homo sapiens
MHMRETSGFTLKKGRSAPLVFHPPDALIAVPFDDDDKIVGGYTCEENSLPYQVSLNSGSHFCGGSLISEQWVVSAAHCYKTRIQVRLGEHNIKVLEGNEQFINAAKIIRHPKYNRDTLDNDIMLIKLSSPAVINARVSTISLPTTPPAAGTECLISGWGNTLSFGADYPDELKCLDAPVLTQAECKASYPGKITNSMFCVGFLEGGKDSCQRDSGGPVVCNGQLQGVVSWGHGCAWKNRPGVYTKVYNYVDWIKDTIAANS

SEQ ID NO: 10919 - protein, 247 aa, Homo sapiens
MNPFLILAFVGAAVAVPFDDDDKIVGGYTCEENSLPYQVSLNSGSHFCGGSLISEQWVVSAAHCYKTRIQVRLGEHNIKVLEGNEQFINAAKIIRHPKYNRDTLDNDIMLIKLSSPAVINARVSTISLPTTPPAAGTECLISGWGNTLSFGADYPDELKCLDAPVLTQAECKASYPGKITNSMFCVGFLEGGKDSCQRDSGGPVVCNGQLQGVVSWGHGCAWKNRPGVYTKVYNYVDWIKDTIAANS

SEQ ID NO: 10920 - protein, 178 aa, Homo sapiens
MRETSGFTLKKGRSAPLVFHPPDALIAVPFDDDDKIVGGYTCEENSLPYQVSLNSGSHFCGGSLISEQWVVSAAHCYKTRIQVRLGEHNIKVLEGNEQFINAAKIIRHPKYNRDTLDNDIMLIKLSSPAVINARVSTISLPTTPPAAGTECLISGWGNTLSFGADYPDELKCLDAPVL

SEQ ID NO: 10921 - protein, 236 aa, Homo sapiens
MRGVSCLQVLLLLVLACGQPRMSSRIVGGRDGRDGEWPWQASIQHRGAHVCGGSLIAPQWVLTAAHCFPRRALPAEYRVRLGALRLGSTSPRTLSVPVRRVLLPPDYSEDGARGDLALLQLRRPVPLSARVQPVCLPVPGARPPPGTPCRVTGWGSLRPGVPLPEWRPLQGVRVPLLDSRTCDGLYHVGADVPQAERIVLPGSLCAGYPQGHKDACQVCTQPPQPPESPPCAQHPP

SEQ ID NO: 10922 - protein, 280 aa, Homo sapiens
MRGVSCLQVLLLLVLGAAGTQGRKSAACGQPRMSSRIVGGRDGRDGEWPWQASIQHRGAHVCGGSLIAPQWVLTAAHCFPRRALPAEYRVRLGALRLGSTSPRTLSVPVRRVLLPPDYSEDGARGDLALLQLRRPVPLSARVQPVCLPVPGARPPPGTPCRVTGWGSLRPGVPLPEWRPLQGVRVPLLDSRTCDGLYHVGADVPQAERIVLPGSLCAGYPQGHKDACQGDSGGPLTCLQSGSWVLVGVVSWGKGCALPNRPGVYTSVATYSPWIQARVSF

SEQ ID NO: 10923 - protein, 280 aa, Homo sapiens; identical to SEQ ID NO: 10922

SEQ ID NO: 10924 - protein, 115 aa, Homo sapiens
MRGVSCLQVLLLLVLGAAGTQGRKSAACGQPRMSSRIVGGRDGRDGEWPWQASIQHRGAHVCGGSLIAPQWVLTAAHCFPSAPPRVATATRSKGAAAGLAHLRRPLPRGRGRAPG

SEQ ID NO: 10925 - protein, 413 aa, Homo sapiens
MENMLLWLIFFTPGWTLIDGSEMEWDFMWHLRKVPRIVSERTFHLTSPAFEADAKMMVNTVCGIECQKELPTPSLSELEDYLSYETVFENGTRTLTRVKVQDLVLEPTQNITTKGVSVRRKRQVYGTDSRFSILDKRFLTNFPFSTAVKLSTGCSGILISPQHVLTAAHCVHDGKDYVKGSKKLRVGLLKMRNKSGGKKRRGSKRSRREASGGDQREGTREHLRERAKGGRRRKKSGRGQRIAEGRPSFQWTRVKNTHIPKGWARGGMGDATLDYDYALLELKRAHKKKYMELGISPTIKKMPGGMIHFSGFDNDRADQLVYRFCSVSDESNDLLYQYCDAESGSTGSGVYLRLKDPDKKNWKRKIIAVYSGHQWVDVHGVQKDYNVAVRITPLKYAQICLWIHGNDANCAYG

SEQ ID NO: 10926 - protein, 855 aa, Homo sapiens
MARHLLLPLVMLVISPIPGAFQDSALSPTQEEPEDLDCGRPEPSARIVGGSNAQPGTWPWQVSLHHGGGHICGGSLIAPSWVLSAAHCFMTNGTLEPAAEWSVLLGVHSQDGPLDGAHTRAVAAIVVPANYSQVELGADLALLRLASPASLGPAVWPVCLPRASHRFVHGTACWATGWGDVQEADPLPLPWVLQEVELRLLGEATCQCLYSQPGPFNLTLQILPGMLCAGYPEGRRDTCQGDSGGPLVCEEGGRWFQAGITSFGFGCGRRNRPGVFTAVATYEAWIREQVMGSEPGPAFPTQPQKTQSDPQEPREENCTIALPECGKAPRPGAWPWEAQVMVPGSRPCHGALVSESWVLAPASCFLDPNSSDSPPRDLDAWRVLLPSRPRAERVARLVQHENASWDNASDLALLQLRTPVNLSAASRPVCLPHPEHYFLPGSRCRLARWGRGEPALGPGALLEAELLGGWWCHCLYGRQGAAVPLPGDPPHALCPAYQEKEEVGSCWNDSRWSLLCQEEGTWFLAGIRDFPSGCLRPRAFFPLQTHGPWISHVTRGAYLEDQLAWDWGPDGEETETQTCPPHTEHGACGLRLEAAPVGVLWPWLAEVHVAGDRVCTGILLAPGWVLAATHCVLRPGSTTVPYIEVYLGRAGASSLPQGHQVSRLVISIRLPQHLGLRPPLALLELSSRVEPSPSALPICLHPAGIPPGASCWVLGWKEPQDRVPVAAAVSILTQRICDCLYQGILPPGTLCVLYAEGQENRCEMTSAPPLLCQMTEGSWILVGMAVQGSRELFAAIGPEEAWISQTVGEANFLPPSGSPHWPTGGSNLCPPELAKASGSPHAVYFLLLLTLLIQS

SEQ ID NO: 10927 - protein, 752 aa, Homo sapiens
MARHLLLPLVMLVISPIPGAFQDSALSPTQEEPEDLDCGRPEPSARIVGGSNAQPGTWPWQVSLHHGGGHICGGSLIAPSWVLSAAHCFMTNGTLEPAAEWSVLLGVHSQDGPLDGAHTRAVAAIVVPANYSQVELGADLALLRLASPASLGPAVWPVCLPRASHRFVHGTACWATGWGDVQEADPLPLPWVLQEVELRLLGEATCQCLYSQPGPFNLTLQILPGMLCAGYPEGRRDTCQGDSGGPLVCEEGGRWFQAGITSFGFGCGRRNRPGVFTAVATYEAWIREQVMGSEPGPAFPTQPQKTQSDPQEPREENCTIALPECGKAPRPGAWPWEAQVMVPGSRPCHGALVSESWVLAPASCFLDPNSSDSPPRDLDAWRVLLPSRPRAERVARLVQHENASWDNASDLALLQLRTPVNLSAASRPVCLPHPEHYFLPGSRCRLARWGRGEPALGPGALLEAELLGGWWCHCLYGRQGAAVPLPGDPPHALCPAYQEKEEVGSCWNDSRWSLLCQEEGTWFLAGIRDFPSGCLRPRAFFPLQTHGPWISHVTRGAYLEDQLAWDWGPDGEETETQTCPPHTEHGACGLRLEAAPVGVLWPWLAEVHVAGDRVCTGILLAPGWVLAATHCVLRPGSTTVPYIEVYLGRAGASSLPQGHQMTSAPPLLCQMTEGSWILVGMAVQGSRELFAAIGPEEAWISQTVGEANFLPPSGSPHWPTGGSNLCPPELAKASGSPHAVYFLLLLTLLIQS

SEQ ID NO: 10928 - protein, 850 aa, Homo sapiens
MARHLLLPLVMLVISPIPGAFQDSALSPTQEEPEDLDCGRPEPSARIVGGSNAQPGTWPWQVSLHHGGGHICGGSLIAPSWVLSAAHCFMTNGTLEPAAEWSVLLGVHSQDGPLDGAHTRAVAAIVVPANYSQVELGADLALLRLASPASLGPAVWPVCLPRASHRFVHGTACWATGWGDVQEADPLPLPWVLQEVELRLLGEATCQCLYSQPGPFNLTLQILPGMLCAGYPEGRRDTCQGDSGGPLVCEEGGRWFQAGITSFGFGCGRRNRPGVFTAVATYEAWIREQVMGSEPGPAFPTQPQKTQSDPQEPREENCTIALPECGKAPRPGAWPWEAQVMVPGSRPCHGALVSESWVLAPASCFLDPNSSDSPPRDLDAWRVLLPSRPRAERVARLVQHENASWDNASDLALLQLRTPVNLSAASRPVCLPHPEHYFLPGSRCRLARWGRGEPALGPGALLEAELLGGWWCHCLYGRQGAAVPLPGDPPHALCPAYQEKEENDSRWSLLCQEEGTWFLAGIRDFPSGCLRPRAFFPLQTHGPWISHVTRGAYLEDQLAWDWGPDGEETETQTCPPHTEHGACGLRLEAAPVGVLWPWLAEVHVAGDRVCTGILLAPGWVLAATHCVLRPGSTTVPYIEVYLGRAGASSLPQGHQVSRLVISIRLPQHLGLRPPLALLELSSRVEPSPSALPICLHPAGIPPGASCWVLGWKEPQDRVPVAAAVSILTQRICDCLYQGILPPGTLCVLYAEGQENRCEMTSAPPLLCQMTEGSWILVGMAVQGSRELFAAIGPEEAWISQTVGEANFLPPSGSPHWPTGGSNLCPPELAKASGSPHAVYFLLLLTLLIQS

SEQ ID NO: 10929 - protein, 28 aa, Homo sapiens
  SITE 1: note = misc_feature - Xaa can be any naturally occurring amino acid
XIEVYLGRAGASSLPQGHQSLWLLLSPS

SEQ ID NO: 10930 - protein, 65 aa, Homo sapiens
MKYVFYLGVLAERRPCSLFGVPQVSLQPLCGRPHQTQLGAGPSSLLFTKSESDAGKFQEQSQRRY

SEQ ID NO: 10931 - protein, 68 aa, Homo sapiens
MKYVFYLGVLAGTFFFADSSVQKEDPAPYLVYLKSHFNPCVGVLIKPSWVLAPAHCYLPMNAFYHLKI

SEQ ID NO: 10932 - protein, 235 aa, Homo sapiens
MKYVFYLGVLAGTFFFADSSVQKEDPAPYLVYLKSHFNPCVGVLIKPSWVLAPAHCYLPNLKVMLGNFKSRVRDGTEQTINPIQIVRYWNYSHSAPQDDLMLIKLAKPAMLNPKVQPLTLATTNVRPGTVCLLSGLDWSQENSGRHPDLRQNLEAPVMSDRECQKTEQGKSHRNSLCVKFVKVFSRIFGEVAVATVICKDKLQGIEVGHFMGGDVGIYTNVYKYVSWIENTAKDK

SEQ ID NO: 10933 - protein, 235 aa, Homo sapiens; identical to SEQ ID NO: 10932

SEQ ID NO: 10934 - protein, 326 aa, Homo sapiens
MAAPASVMGPLGPSALGLLLLLLVVAPPRVAALVHRQPENQGISLTGSVACGRPSMEGKILGGVPAPERKWPWQVSVHYAGLHVCGGSILNEYWVLSAAHCFHRDKNIKIYDMYVGLVNLRVAGNHTQWYEVNRVILHPTYEMYHPIGGDVALVQLKTRIVFSESVLPVCLATPEVNLTSANCWATGWGLVSKQGETSDELQEMQLPLILEPWCHLLYGHMSYIMPDMLCAGDILNAKTVCEGDSGGPLVCEFNRSWLQIGIVSWGRGCSNPLYPGVYASVSYFSKWICDNIEITPTPAQPAPALSPALGPTLSVLMAMLAGWSVL

SEQ ID NO: 10935 - protein, 100 aa, Homo sapiens
MASFLAVVGAPGGVNSCVFDRFHYSVKMGDRSVYNENTSVVVSVQRAFVHPKFSTVTTIRNDLALLQLQHPVNFTSNIQPICIPQENFQVEGRFWGPLGL

SEQ ID NO: 10936 - protein, 293 aa, Homo sapiens
MSSGGGSRGLLAWLLLLQPWPGQNWAGMAAPRLPSPLLSEEGGENPEASPAPGPEAGPPLNLFTSFPGDSLLCGRTPLRIVGGVDAEEGRWPWQVSVRTKGRHICGGTLVTATWVLTAGHCISSRFHYSVKMGDRSVYNENTSVVVSVQRAFVHPKFSTVTTIRNDLALLQLQHPVNFTSNIQPICIPQENFQVEGRTRCWVTGWGKTPEREKLASEILQDVDQYIMCYEECNKIIQKALSSTKDVIIKGMVCGYKEQGKDSCQGDSGGRLACEYNDTWVQVGIVSWGIGCGR

SEQ ID NO: 10937 - protein, 185 aa, Homo sapiens
MGPAGCAFTLLLLLGISDRDYHSALQEAEVPIIDRQACEQLYNPIGIFLPALEPVIKEDKICAGDTQNMKDSCKGDSGGPLSCHIDGVWIQTGVVSWGLECGKSLPGVYTNVIYYQKWINATISRANNLDFSDFLFPIVLLSLALLRPSCAFGPNTIHRVGTVAEAVACIQGWEENAWRFSPRGR

SEQ ID NO: 10938 - protein, 328 aa, Homo sapiens
MGPAGCAFTLLLLLGISVCGQPVYSSRVVGGQDAAAGRWPWQVSLHFDHNFICGGSLVSERLILTAAHCIQPTWTTFSYTVWLGSITVGDSRKRVKYYVSKIVIHPKYQDTTADVALLKLSSQVTFTSAILPICLPSVTKQLAIPPFCWVTGWGKVKESSDRDYHSALQEAEVPIIDRQACEQLYNPIGIFLPALEPVIKEDKICAGDTQNMKDSCKGDSGGPLSCHIDGVWIQTGVVSWGLECGKSLPGVYTNVIYYQKWINATISRANNLDFSDFLFPIVLLSLALLRPSCAFGPNTIHRVGTVAEAVACIQGWEENAWRFSPRGR

SEQ ID NO: 10939 - protein, 385 aa, Homo sapiens
MGRWCQTVARGQRPRTSAPSRAGALLLLLLLLRSAGCWGAGEAPGALSTADPADQSVQCVPKATCPSSRPRLLWQTPTTQTLPSTTMETQFPVSEGKVDPYRSCGFSYEQDPTLRDPEAVARRWPWMVSVRANGTHICAGTIIASQWVLTVAHCLIWRDVIYSVRVGSPWIDQMTQTASDVPVLQVIMHSRYRAQRFWSWVGQANDIGLLKLKQELKYSNYVRPICLPGTDYVLKDHSRCTVTGWGLSKADGMWPQFRTIQEKEVIILNNKECDNFYHNFTKIPTLVQIIKSQMMCAEDTHREKFCYELTGEPLVCSMEGTWYLVGLVSWGAGCQKSEAPPIYLQVSSYQHWIWDCLNGQALALPAPSRTLLLALPLPLSLLAAL

SEQ ID NO: 10940 - protein, 553 aa, Homo sapiens
MKWCWGPVLLIAGATVLMEGLQAAQRACGQRGPGPPKPQEGNTVPGEWPWQASVRRQGAHICSGSLVADTWVLTAAHCFEKAAATELNSWSVVLGSLQREGLSPGAEEVGVAALQLPRAYNHYSQGSDLALLQLAHPTTHTPLCLPQPAHRFPFGASCWATGWDQDTSDAPGTLRNLRLRLISRPTCNCIYNQLHQRHLSNPARPGMLCGGPQPGVQGPCQGDSGGPVLCLEPDGHWVQAGIISFASSCAQEDAPVLLTNTAAHSSWLQARVQGAAFLAQSPETPEMSDEDSCVACGSLRTAGPQAGAPSPWPWEARLMHQGQLACGGALVSEEAVLTAAHCFIGRQAPEEWSVGLGTRPEEWGLKQLILHGAYTHPEGGYDMALLLLAQPVTLGASLRPLCLPYPDHHLPDGERGWVLGRARPGAGISSLQTVPVTLLGPRACSRLHAAPGGDGSPILPGMVCTSAVGELPSCEGLSGAPLVHEVRGTWFLAGLHSFGDACQGPARPAVFTALPAYEDWVSSLDWQVYFAEEPEPEAEPGSCLANISQPTSC

SEQ ID NO: 10941 - protein, 203 aa, Homo sapiens
MDPSKIAHTEYPVNTIIIHEDFDNNSMSNNIALLKTDTAMHFGNLVQSICFLGRMLHTPPVLQNCWVSGWNPTSATGNHMTMSVLRKIFVKDLDMCPLYKLQKTECGSHTKEETKTACLGDPGSPMMCQLQQFDLWVLRGVLNFGGETCPGLFLYTKVEDYSKWITSKAERAGPPLSSLHHWEKLISFSHHGPNATMTQKTYS

SEQ ID NO: 10942 - protein, 296 aa, Homo sapiens
MDPSKIAHTEYPVNTIIIHEDFDNNSMSNNIALLKTDTAMHFGNLVQSICFLGRMLHTPPVLQNCWVSGWNPTSATGNHMTMSVLRKIFVKDLDMCPLYKLQKTECGSHTKEETKTACLGDPGSPMMCQLQQFDLWVLRGVLNFGGETCPGLFLYTKVEDYSKWITSKAERAGPPLSSLHHWEKLISFSHHGPNATMTQKTYSDSELGHVGSYLQGQRRTITHSRLGNSSRDSLDVREKDVKESGRSPEASVQPLYYDYYGGEVGEGRIFAGQNRLYQPEEIILVSFVLVFFCSSI

SEQ ID NO: 10943 - protein, 186 aa, Homo sapiens
MVSAAGLSGDGKMRGVLLVLLGLLYSSTSCGVQKASVFYGPDPKEGLVSSMEFPWVVSLQDSQYTHLAFGCILSEFWVLSIASAIQNRKDIVVIVGISNMDPSKIAHTEYPVNTIIIHEDFDNNSMSNNIALLKTDTAMHFGNLVQSICFLGRMLHTPPVLQNCWVSGWNPTSATGNHMTMSVLRK

SEQ ID NO: 10944 - protein, 395 aa, Homo sapiens
MVSAAGLSGDGKMRGVLLVLLGLLYSSTSCGVQKASVFYGPDPKEGLVSSMEFPWVVSLQDSQYTHLAFGCILSEFWVLSIASAIQNRKDIVVIVGISNMDPSKIAHTEYPVNTIIIHEDFDNNSMSNNIALLKTDTAMHFGNLVQSICFLGRMLHTPPVLQNCWVSGWNPTSATGNHMTMSVLRKIFVKDLDMCPLYKLQKTECGSHTKEETKTACLGDPGSPMMCQLQQFDLWVLRGVLNFGGETCPGLFLYTKVEDYSKWITSKAERAGPPLSSLHHWEKLISFSHHGPNATMTQKTYSDSELGHVGSYLQGQRRTITHSRLGNSSRDSLDVREKDVKESGRSPEASVQPLYYDYYGGEVGEGRIFAGQNRLYQPEEIILVSFVLVFFCSSI

SEQ ID NO: 10945 - protein, 395 aa, Homo sapiens; identical to SEQ ID NO: 10944

SEQ ID NO: 10946 - protein, 352 aa, Homo sapiens
MLLFSVLLLLSLVTGTQLGPRTPLPEAGVAILGRARGAHRPQPPHPPSPVSECGDRSIFEGRTRYSRITGGMEAEVGEFPWQVSIQARSEPFCGGSILNKWWILTAAHCLYSEELFPEELSVVLGTNDLTSPSMEIKEVASIILHKDFKRANMDNDIALLLLASPIKLDDLKVPICLPTQPGPATWRECWVAGWGQTNAADKNSVKTDLMKAPMVIMDWEECSKMFPKLTKNMLCAGYKNESYDACKGDSGGPLVCTPEPGEKWYQVGIISWGKSCGEKNTPGIYTSLVNYNLWIEKVTQLEGRPFNAEKRRTSVKQKPMGSPVSGVPEPGSPRSWLLLCPLSHVLFRAILY

SEQ ID NO: 10947 - protein, 276 aa, Homo sapiens
MLLFSVLLLLSLVTGTQLGPRTPLPEAGVAILGRARGAHRPQPPHPPSPVSECGDRSIFEGRTRYSRITGGMEAEVGEFPWQVSIQARSEPFCGGSILNKWWILTAAHCLYSEELFPEELSVVLGTNDLTSPSMEIKEVASIILHKDFKRANMDNDIALLLLASPIKLDDLKVPICLPTQPGPATWRECWVAGWGQTNAADKNSVKTDLMKAPMVIMDWEECSKMFPKLTKNMLCAGYKNESYDACKQSYFPTLQRMNTGSSQTKPPGSHTFHLQN

SEQ ID NO: 10948 - protein, 182 aa, Homo sapiens
  SITE 1: note = misc_feature - Xaa can be any naturally occurring amino acid
XWKPAPPSPVPSSHWMLTKCFPFSFPLSFFPPECGDRSIFEGRTRYSRITGGMEAEVGEFPWQVSIQARSEPFCGGSILNKWWILTAAHCLYSEELFPEELSVVLGTNDLTSPSMEIKEVASIILHKDFKRANMDNDIALLLLASPIKLDDLKVPICLPTQPGPATWRECWVAGWGQTNAGM

SEQ ID NO: 10949 - protein, 604 aa, Homo sapiens
MLLAVLLLLPLPSSWFAHGHPLYTRLPPSALQVLSAQGTQALQAAQRSAQWAINRVAMEIQHRSHECRGSGRPRPQALLQDPPEPGPCGERRPSTANVTRAHGRIVGGSAAPPGAWPWLVRLQLGGQPLCGGVLVAASWVLTAAHCFVGAPNELLWTVTLAEGSRGEQAEEVPVNRILPHPKFDPRTFHNDLALVQLWTPVSPGGSARPVCLPQEPQEPPAGTACAIAGWGALFEDGPEAEAVREARVPLLSTDTCRRALGPGLRPSTMLCAGYLAGGVDSCQGDSGGPLTCSEPGPRPREVLFGVTSWGDGCGEPGKPGVYTRVAVFKDWLQEQMSAASSSREPSCRELLAWDPPQELQADAARLCAFYARLCPGSQGACARLAHQQCLQRRRRCELRSLAHTLLGLLRNAQELLGPRPGLRRLAPALALPAPALRESPLHPARELRLHSGSRAAGTRFPKRRPEPRGEANGCPGLEPLRQKLAALQGAHAWILQVPSEHLAMNFHEVLADLGSKTLTGLFRAWVRAGLGGRHVAFSGLVGLEPATLARSLPRLLVQALQAFRVAALAEGEPEGPWMDVGQGPGLERKGHHPLNPQVPPARQP

SEQ ID NO: 10950 - protein, 603 aa, Homo sapiens
MLLAVLLLLPLPSSWFAHGHPLYTRLPPSALQVLSAQGTQALQAAQRSAQWAINRVAMEIQHRSHECRGSGRPRPQALLQDPPEPGPCGERRPSTANVTRAHGRIVGGSAAPPGAWPWLVRLQLGGQPLCGGVLVAASWVLTAAHCFVGAPNELLWTVTLAEGSRGEQAEEVPVNRILPHPKFDPRTFHNDLALVQLWTPVSPGGSARPVCLPQEPQEPPAGTACAIAGWGALFEDGPEAEAVREARVPLLSTDTCRRALGPGLRPSTMLCAGYLAGGVDSCQGDSGGPLTCSEPGPRPREVLFGVTSWGDGCGEPGKPGVYTRVAVFKDWLQEQMSASSSREPSCRELLAWDPPQELQADAARLCAFYARLCPGSQGACARLAHQQCLQRRRRCELRSLAHTLLGLLRNAQELLGPRPGLRRLAPALALPAPALRESPLHPARELRLHSGSRAAGTRFPKRRPEPRGEANGCPGLEPLRQKLAALQGAHAWILQVPSEHLAMNFHEVLADLGSKTLTGLFRAWVRAGLGGRHVAFSGLVGLEPATLARSLPRLLVQALQAFRVAALAEGEPEGPWMDVGQGPGLERKGHHPLNPQVPPARQP

SEQ ID NO: 10951 - protein, 283 aa, Homo sapiens
MGLGLRGWGRPLLTVATALMLPVKPPAGSWGAQIIGGHEVTPHSRPYMASVRFGGQHHCGGFLLRARWVVSAAHCFSHRDLRTGLVVLGAHVLSTAEPTQQVFGIDALTTHPDYHPMTHANDICLLRLNGSAVLGPAVGLLRPPGRRARPPTAGTRCRVAGWGFVSDFEELPPGLMEAKVRVLDPDVCNSSWKGHLTLTMLCTRSGDSHRRGFCSADSGGPLVCRNRAHGLVSFSGLWCGDPKTPDVYTQVSAFVAWIWDVVRRSSPQPGPLPGTTRPPGEAA

SEQ ID NO: 10952 - protein, 282 aa, Homo sapiens
MGLGLRGWGRPLLTVATALMLPVKPPGSWGAQIIGGHEVTPHSRPYMASVRFGGQHHCGGFLLRARWVVSAAHCFSHRDLRTGLVVLGAHVLSTAEPTQQVFGIDALTTHPDYHPMTHANDICLLRLNGSAVLGPAVGLLRPPGRRARPPTAGTRCRVAGWGFVSDFEELPPGLMEAKVRVLDPDVCNSSWKGHLTLTMLCTRSGDSHRRGFCSADSGGPLVCRNRAHGLVSFSGLWCGDPKTPDVYTQVSAFVAWIWDVVRRSSPQPGPLPGTTRPPGEAA

SEQ ID NO: 10953 - protein, 241 aa, Homo sapiens
MKFILLWALLNLTVALAFNPDYTVSSTPPYLVYLKSDYLPCAGVLIHPLWVITAAHCNLPKLRVILGVTIPADSNEKHLQVIGYEKMIHHPHFSVTSIDHDIMLIKLKTEAELNDYVKLANLPYQTISENTMCSVSTWSYNVCDIYKEPDSLQTVNISVISKPQCRDAYKTYNITENMLCVGIVPGRRQPCKEVSAAPAICNGMLQGILSFADGCVLRADVGIYAKIFYYIPWIENVIQNN

SEQ ID NO: 10954 - protein, 241 aa, Homo sapiens; identical to SEQ ID NO: 10953

SEQ ID NO: 10955 - protein, 108 aa, Homo sapiens [sequence omitted]

SEQ ID NO: 10956 - protein, 343 aa, Homo sapiens
MAQKGVLGPGQLGAVAILLYLGLLRSGTGAEGAEAPCGVAPQARITGGSSAVAGQWPWQVSITYEGVHVCGGSLVSEQWVLSAAHCFPSEHHKEAYEVKLGAHQLDSYSEDAKVSTLKDIIPHPSYLQEGSQGDIALLQLSRPITFSRYIRPICLPAANASFPNGLHCTVTGWGHVAPSVSLLTPKPLQQLEVPLISRETCNCLYNIDAKPEEPHFVQEDMVCAGYVEGGKDACQGDSGGPLSCPVEGLWYLTGIVSWGDACGARNRPGVYTLASSYASWIQSKVTELQPRVVPQTQESQPDSNLCGSHLAFSSAPAQGLLRPILFLPLGLALGLLSPWLSEH

SEQ ID NO: 10957 - protein, 195 aa, Homo sapiens
MAQKGVLGPGQLGAVAILLYLGLLRSGTGAEGAEAPCGVAPQARITGGSSAVAGQWPWQVSITYEGVHVCGGSLVSEQWVLSAAHCFPSYLQEGSQGDIALLQLSRPITFSRYIRPICLPAANASFPNGLHCTVTGWGHVAPSVSLLTPKPLQQLEVPLISRETCNCLYNIDAKPEEPHFVQEDMVCAGYVEGGK

SEQ ID NO: 10958 - protein, 289 aa, Homo sapiens
MAQKGVLGPGQLGAVAILLYLGLLRSGTGAEGAEAPCGVAPQARITGGSSAVAGQWPWQVSTLKDIIPHPSYLQEGSQGDIALLQLSRPITFSRYIRPICLPAANASFPNGLHCTVTGWGHVAPSVSLLTPKPLQQLEVPLISRETCNCLYNIDAKPEEPHFVQEDMVCAGYVEGGKDACQGDSGGPLSCPVEGLWYLTGIVSWGDACGARNRPGVYTLASSYASWIQSKVTELQPRVVPQTQESQPDSNLCGSHLAFSSAPAQGLLRPILFLPLGLALGLLSPWLSEH

SEQ ID NO: 10959 - protein, 218 aa, Homo sapiens
EYQVVIGNDTTHYIIDDLEPASNYTFYIVAYMPMGASQMSDHVTQNTLEDVPLRPPEISLTSRSPTDILISWLPIPAKYRRGQVVLYRLSFRLSTENSIQVLELPGTTHEYLLEGLKPDSVYLVRITAATRVGLGESSVWTSHRTPKATSVKAPKSPELHLEPLNCTTISVRWQQDVEDTAAIQGYKLYYKEEGQQENGPIFLDTKDLLYTLSGLARI

SEQ ID NO: 10960 - protein, 137 aa, Homo sapiens
MAPPLRPLARLRPPGMLLRALLLLLLLSPLPGVWCFSELSFVKEPQDVTVTRKDPVVLDCQAHGEVPIKVTWLKNGAKMSENKRIEVLSNGSLYISEVEGRRGEQSDEGFYQCLAMNKYGAILSQKAHLALSRIGST

SEQ ID NO: 10961 - protein, 1150 aa, Homo sapiens
MAPPLRPLARLRPPGMLLRALLLLLLLSPLPGVWCFSELSFVKEPQDVTVTRKDPVVLDCQAHGEVPIKVTWLKNGAKMSENKRIEVLSNGSLYISEVEGRRGEQSDEGFYQCLAMNKYGAILSQKAHLALSTISAFEVQPISTEVHEGGVARFACKISSHPPAVITWEFNRTTLPMTMDRITALPTGVLQIYDVSQRDSGNYRCIAATVAHRRKSMEASLTVIPAKESKSFHTPTIIAGPQNITTSLHQTVVLECMATGNPKPIISWSRLDHKSIDVFNTRVLGNGNLMISDVRLQHAGVYVCRATTPGTRNFTVAMATLTVLAPPSFVEWPESLTRPRAGTARFVCQAEGIPSPKMSWLKNGRKIHSNGRIKMYNSKLVINQIIPEDDAIYQCMAENSQGSILSRARLTVVMSEDRPSAPYNVHAETMSSSAILLAWERPLYNSDKVIAYSVHYMKAEGLNNEEYQVVIGNDTTHYIIDDLEPASNYTFYIVAYMPMGASQMSDHVTQNTLEDVPLRPPEISLTSRSPTDILISWLPIPAKYRRGQVVLYRLSFRLSTENSIQVLELPGTTHEYLLEGLKPDSVYLVRITAATRVGLGESSVWTSHRTPKATSVKAPKSPELHLEPLNCTTISVRWQQDVEDTAAIQGYKLYYKEEGQQENGPIFLDTKDLLYTLSGLDPRRKYHVRLLAYNNIDDGYQADQTVSTPGCVSVRDRMVPPPPPPHHLYAKANTSSSIFLHWRRPAFTAAQIINYTIRCNPVGLQNASLVLYLQTSETHMLVQGLEPNTKYEFAVRLHVDQLSSPWSPVVYHSTLPEAPAGPPVGVKVTLIEDDTALVSWKPPDGPETVVTRYTILYASRKAWIAGEWQVLHREGAITMALLENLVAGNVYIVKISASNEVGEGPFSNSVELAVLPKETSESNQRPKRLDSADAKVYSGYYHLDQKSMTGIAVGVGIALTCILICVLILIYRSKARKSSASKTAQNGTQQLPRTSASLASGNEVGKNLEGAVGNEESLMPMIMPNSFIDAKGGTDLIINSYGPIIKNNSKKKWFFFQDSKKIQVEQPQRRFTPAVCFYQPGTTVLISDEDSPSSPGQTTSFSRPFGVAADTEHSANSEGSHETGDSGRFSHESNDEIHLSSVISTTPPNL

SEQ ID NO: 10962 - protein, 22 aa, Homo sapiens
MSENKRIEVLSNGSLYISEVEG

SEQ ID NO: 10963 - protein, 256 aa, Homo sapiens
MAHRPPSPALASVLLALLLSGAARAAEIVGGHEAQPHSRPYMASLQMRGNPGSHFCGGTLIHPSFVLTAAHCLRDIPQRLVNVVLGAHNVRTQEPTQQHFSVAQVFLNNYDAENKLNDVLLIQLSSPANLSASVATVQLPQQDQPVPHGTQCLAMGWGRVGAHDPPAQVLQELNVTVVTFFCRPHNICTFVPRRKAGICFGDSGGPLICDGIIQGIDSFVIWGCATRLFPDFFTRVALYVDWIRSTLRRVEAKGRP

SEQ ID NO: 10964 - protein, 215 aa, Homo sapiens
MASLQMRGNPGSHFCGGTLIHPSFVLTAAHCLRDIPQRLVNVVLGAHNVRTQEPTQQHFSVAQVFLNNYDAENKLNDVLLIQLSSPANLSASVATVQLPQQDQPVPHGTQCLAMGWGRVGAHDPPAQVLQELNVTVVTFFCRPHNICTFVPRRKAGICFGDSGGPLICDGIIQGIDSFVIWGCATRLFPDFFTRVALYVDWIRSTLRRVEAKGRP

SEQ ID NO: 10965 - protein, 527 aa, Homo sapiens [sequence omitted]

SEQ ID NO: 10966 - protein, 524 aa, Homo sapiens
MYALFLLASLLGAALAGPVLGLKECTRGSAVWCQNVKTASDCGAVKHCLQTVWNKPTVKSLPCDICKDVVTAAGDMLKDNATEEEILVYLEKTCDWLPKPNMSASCKEIVDSYLPVILDIIKGEMSRPGEVCSALNLCESLQKHLAELNHQKQLESNKIPELDMTEVVAPFMANIPLLLYPQDGPRSKPQPKDNGDVCQDCIQMVTDIQTAVRTNSTFVQALVEHVKEECDRLGPGMADICKNYISQYSEIAIQMMMHMQPKEICALVGFCDEVKEMPMQTLVPAKVASKNVIPALELVEPIKKHEVPAKSDVYCEVCEFLVKEVTKLIDNNKTEKEILDAFDKMCSKLPKSLSEECQEVVDTYGSSILSILLEEVSPELVCSMLHLCSGTRLPALTVHVTQPKDGGFCEVCKKLVGYLDRNLEKNSTKQEILAALEKGCSFLPDPYQKQCDQFVAEYEPVLIEILVEVMDPSFVCLKIGACPSAHKPLLGTEKCIWGPSYWCQNTETAAQCNAVEHCKRHVWN

SEQ ID NO: 10967 - protein, 240 aa, Homo sapiens
MYALFLLASLLGAALAGPVLGLKECTRGSAVWCQNVKTASDCGAVKHCLQTVWNKPTVKSLPCDICKDVVTAAGDMLKDNATEEEILVYLEVSPELVCSMLHLCSGTRLPALTVHVTQPKDGGFCEVCKKLVGYLDRNLEKNSTKQEILAALEKGCSFLPDPYQKQCDQFVAEYEPVLIEILVEVMDPSFVCLKIGACPSAHKPLLGTEKCIWGPSYWCQNTETAAQCNAVEHCKRHVWN

SEQ ID NO: 10968 - protein, 167 aa, Homo sapiens
  SITE 1: note = misc_feature - Xaa can be any naturally occurring amino acid
XCIQMVTDIQTAVRTNSTFVQALVEHVKEECDRLGPGMADICKNYISQYSEIAIQMMMHMQDQQPKEICALVGFCDEVKEMPMQTLVPAKVASKNVIPALELVEPIKKHEVPAKSDVYCEVCEFLVKEVTKLIDNNKTEKEILDAFDKMCSKLPKSLSEECQEVVDT

SEQ ID NO: 10969 - protein, 521 aa, Homo sapiens
MLCALLLLPSLLGATRASPTSGPQECAKGSTVWCQDLQTAARCGAVGYCQGAVWNKPTAKSLPCDVCQDIAAAAGNGLNPDATESDILALVMKTCEWLPSQESSAGCKWMVDAHSSAILSMLRGAPDSAPAQVCTALSLCEPLQRHLATLRPLSKEDTFEAVAPFMANGPLTFHPRQAPEGALCQDCVRQVSRLQEAVRSNLTLADLNIQEQCESLGPGLAVLCKNYLFQFFVPADQALRLLPPQELCRKGGFCEELGAPARLTQVVAMDGVPSLELGLPRKQSEMQMKAGVTCEVCMNVVQKLDHWLMSNSSELMITHALERVCSVMPASITKECIILVDTYSPSLVQLVAKITPEKVCKFIRLCGNRRRARAVHDAYAIVPSPEWDAENQGSFCNGCKRLLTVSSHNLESKSTKRDILVAFKGGCSILPLPYMIQCKHFVTQYEPVLIESLKDMMDPVAVCKKVGACHGPRTPLLGTDQCALGPSFWCRSQEAAKLCNAVQHCQKHVWKEMHLHAGEHA

SEQ ID NO: 10970 - protein, 426 aa, Homo sapiens
MGTLSAPPCTQRIKWKGLLLTASLLNFWNLPTTAQVTIEAEPTKVSEGKDVLLLVHNLPQNLTGYIWYKGQMRDLYHYITSYVVDGEIIIYGPAYSGRETAYSNASLLIQNVTREDAGSYTLHIIKGDDGTRGVTGRFTFTLHLETPKPSISSSNLNPRETMEAVSLTCDPETPDASYLWWMNGQSLPMTHSLKLSETNRTLFLLGVTKYTAGPYECEIRNPVSASRSDPVTLNLLPKLPKPYITINNLNPRENKDVLNFTCEPKSENYTYIWWLNGQSLPVSPRVKRPIENRILILPSVTRNETGPYQCEIRDRYGGIRSDPVTLNVLYGPDLPRIYPSFTYYRSGEVLYLSCSADSNPPAQYSWTINEKFQLPGQKLFIRHITTKHSGLYVCSVRNSATGKESSKSMTVEVSGKWIPASLAIGF

SEQ ID NO: 10971 - protein, 428 aa, Homo sapiens
MGTLSAPPCTQRIKWKGLLLTASLLNFWNLPTTAQVTIEAEPTKVSEGKDVLLLVHNLPQNLTGYIWYKGQMRDLYHYITSYVVDGEIIIYGPAYSGRETAYSNASLLIQNVTREDAGSYTLHIIKGDDGTRGVTGRFTFTLHLETPKPSISSSNLNPRETMEAVSLTCDPETPDASYLWWMNGQSLPMTHSLKLSETNRTLFLLGVTKYTAGPYECEIRNPVSASRSDPVTLNLLPKLPKPYITINNLNPRENKDVLNFTCEPKSENYTYIWWLNGQSLPVSPRVKRPIENRILILPSVTRNETGPYQCEIRDRYGGIRSDPVTLNVLYGPDLPRIYPSFTYYRSGEVLYLSCSADSNPPAQYSWTINEKFQLPGQKLFIRHITTKHSGLYVCSVRNSATGKESSKSMTVEVSAYSSSINYTSGNRN

SEQ ID NO: 10972 - protein, 419 aa, Homo sapiens
MGTLSAPPCTQRIKWKGLLLTASLLNFWNLPTTAQVTIEAEPTKVSEGKDVLLLVHNLPQNLTGYIWYKGQMRDLYHYITSYVVDGEIIIYGPAYSGRETAYSNASLLIQNVTREDAGSYTLHIIKGDDGTRGVTGRFTFTLHLETPKPSISSSNLNPRETMEAVSLTCDPETPDASYLWWMNGQSLPMTHSLKLSETNRTLFLLGVTKYTAGPYECEIRNPVSASRSDPVTLNLLPKLPKPYITINNLNPRENKDVLNFTCEPKSENYTYIWWLNGQSLPVSPRVKRPIENRILILPSVTRNETGPYQCEIRDRYGGIRSDPVTLNVLYGPDLPRIYPSFTYYRSGEVLYLSCSADSNPPAQYSWTINEKFQLPGQKLFIRHITTKHSGLYVCSVRNSATGKESSKSMTVEVSDWTVP

SEQ ID NO: 10973 - protein, 417 aa, Homo sapiens
MGTLSAPPCTQRIKWKGLLLTASLLNFWNLPTTAQVTIEAEPTKVSEGKDVLLLVHNLPQNLTGYIWYKGQMRDLYHYITSYVVDGEIIIYGPAYSGRETAYSNASLLIQNVTREDAGSYTLHIIKGDDGTRGVTGRFTFTLHLETPKPSISSSNLNPRETMEAVSLTCDPETPDASYLWWMNGQSLPMTHSLKLSETNRTLFLLGVTKYTAGPYECEIRNPVSASRSDPVTLNLLPKLPKPYITINNLNPRENKDVLNFTCEPKSENYTYIWWLNGQSLPVSPRVKRPIENRILILPSVTRNETGPYQCEIRDRYGGIRSDPVTLNVLYGPDLPRIYPSFTYYRSGEVLYLSCSADSNPPAQYSWTINEKFQLPGQKLFIRHITTKHSGLYVCSVRNSATGKESSKSMTVEVSEAL

SEQ ID NO: 10974 - protein, 326 aa, Homo sapiens
MGTLSAPPCTQRIKWKGLLLTASLLNFWNLPTTAQVTIEAEPTKVSEGKDVLLLVHNLPQNLTGYIWYKGQMRDLYHYITSYVVDGEIIIYGPAYSGRETAYSNASLLIQNVTREDAGSYTLHIIKGDDGTRGVTGRFTFTLHPKLPKPYITINNLNPRENKDVLNFTCEPKSENYTYIWWLNGQSLPVSPRVKRPIENRILILPSVTRNETGPYQCEIRDRYGGIRSDPVTLNVLYGPDLPRIYPSFTYYRSGEVLYLSCSADSNPPAQYSWTINEKFQLPGQKLFIRHITTKHSGLYVCSVRNSATGKESSKSMTVEVSDWTVP

SEQ ID NO: 10975 - protein, 324 aa, Homo sapiens
MGTLSAPPCTQRIKWKGLLLTASLLNFWNLPTTAQVTIEAEPTKVSEGKDVLLLVHNLPQNLTGYIWYKGQMRDLYHYITSYVVDGEIIIYGPAYSGRETAYSNASLLIQNVTREDAGSYTLHIIKGDDGTRGVTGRFTFTLHPKLPKPYITINNLNPRENKDVLNFTCEPKSENYTYIWWLNGQSLPVSPRVKRPIENRILILPSVTRNETGPYQCEIRDRYGGIRSDPVTLNVLYGPDLPRIYPSFTYYRSGEVLYLSCSADSNPPAQYSWTINEKFQLPGQKLFIRHITTKHSGLYVCSVRNSATGKESSKSMTVEVSEAL

SEQ ID NO: 10976 - protein, 154 aa, Homo sapiens
MRDLYHYITSYVVDGEIIIYGPAYSGRETAYSNASLLIQNVTREDAGSYTLHIIKGDDGTRGVTGRFTFTLHLETPKPSISSSNLNPRETMEAVSLTCDPETPDASYLWWMNGQSLPMTHSLKLSETNRTLFLLGVTKYTAGPYECEIRNPVSA

SEQ ID NO: 10977 - protein, 242 aa, Homo sapiens
  SITE 1: note = misc_feature - Xaa can be any naturally occurring amino acid
XSYVVDGEIIIYGPAYSGRETAYSNASLLIQNVTREDAGSYTLHIIKGDDGTRGVTGRFTFTLHLETPKPSISSSNLNPRETMEAVSLTCDPETPDASYLWWMNGQSLPMTHSLKLSETNRTLFLLGVTKYTAGPYECEIRNPVSASRSDPVTLNLLHGPDLPRIYPSFTYYRSGEVLYLSCSADSNPPAQYSWTINEKFQLPGQKLFIRHITTKHSGLYVCSVRNSATGKESSKSMTVEVS

SEQ ID NO: 10978 - protein, 335 aa, Homo sapiens
MGPLSAPPCTEHIKWKGLLLTALLLNFWNLPTTAQVMIEAQPPKVSEGKDVLLLVHNLPQNLTGYIWYKGQIRDLYHYITSYVVDGQIIIYGPAYSGRETVYSNASLLIQNVTREDAGSYTLHIIKRGDGTRGVTGYFTFTLYLETPKPSISSSNLNPREAMETVILTCNPETPDASYLWWMNGQSLPMTHRMQLSETNRTLFLFGVTKYTAGPYECEIWNSGSASRSDPVTLNLLHGPDLPRIFPSVTSYYSGENLDLSCFANSNPPAQYSWTINGKFQLSGQKLFIPQITPKHNGLYACSARNSATGEESSTSLTIRVIAPPGLGTFAFNNPT

SEQ ID NO: 10979 - protein, 320 aa, Homo sapiens
MGPLSAPPCTEHIKWKGLLLTALLLNFWNLPTTAQVMIEAQPPKVSEGKDVLLLVHNLPQNLTGYIWYKGQIRDLYHYITSYVVDGQIIIYGPAYSGRETVYSNASLLIQNVTREDAGSYTLHIIKRGDGTRGVTGYFTFTLYPKLPMPYITINNLNPRENKDVLTFTCEPKSENYAYIWWLNCQSLPVSPRVKRPIENRILILPSVTRNETGPYQCEIRDRYGGIRSDSVTLNVLYGPDLPRIFPSVTSYYSGENLDLSCFANSNPPAQYSWTINGKFQLSGQKLFIPQITPKHNGLYACSARNSATGEESSTSLTIRV

SEQ ID NO: 10980 - protein, 213 aa, Homo sapiens
MGPLSAPPCTEHIKWKGLLLTVETPKPSISSSNLNPREAMETVILTCNPETPDASYLWWMNGQSLPMTHRMQLSETNRTLFLFGVTKYTAGPYECEIWNSGSASRSDPVTLNLLHGPDLPRIFPSVTSYYSGENLDLSCFANSNPPAQYSWTINGKFQLSGQKLFIPQITPKHNGLYACSARNSATGEESSTSLTIRVIAPPGLGTFAFNNPT

SEQ ID NO: 10981 - protein, 213 aa, Homo sapiens; identical to SEQ ID NO: 10980

SEQ ID NO: 10982 - protein, 126 aa, Homo sapiens
MIEAQPPKVSEGKDVLLLVHNLPQNLTGYIWYKGQIRDLYHYITSYVVDGQIIIYGPAYSGRETVYSNASLLIQNVTREDAGSYTLHIIKRGDGTRGVTGYFTFTLYRHSLDSALSLEVTGSSQSL

SEQ ID NO: 10983 - protein, 335 aa, Homo sapiens
MGPLSAPPCTEHIKWKGLLVTASLLNFWNLPTTAQVTIEAQPPKVSEGKDVLLLVHNLPQNLTGYIWYKGQIRDLYHYITSYVVDGQIIIYGPAYSGRETAYSNASLLIQNVTREDAGSYTLHIIKRGDGTRGVTGYFTFTLYLETPKPSISSSNLNPREAMETVILTCDPETPDTSYQWWMNGQSLPMTHRFQLSETNRTLFLFGVTKYTAGPYECEIRNSGSASRSDPVTLNLLHGPDLPRIHPSYTNYRSGDNLYLSCFANSNPPAQYSWTINGKFQQSGQNLFIPQITTKHSGLYVCSVRNSATGEESSTSLTVKVSASTRIGLLPLLNPT

SEQ ID NO: 10984 - protein, 117 aa, Homo sapiens
  SITE 1: note = misc_feature - Xaa can be any naturally occurring amino acid
XRNSGSASRSDPVTLNLLHGPDLPRIHPSYTNYRSGDNLYLSCFANSNPPAQYSWTINGKFQQSGQNLFIPQITTKHSGLYVCSVRNSATGEESSTSLTVKVSASTRIGLLPLLNPT

SEQ ID NO: 10985 - protein, 428 aa, Homo sapiens
MGPLSAPPCTQRITWKGLLLTALLLNFWNLPTTAQVTIEAEPTKVSKGKDVLLLVHNLPQNLAGYIWYKGQMKDLYHYITSYVVDGQIIIYGPAYSGRETVYSNASLLIQNVTREDAGSYTLHIVKRGDGTRGETGHFTFTLYLETPKPSISSSNLYPREDMEAVSLTCDPETPDASYLWWMNGQSLPMTHSLQLSKNKRTLFLFGVTKYTAGPYECEIRNPVSASRSDPVTLNLLPKLPKPYITINNLNPRENKDVLAFTCEPKSENYTYIWWLNGQSLPVSPRVKRPIENRILILPSVTRNETGPYQCEIQDRYGGIRSYPVTLNVLYGPDLPRIYPSFTYYHSGENLYLSCFADSNPPAEYSWTINGKFQLSGQKLFIPQITTKHSGLYACSVRNSATGMESSKSMTVKVSAPSGTGHLPGLNPL

SEQ ID NO: 10986 - protein, 475 aa, Homo sapiens
MGPLSAPPCTQRITWKGLLLTALLLNFWNLPTTAQVTIEAEPTKVSKGKDVLLLVHNLPQNLAGYIWYKGQMKDLYHYITSYVVDGQIIIYGPAYSGRETVYSNASLLIQNVTREDAGSYTLHIVKRGDGTRGETGHFTFTLYLETPKPSISSSNLYPREDMEAVSLTCDPETPDASYLWWMNGQSLPMTHSLQLSKNKRTLFLFGVTKYTAGPYECEIRNPVSASRSDPVTLNLLPKLPKPYITINNLNPRENKDVLAFTCEPKSENYTYIWWLNGQSLPVSPRVKRPIENRILILPSVTRNETGPYQCEIQDRYGGIRSYPVTLNVLYGPDLPRIYPSFTYYHSGENLYLSCFADSNPPAEYSWTINGKFQLSGQKLFIPQITTKHSGLYACSVRNSATGMESSKSMTVKVSDSCFHSSSKYLPSATVQNCFLFKEIYEKTLTRTLEYKFLITSRSYHWTKNFQNFNEQADTS

SEQ ID NO: 10987 - protein, 428 aa, Homo sapiens; identical to SEQ ID NO: 10985

SEQ ID NO: 10988 - protein, 91 aa, Homo sapiens
MKDLYHYITSYVVDGQIIIYGPAYSGRETVYSNASLLIQNVTREDAGSYTLHIVKRGDGTRGETGHFTFTLYRHSLDSALSLEVTGSSQPL

SEQ ID NO: 10989 - protein, 326 aa, Homo sapiens
MGPLSAPPCTQRITWKGVLLTASLLNFWNPPTTAQVTIEAQPPKVSEGKDVLLLVHNLPQNLAGYIWYKGQMTYLYHYITSYVVDGQRIIYGPAYSGRERVYSNASLLIQNVTQEDAGSYTLHIIKRRDGTGGVTGHFTFTLHLETPKPSISSSNLNPREAMEAVILTCDPATPAASYQWWMNGQSLPMTHRLQLSKTNRTLFIFGVTKYIAGPYECEIRNPVSASRSDPVTLNLLHGPDLPSIYPSFTYYRSGENLYLSCFAESNPRAQYSWTINGKFQLSGQKLSIPQITTKHSGLYACSVRNSATGKESSKSITVKVSDWILP

SEQ ID NO: 10990 - protein, 419 aa, Homo sapiens
MGPLSAPPCTQRITWKGVLLTASLLNFWNPPTTAQVTIEAQPPKVSEGKDVLLLVHNLPQNLAGYIWYKGQMTYLYHYITSYVVDGQRIIYGPAYSGRERVYSNASLLIQNVTQEDAGSYTLHIIKRRDGTGGVTGHFTFTLHLETPKPSISSSNLNPREAMEAVILTCDPATPAASYQWWMNGQSLPMTHRLQLSKTNRTLFIFGVTKYIAGPYECEIRNPVSASRSDPVTLNLLPKLSKPYITINNLNPRENKDVLTFTCEPKSKNYTYIWWLNGQSLPVSPRVKRPIENRILILPNVTRNETGPYQCEIRDRYGGIRSDPVTLNVLYGPDLPSIYPSFTYYRSGENLYLSCFAESNPRAQYSWTINGKFQLSGQKLSIPQITTKHSGLYACSVRNSATGKESSKSITVKVSDWILP

SEQ ID NO: 10991 - protein, 326 aa, Homo sapiens
MGPLSAPPCTQRITWKGVLLTASLLNFWNPPTTAQVTIEAQPPKVSEGKDVLLLVHNLPQNLAGYIWYKGQMTYLYHYITSYVVDGQRIIYGPAYSGRERVYSNASLLIQNVTQEDAGSYTLHIIKRRDGTGGVTGHFTFTLHPKLSKPYITINNLNPRENKDVLTFTCEPKSKNYTYIWWLNGQSLPVSPRVKRPIENRILILPNVTRNETGPYQCEIRDRYGGIRSDPVTLNVLYGPDLPSIYPSFTYYRSGENLYLSCFAESNPRAQYSWTINGKFQLSGQKLSIPQITTKHSGLYACSVRNSATGKESSKSITVKVSDWILP

SEQ ID NO: 10992 - protein, 52 aa, Homo sapiens
MGPLSAPPCTQRITWKGVLLTGCSCPKPTGPSLYLVSQSILQDPMNVKYGTQ

SEQ ID NO: 10993 - protein, 40 aa, Homo sapiens
MGPLSAPPCTQRITWKGVLLTGHSLDSALSLEVTGSSQSP

SEQ ID NO: 10994 - protein, 180 aa, Homo sapiens
MGPLSAPPCTQRITWKGVLLTVETPKPSISSSNLNPREAMEAVILTCDPATPAASYQWWMNGQSLPMTHRLQLSKTNRTLFIFGVTKYIAGPYECEIRNPVSASRSDPVTLNLLHGPDLPSIYPSFTYYRSGENLYLSCFAESNPRAQYSWTINGKFQLSGQKLSIPQITTKHSGLYACS

SEQ ID NO: 10995 - protein, 292 aa, Homo sapiens
MGPLSAPPCTQRITWKGVLLTVETPKPSISSSNLNPREAMEAVILTCDPATPAASYQWWMNGQSLPMTHRLQLSKTNRTLFIFGVTKYIAGPYECEIRNPVSASRSDPVTLNLLPKLSKPYITINNLNPRENKDVLTFTCEPKSKNYTYIWWLNGQSLPVSPRVKRPIENRILILPNVTRNETGPYQCEIRDRYGGIRSDPVTLNVLYGPDLPSIYPSFTYYRSGENLYLSCFAESNPRAQYSWTINGKFQLSGQKLSIPQITTKHSGLYACSVRNSATGKESSKSITVKVS

SEQ ID NO: 10996 - protein, 252 aa, Homo sapiens
MKHCPQQETSTIGGKKKHPEGGDPENSHIYRSLPPVPASLLNFWNPPTTAQVTIEAQPPKVSEGKDVLLLVHNLPQNLAGYIWYKGQMTYLYHYITSYVVDGQRIIYGPAYSGRERVYSNASLLIQNVTQEDAGSYTLHIIKRRDGTGGVTGHFTFTLHLETPKPSISSSNLNPREAMEAVILTCDPATPAASYQWWMNGQSLPMTHRLQLSKTNRTLFIFGVTKYIAGPYECEIRNPVSASRSDPVTLNLL

SEQ ID NO: 10997 - protein, 78 aa, Homo sapiens
MTYLYHYITSYVVDGQRIIYGPAYSGRERVYSNASLLIQNVTQEDAGSYTLHIIKRRDGTGGVTGHFTFTLHLETPKP

SEQ ID NO: 10998 - protein, 96 aa, Homo sapiens
  SITE 1: note = misc_feature - Xaa can be any naturally occurring amino acid
XETPKPSISSSNLNPREAMEAVILTCDPATPAASYQWWMNGQSLPMTHRLQLSKTNRTLFIFGVTKYIAGPYECEIRNPVSASRSDPVTLNLLRSY

SEQ ID NO: 10999 - protein, 244 aa, Homo sapiens
  SITE 1: note = misc_feature - Xaa can be any naturally occurring amino acid
XSLLNFWNPPTTAQVTIEAQPPKVSEGKDVLLLVHNLPQNLAGYIWYKGQMTYLYHYITSYVVDGQRIIYGPAYSGRERVYSNASLLIQNVTQEDAGSYTLHIIKRRDGTGGVTGHFTFTLHPKLSKPYITINNLNPRENKDVLTFTCEPKSKNYTYIWWLNGQSLPVSPRVKRPIENRILILPNVTRNETGPYQCEIRDRYGGIRSDPVTLNVLYGPDLPSIYPSFTYYRSGENLYLSCFAES

SEQ ID NO: 11000 - protein, 258 aa, Homo sapiens
  SITE 1: note = misc_feature - Xaa can be any naturally occurring amino acid
XYIAGPYECEIRNPVSASRSDPVTLNLLPKLSKPYITINNLNPRENKDVLTFTCEPKSKNYTYIWWLNGQSLPVSPRVKRPIENRILILPNVTRNETGPYQCEIRDRYGGIRSDPVTLNVLYGPDLPSIYPSFTYYRSGENLYLSCFAESNPRAQYSWTINGKFQLSGQKLSIPQITTKHSGLYACSVRNSATGKESSKSITVKVSGHISNHWLYYQGFDWDVIFKNIDRMNQYELQAKSEVSLGLASYSQGFCKSLI

SEQ ID NO: 11001 - protein, 428 aa, Homo sapiens
MGPLSAPPCTQHITWKGLLLTASLLNFWNLPITAQVTIEALPPKVSEGKDVLLLVHNLPQNLAGYIWYKGQLMDLYHYITSYVVDGQINIYGPAYTGRETVYSNASLLIQNVTREDAGSYTLHIIKRGDRTRGVTGYFTFNLYLETPKPSISSSNLNPREAMEAVILTCDPAASDTSYLWWMNGQSLPMTHRLQLSKTNRTLFIFGVTKYIAGPYECEIRNPVSASHSDPVTLNLLLKLPKPYITINNSKPRENKDVLAFTCEPKSENYTYIWWLNGQSLPVSPRVKRPIENRILILPSVTRNETGPYECEIRDRDGGMRSDPVTLNVLYGPDLPSIYPSFTYYRSGENLYLSCFAESNPPAEYFWTINGKFQQSGQKLSIPQITTKHRGLYTCSVRNSATGKESSKSMTVEVSAPSGIGRLPLLNPI

SEQ ID NO: 11002 - protein, 335 aa, Homo sapiens
MGPLSAPPCTQHITWKGLLLTASLLNFWNLPITAQVTIEALPPKVSEGKDVLLLVHNLPQNLAGYIWYKGQLMDLYHYITSYVVDGQINIYGPAYTGRETVYSNASLLIQNVTREDAGSYTLHIIKRGDRTRGVTGYFTFNLYLKLPKPYITINNSKPRENKDVLAFTCEPKSENYTYIWWLNGQSLPVSPRVKRPIENRILILPSVTRNETGPYECEIRDRDGGMRSDPVTLNVLYGPDLPSIYPSFTYYRSGENLYLSCFAESNPPAEYFWTINGKFQQSGQKLSIPQITTKHRGLYTCSVRNSATGKESSKSMTVEVSAPSGIGRLPLLNPI

SEQ ID NO: 11003 - protein, 335 aa, Homo sapiens; identical to SEQ ID NO: 11002

SEQ ID NO: 11004 - protein, 333 aa, Homo sapiens
MGPLSAPPCTQHITWKGLLLTASLLNFWNLPITAQVTIEALPPKVSEGKDVLLLVHNLPQNLAGYIWYKGQLMDLYHYITSYVVDGQINIYGPAYTGRETVYSNASLLIQNVTREDAGSYTLHIIKRGDRTRGVTGYFTFNLYLKLPKPYITINNSKPRENKDVLAFTCEPKSENYTYIWWLNGQSLPVSPRVKRPIENRILILPSVTRNETGPYECEIRDRDGGMRSDPVTLNVLYGPDLPSIYPSFTYYRSGENLYLSCFAESNPPAEYFWTINGKFQQSGQKLSIPQITTKHRGLYTCSVRNSATGKESSKSMTVEVSGKWIPASLAIGF

SEQ ID NO: 11005 - protein, 335 aa, Homo sapiens; identical to SEQ ID NO: 11002

SEQ ID NO: 11006 - protein, 157 aa, Homo sapiens
MGPLSAPPCTQHITWKGLLLTASLLNFWNLPITAQVTIEALPPKVSEGKDVLLLVHNLPQNLAGYIWYKGQLMDLYHYITSYVVDGQINIYGPAYTGRETVYSNASLLIQNVTREDAGSYTLHIIKRGDRTRGVTGYFTFNLYPPSGIGRLPLLNPI

SEQ ID NO: 11007 - protein, 158 aa, Homo sapiens [sequence omitted]

SEQ ID NO: 11008 - protein, 331 aa, Homo sapiens
MGPLSAPPCTQHITWKGLLLTASLLNFWNLPTTAQVIIEAKPPKVSEGKDVLLLVHNLPQNLTGYIWYKGQMTDLYHYITSYVVHGQIIYGPAYSGRETVYSNASLLIQNVTQEDAGSYTLHIIKRGDGTGGVTGYFTVTLYSETPKPSISSSNLNPREVMEAVRLICDPETPDASYLWLLNGQNLPMTHRLQLSKTNRTLYLFGVTKYIAGPYECEIRNPVSASRSDPVTLNLLHGPDLPRIYPSFTYYRSGENLDLSCFADSNPPAEYSWTINGKFQLSGQKLFIPQITTNHSGLYACSVRNSATGKEISKSMIVKVSGPCHGNQTESH

SEQ ID NO: 11009 - protein, 424 aa, Homo sapiens
MGPLSAPPCTQHITWKGLLLTASLLNFWNLPTTAQVIIEAKPPKVSEGKDVLLLVHNLPQNLTGYIWYKGQMTDLYHYITSYVVHGQIIYGPAYSGRETVYSNASLLIQNVTQEDAGSYTLHIIKRGDGTGGVTGYFTVTLYSETPKPSISSSNLNPREVMEAVRLICDPETPDASYLWLLNGQNLPMTHRLQLSKTNRTLYLFGVTKYIAGPYECEIRNPVSASRSDPVTLNLLPKLPMPYITINNLNPREKKDVLAFTCEPKSRNYTYIWWLNGQSLPVSPRVKRPIENRILILPSVTRNETGPYQCEIRDRYGGIRSNPVTLNVLYGPDLPRIYPSFTYYRSGENLDLSCFADSNPPAEYSWTINGKFQLSGQKLFIPQITTNHSGLYACSVRNSATGKEISKSMIVKVSGPCHGNQTESH

SEQ ID NO: 11010 - protein, 435 aa, Homo sapiens
MGPLSAPPCTQHITWKGLLLTASLLNFWNLPTTAQVIIEAKPPKVSEGKDVLLLVHNLPQNLTGYIWYKGQMTDLYHYITSYVVHGQIIYGPAYSGRETVYSNASLLIQNVTQEDAGSYTLHIIKRGDGTGGVTGYFTVTLYSETPKPSISSSNLNPREVMEAVRLICDPETPDASYLWLLNGQNLPMTHRLQLSKTNRTLYLFGVTKYIAGPYECEIRNPVSASRSDPVTLNLLPKLPMPYITINNLNPREKKDVLAFTCEPKSRNYTYIWWLNGQSLPVSPRVKRPIENRILILPSVTRNETGPYQCEIRDRYGGIRSNPVTLNVLYGPDLPRIYPSFTYYRSGENLDLSCFADSNPPAEYSWTINGKFQLSGQKLFIPQITTNHSGLYACSVRNSATGKEISKSMIVKVSETASPQVTYAGPNTWFQEILLL

SEQ ID NO: 11011 - protein, 73 aa, Homo sapiens
MTDLYHYITSYVVHGQIIYGPAYSGRETVYSNASLLIQNVTQEDAGSYTLHIIKRGDGTGGVTGYFTVTLYCE

SEQ ID NO: 11012 - protein, 81 aa, Homo sapiens
  SITE 1: note = misc_feature - Xaa can be any naturally occurring amino acid
XEAVRLICDPETPDASYLWLLNGQNLPMTHRLQLSKTNRTLYLFGVTKYIAGPYECEIRNPVSASRSDPVTLNLLRGRCQL

SEQ ID NO: 11013 - protein, 419 aa, Homo sapiens
MGPLSAPPCTQHITWKGLLLTASLLNFWNPPTTAQVTIEAQPPKVSEGKDVLLLVHNLPQNLTGYIWYKGQIRDLYHYVTSYIVDGQIIKYGPAYSGRETVYSNASLLIQNVTQEDTGSYTLHIIKRGDGTGGVTGRFTFTLYLETPKPSISSSNFNPREATEAVILTCDPETPDASYLWWMNGQSLPMTHSLQLSETNRTLYLFGVTNYTAGPYECEIRNPVSASRSDPVTLNLLPKLPKPYITINNLNPRENKDVSTFTCEPKSENYTYIWWLNGQSLPVSPRVKRRIENRILILPSVTRNETGPYQCEIRDRYGGIRSDPVTLNVLYGPDLPRIYPSFTYYHSGQNLYLSCFADSNPPAQYSWTINGKFQLSGQKLSIPQITTKHSGLYACSVRNSATGKESSKSVTVRVSDWTLP

SEQ ID NO: 11014 - protein, 426 aa, Homo sapiens
MGPLSAPPCTQHITWKGLLLTASLLNFWNPPTTAQVTIEAQPPKVSEGKDVLLLVHNLPQNLTGYIWYKGQIRDLYHYVTSYIVDGQIIKYGPAYSGRETVYSNASLLIQNVTQEDTGSYTLHIIKRGDGTGGVTGRFTFTLYLETPKPSISSSNFNPREATEAVILTCDPETPDASYLWWMNGQSLPMTHSLQLSETNRTLYLFGVTNYTAGPYECEIRNPVSASRSDPVTLNLLPKLPKPYITINNLNPRENKDVSTFTCEPKSENYTYIWWLNGQSLPVSPRVKRRIENRILILPSVTRNETGPYQCEIRDRYGGIRSDPVTLNVLYGPDLPRIYPSFTYYHSGQNLYLSCFADSNPPAQYSWTINGKFQLSGQKLSIPQITTKHSGLYACSVRNSATGKESSKSVTVRVSGKWIPASLAIGF

SEQ ID NO: 11015 - protein, 297 aa, Homo sapiens
MGPLSAPPCTQHITWKGLLLTVETPKPSISSSNFNPREATEAVILTCDPETPDASYLWWMNGQSLPMTHSLQLSETNRTLYLFGVTNYTAGPYECEIRNPVSASRSDPVTLNLLPKLPKPYITINNLNPRENKDVSTFTCEPKSENYTYIWWLNGQSLPVSPRVKRRIENRILILPSVTRNETGPYQCEIRDRYGGIRSDPVTLNVLYGPDLPRIYPSFTYYHSGQNLYLSCFADSNPPAQYSWTINGKFQLSGQKLSIPQITTKHSGLYACSVRNSATGKESSKSVTVRVSDWTLP

SEQ ID NO: 11016 - protein, 426 aa, Homo sapiens
MGLLSAPPCTQRITWKGLLLTASLLNFWNPPTTAQVTIEAQPTKVSEGKDVLLLVHNLPQNLTGYIWYKGQIRDLYHYITSYVVDGQIIIYGPAYSGRETIYSNASLLIQNVTQEDAGSYTLHIIMGGDENRGVTGHFTFTLYLETPKPSISSSKLNPREAMEAVSLTCDPETPDASYLWWMNGQSLPMSHRLQLSETNRTLFLLGVTKYTAGPYECEIRNPVSASRSDPFTLNLLPKLPKPYITINNLKPRENKDVLNFTCEPKSENYTYIWWLNGQSLPVSPRVKRPIENRILILPSVTRNETGPYQCEIRDQYGGIRSYPVTLNVLYGPDLPRIYPSFTYYRSGEVLYLSCSADSNPPAQYSWTINGKFQLSGQKLFIPQITTKHSGLYACSVRNSATGKESSKSMTVKVSGKRIPVSLAIGI

SEQ ID NO: 11017 - protein, 419 aa, Homo sapiens
MGLLSAPPCTQRITWKGLLLTASLLNFWNPPTTAQVTIEAQPTKVSEGKDVLLLVHNLPQNLTGYIWYKGQIRDLYHYITSYVVDGQIIIYGPAYSGRETIYSNASLLIQNVTQEDAGSYTLHIIMGGDENRGVTGHFTFTLYLETPKPSISSSKLNPREAMEAVSLTCDPETPDASYLWWMNGQSLPMSHRLQLSETNRTLFLLGVTKYTAGPYECEIRNPVSASRSDPFTLNLLPKLPKPYITINNLKPRENKDVLNFTCEPKSENYTYIWWLNGQSLPVSPRVKRPIENRILILPSVTRNETGPYQCEIRDQYGGIRSYPVTLNVLYGPDLPRIYPSFTYYRSGEVLYLSCSADSNPPAQYSWTINGKFQLSGQKLFIPQITTKHSGLYACSVRNSATGKESSKSMTVKVSDWTLP

SEQ ID NO: 11018 - protein, 40 aa, Homo sapiens
MGLLSAPPCTQRITWKGLLLTGHSLDSALSLEVTGSSQPL

SEQ ID NO: 11019 - protein, 297 aa, Homo sapiens
MGLLSAPPCTQRITWKGLLLTVETPKPSISSSKLNPREAMEAVSLTCDPETPDASYLWWMNGQSLPMSHRLQLSETNRTLFLLGVTKYTAGPYECEIRNPVSASRSDPFTLNLLPKLPKPYITINNLKPRENKDVLNFTCEPKSENYTYIWWLNGQSLPVSPRVKRPIENRILILPSVTRNETGPYQCEIRDQYGGIRSYPVTLNVLYGPDLPRIYPSFTYYRSGEVLYLSCSADSNPPAQYSWTINGKFQLSGQKLFIPQITTKHSGLYACSVRNSATGKESSKSMTVKVSDWTLP

SEQ ID NO: 11020 - protein, 326 aa, Homo sapiens
MGPLSAPPCTQHIKWKGVLLTASLLNFWNPPTTAQVTIEAQPTKVSEGKDVLLLVHNLPQNLTGYIWYKGQIRDLYHYITSYVVDGQIIIYGPAYSGRETIYSNASLLIQNVTQEDAGSYTLHIIMGGDENRGVTGHFTFTLYPKLPKPYITINNLKPRENKDVLNFTCEPKSENYTYIWWLNGQSLPVSPRVKRPIENRILILPSVTRNETGPYQCEIRDQYGGIRSYPVTLNVLYGPDLPRIYPSFTYYRSGEVLYLSCSADSNPPAQYSWTINGKFQLSGQKLFIPQITTKHSGLYACSVRNSATGKESSKSMTVKVSDWTLP

SEQ ID NO: 11021 - protein, 402 aa, Homo sapiens
MGPLPAPSCTQRITWKGLLLTASLLNFWNPPTTAEVTIEAQPPKVSEGKDVLLLVHNLPQNLPGYFWYKGEMTDLYHYIISYIVDGKIIIYGPAYSGRETVYSNASLLIQNVTRKDAGTYTLHIIKRGDETREEIRHFTFTLYLETPKPYISSSNLNPREAMEAVRLICDPETLDASYLWWMNGQSLPVTHRLQLSKTNRTLYLFGVTKYIAGPYECEIRNPVSASRSDPVTLNLLHGPDLPRIYPSFTYYRSGENLDLSCFTESNPPAEYFWTINGKFQQSGQKLFIPQITRNHSGLYACSVHNSATGKEISKSMTVKVSGKWIPASLAVGFYVESIWLSEKSQENIFIPSLCPMGTSKSQILLLNPPNLSLQTLFSLFFCFLMADLVSGLKKVGRGLYQP

SEQ ID NO: 11022 - protein, 333 aa, Homo sapiens
MGPLPAPSCTQRITWKGLLLTASLLNFWNPPTTAEVTIEAQPPKVSEGKDVLLLVHNLPQNLPGYFWYKGEMTDLYHYIISYIVDGKIIIYGPAYSGRETVYSNASLLIQNVTRKDAGTYTLHIIKRGDETREEIRHFTFTLYLETPKPYISSSNLNPREAMEAVRLICDPETLDASYLWWMNGQSLPVTHRLQLSKTNRTLYLFGVTKYIAGPYECEIRNPVSASRSDPVTLNLLHGPDLPRIYPSFTYYRSGENLDLSCFTESNPPAEYFWTINGKFQQSGQKLFIPQITRNHSGLYACSVHNSATGKEISKSMTVKVSGPCHGDLTESQS

SEQ ID NO: 11023 - protein, 426 aa, Homo sapiens
MGPLPAPSCTQRITWKGLLLTASLLNFWNPPTTAEVTIEAQPPKVSEGKDVLLLVHNLPQNLPGYFWYKGEMTDLYHYIISYIVDGKIIIYGPAYSGRETVYSNASLLIQNVTRKDAGTYTLHIIKRGDETREEIRHFTFTLYLETPKPYISSSNLNPREAMEAVRLICDPETLDASYLWWMNGQSLPVTHRLQLSKTNRTLYLFGVTKYIAGPYECEIRNPVSASRSDPVTLNLLPKLPIPYITINNLNPRENKDVLAFTCEPKSENYTYIWWLNGQSLPVSPGVKRPIENRILILPSVTRNETGPYQCEIRDRYGGLRSNPVILNVLYGPDLPRIYPSFTYYRSGENLDLSCFTESNPPAEYFWTINGKFQQSGQKLFIPQITRNHSGLYACSVHNSATGKEISKSMTVKVSGPCHGDLTESQS

SEQ ID NO: 11024 - protein, 419 aa, Homo sapiens
MGPLPAPSCTQRITWKGLLLTASLLNFWNPPTTAEVTIEAQPPKVSEGKDVLLLVHNLPQNLPGYFWYKGEMTDLYHYIISYIVDGKIIIYGPAYSGRETVYSNASLLIQNVTRKDAGTYTLHIIKRGDETREEIRHFTFTLYLETPKPYISSSNLNPREAMEAVRLICDPETLDASYLWWMNGQSLPVTHRLQLSKTNRTLYLFGVTKYIAGPYECEIRNPVSASRSDPVTLNLLPKLPIPYITINNLNPRENKDVLAFTCEPKSENYTYIWWLNGQSLPVSPGVKRPIENRILILPSVTRNETGPYQCEIRDRYGGLRSNPVILNVLYGPDLPRIYPSFTYYRSGENLDLSCFTESNPPAEYFWTINGKFQQSGQKLFIPQITRNHSGLYACSVHNSATGKEISKSMTVKVSDWILP

SEQ ID NO: 11025 - protein, 326 aa, Homo sapiens
MGPLPAPSCTQRITWKGLLLTASLLNFWNPPTTAEVTIEAQPPKVSEGKDVLLLVHNLPQNLPGYFWYKGEMTDLYHYIISYIVDGKIIIYGPAYSGRETVYSNASLLIQNVTRKDAGTYTLHIIKRGDETREEIRHFTFTLYSKLPIPYITINNLNPRENKDVLAFTCEPKSENYTYIWWLNGQSLPVSPGVKRPIENRILILPSVTRNETGPYQCEIRDRYGGLRSNPVILNVLYGPDLPRIYPSFTYYRSGENLDLSCFTESNPPAEYFWTINGKFQQSGQKLFIPQITRNHSGLYACSVHNSATGKEISKSMTVKVSDWILP

SEQ ID NO: 11026 - protein, 333 aa, Homo sapiens
MGPLPAPSCTQRITWKGLLLTASLLNFWNPPTTAEVTIEAQPPKVSEGKDVLLLVHNLPQNLPGYFWYKGEMTDLYHYIISYIVDGKIIIYGPAYSGRETVYSNASLLIQNVTRKDAGTYTLHIIKRGDETREEIRHFTFTLYSKLPIPYITINNLNPRENKDVLAFTCEPKSENYTYIWWLNGQSLPVSPGVKRPIENRILILPSVTRNETGPYQCEIRDRYGGLRSNPVILNVLYGPDLPRIYPSFTYYRSGENLDLSCFTESNPPAEYFWTINGKFQQSGQKLFIPQITRNHSGLYACSVHNSATGKEISKSMTVKVSGPCHGDLTESQS

SEQ ID NO: 11027 - protein, 309 aa, Homo sapiens
MGPLPAPSCTQRITWKGLLLTASLLNFWNPPTTAEVTIEAQPPKVSEGKDVLLLVHNLPQNLPGYFWYKGEMTDLYHYIISYIVDGKIIIYGPAYSGRETVYSNASLLIQNVTRKDAGTYTLHIIKRGDETREEIRHFTFTLYYGPDLPRIYPSFTYYRSGENLDLSCFTESNPPAEYFWTINGKFQQSGQKLFIPQITRNHSGLYACSVHNSATGKEISKSMTVKVSGKWIPASLAVGFYVESIWLSEKSQENIFIPSLCPMGTSKSQILLLNPPNLSLQTLFSLFFCFLMADLVSGLKKVGRGLYQP

SEQ ID NO: 11028 - protein, 240 aa, Homo sapiens
MGPLPAPSCTQRITWKGLLLTASLLNFWNPPTTAEVTIEAQPPKVSEGKDVLLLVHNLPQNLPGYFWYKGEMTDLYHYIISYIVDGKIIIYGPAYSGRETVYSNASLLIQNVTRKDAGTYTLHIIKRGDETREEIRHFTFTLYYGPDLPRIYPSFTYYRSGENLDLSCFTESNPPAEYFWTINGKFQQSGQKLFIPQITRNHSGLYACSVHNSATGKEISKSMTVKVSGPCHGDLTESQS

SEQ ID NO: 11029 - protein, 953 aa, Homo sapiens [sequence omitted]

SEQ ID NO: 11030 - protein, 953 aa, Homo sapiens
MITSAAGIISLLDEDEPQLKEFALHKLNAVVNDFWAEISESVDKIEVLYEDEGFRSRQFAALVASKVFYHLGAFEESLNYALGAGDLFNVNDNSEYVETIIAKCIDHYTKQCVENADLPEGEKKPIDQRLEGIVNKMFQRCLDDHKYKQAIGIALETRRLDVFEKTILESNDVPGMLAYSLKLCMSLMQNKQFRNKVLRVLVKIYMNLEKPDFINVCQCLIFLDDPQAVSDILEKLVKEDNLLMAYQICFDLYESASQQFLSSVIQNLRTVGTPIASVPGSTNTGTVPGSEKDSDSMETEEKTSSAFVGKTPEASPEPKDQTLKMIKILSGEMAIELHLQFLIRNNNTDLMILKNTKDAVRNSVCHTATVIANSFMHCGTTSDQFLRDNLEWLARATNWAKFTATASLGVIHKGHEKEALQLMATYLPKDTSPGSAYQEGGGLYALGLIHANHGGDIIDYLLNQLKNASNDIVRHGGSLGLGLAAMGTARQDVYDLLKTNLYQDDAVTGEAAGLALGLVMLGSKNAQAIEDMVGYAQETQHEKILRGLAVGIALVMYGRMEEADALIESLCRDKDPILRRSGMYTVAMAYCGSGNNKAIRRLLHVAVSDVNDDVRRAAVESLGFILFRTPEQCPSVVSLLSESYNPHVRYGAAMALGICCAGTGNKEAINLLEPMTNDPVNYVRQGALIASALIMIQQTEITCPKVNQFRQLYSKVINDKHDDVMAKFGAILAQGILDAGGHNVTISLQSRTGHTHMPSVVGVLVFTQFWFWFPLSHFLSLAYTPTCVIGLNKDLKMPKVQYKSNCKPSTFAYPAPLEVPKEKEKEKVSTAVLSITAKAKKKEKEKEKKEEEKMEVDEAEKKEEKEKKKEPEPNFQLLDNPARVMPAQLKVLTMPETCRYQPFKPLSIGGIIILKDTSEDIEELVEPVAAHGPKIEEEEQEPEPPEPFEYIDD

SEQ ID NO: 11031 - protein, 922 aa, Homo sapiens
MITSAAGIISLLDEDEPQLKEFALHKLNAVVNDFWAEISESVDKIEVLYEDEGFRSRQFAALVASKVFYHLGAFEESLNYALGAGDLFNVNDNSEYVETIIAKCIDHYTKQCVENADLPEGEKKPIDQRLEGIVNKMFQRCLDDHKYKQAIGIALETRRLDVFEKTILESNDVPGMLAYSLKLCMSLMQNKQFRNKVLRVLVKIYMNLEKPDFINVCQCLIFLDDPQAVSDILEKLVKEDNLLMAYQICFDLYESASQQFLSSVIQNLRTVGTPIASVPGSTNTGTVPGSEKDSDSMETEEKTSSAFVGKTPEASPEPKDQTLKMIKILSGEMAIELHLQFLIRNNNTDLMILKNTKDAVRNSVCHTATVIANSFMHCGTTSDQFLRDNLEWLARATNWAKFTATASLGVIHKGHEKEALQLMATYLPKDTSPGSAYQEGGGLYALGLIHANHGGDIIDYLLNQLKNASNDIVRHGGSLGLGLAAMGTARQDVYDLLKTNLYQDDAVTGEAAGLALGLVMLGSKNAQAIEDMVGYAQETQHEKILRGLAVGIALVMYGRMEEADALIESLCRDKDPILRRSGMYTVAMAYCGSGNNKAIRRLLHVAVSDVNDDVRRAAVESLGFILFRTPEQCPSVVSLLSESYNPHVRYGAAMALGICCAGTGNKEAINLLEPMTNDPVNYVRQGALIASALIMIQQTEITCPKVNQFRQLYSKVINDKHDDVMAKFGAILAQGILDAGGHNVTISLQSRTGHTHMPSVVGVLVFTQFWFWFPLSHFLSLAYTPTCVIGLNKDLKVSTAVLSITAKAKKKEKEKEKKEEEKMEVDEAEKKEEKEKKKEPEPNFQLLDNPARVMPAQLKVLTMPETCRYQPFKPLSIGGIIILKDTSEDIEELVEPVAAHGPKIEEEEQEPEPPEPFEYIDD

SEQ ID NO: 11032 - protein, 922 aa, Homo sapiens; identical to SEQ ID NO: 11031

SEQ ID NO: 11033 - protein, 203 aa, Homo sapiens
MITSAAGIISLLDEDEPQLKEFALHKLNAVVNDFWAEISESVDKIEVLYEDEGFRSRQFAALVASKVFYHLGAFEESLNYALGAGDLFNVNDNSEYVETIIGNYRLSAKCIDHYTKQCVENADLPEGEKKPIDQRLEGIVNKMFQRCLDDHKYKQAIGIALETRRLDVFEKTILESNDVPGMLAYSLKLCMSLMQNKQFRNKV

SEQ ID NO: 11034 - protein, 48 aa, Homo sapiens
MITSAAGIISLLDEDEPQLKEFALHKLNAVVNDFWAEISESVDKIKMH

SEQ ID NO: 11035 - protein, 164 aa, Homo sapiens
  SITE 1: note = misc_feature - Xaa can be any naturally occurring amino acid
XAKCIDHYTKQCVENADLPEGEKKPIDQRLEGIVNKMFQRCLDDHKYKQAIGIALETRRLDVFEKTILESNDVPGMLAYSLKLCMSLMQNKQFRNKVLRVLVKIYMNLEKPDFINVCQNLRTVGTPIASVPGSTNTGTVPGSEKDSDSMETEEKTSSAFVGKTP

SEQ ID NO: 11036 - protein, 192 aa, Homo sapiens
  SITE 1: note = misc_feature - Xaa can be any naturally occurring amino acid
XGEAAGLALGLVMLGSKNAQAIEDMVGYAQETQHEKILRGLAVGIALVMYGRMEEADALIESLCRDKDPILRRSGMYTVAMAYCGSGNNKAIRRLLHVAVSDVNDDVRRAAVESLGFILFRTPEQCPSVVSLLSESYNPHVRYGAAMALGICCAGTGNKVKPTANGVSSFLAPDCFPSPQNLCNSCKNTSAM

SEQ ID NO: 11037 - protein, 136 aa, Homo sapiens
MILNWKLLGILVLCLHTRGISGSEGHPSHPPAEDREEAGSPTLPQGPPVPGDPWPGAPPLFEDPPPTRPSRPWRDLPETGVWLPEPPRTDPPQPPRPDDPWPAGPQPPENPWPPAPEVDNRPQEEPDLDPPREEYR

SEQ ID NO: 11038 - protein, 164 aa, Homo sapiens
MAVGKFLLGSLLLLSLQLGQGWGPDARGVPVADGEFSSEQVAKAGGTWLGKDFQGPSVTSQLSPALTLLTVSALPSHRHPPPPCPPAPSPVWSMPAVEPDPVRGRARPGLRLRGEGHLPLLRRQLPPWCPHPAWPGAGPAAGPGPSPRRALLPAHSLHRRGLPR

SEQ ID NO: 11039 - protein, 156 aa, Homo sapiens
MAVGKFLLGSLLLLSLQLGQGWGPDARGVPVADGEFSSEQVAKAGGTWLGTHRPLARLRRALSGPCQLWSLTLSVAELGLGYASEEKVIFRYCAGSCPRGARTQHGLALARLQGQGRAHGGPCCRPTRYTDVAFLDDRHRWQRLPQLSAAACGCGG

SEQ ID NO: 11040 - protein, 48 aa, Homo sapiens
MATHHTLWMGLALLGVLGDLQAAPEAQVSVQPNFQQDKFLGRWFSAGL

SEQ ID NO: 11041 - protein, 190 aa, Homo sapiens
MATHHTLWMGLALLGVLGDLQAAPEAQVSVQPNFQQDKFLGRWFSAGLASNSSWLREKKAALSMCKSVVAPATDGGLNLTSTFLRKNQCETRTMLLQPAGSLGSYSYRSPHWGSTYSVSVVETDYDQYALLYSQGSKGPGEDFRMATLYSRTQTPRAELKEKFTAFCKAQGFTEDTIVFLPQTDKCMTEQ

SEQ ID NO: 11042 - protein, 195 aa, Homo sapiens
MATHHTLWMGLALLGVLGDLQAAPEAQVSVQPNFQQDKFLGRWFSAGLASNSSWLREKKAALSMCKSVVAPATDGGLNLTSTFLRKNQCETRTMLLQPAGSLGSYSYRSPREWGLHRPPGPSLGATLAGTTLGQPPAAEIHGVGDWGSTYSVSVVETDYDQYALLYSQGSKGPGEDFRMATLYSRTQTPRAELKE

SEQ ID NO: 11043 - protein, 124 aa, Homo sapiens
VVAPATDGGLNLTSTFLRKNQCETRTMLLQPAGSLGSYSYRSPHWGSTYSVSVVETDYDQYALLYSQGSKGPGEDFRMATLYSRTQTPRAELKEKFTAFCKAQGFTEDTIVFLPQTAPGFFLGR

SEQ ID NO: 11044 - protein, 62 aa, Homo sapiens
  SITE 1: note = misc_feature - Xaa can be any naturally occurring amino acid
XGYHCLPAPNRAQGEVGGDGGSVQFGGSVKTSSALREEQEAQWENWPKSGVLTTAPGFFLGR

SEQ ID NO: 11045 - protein, 386 aa, Homo sapiens [sequence omitted]

SEQ ID NO: 11046 - protein, 296 aa, Homo sapiens
MADSCRNLTYVRGSVGPATSTLMFVAGVVGNGLALGILSARRPARPSAFAVLVTGLAATDLLGTSFLSPAVFVAYARNSSLLGLARGGPALCDAFAFAMTFFGLASMLILFAMAVERCLALSHPYLYAQLDGPRCARLALPAIYAFCVLFCALPLLGLGQHQQYCPGSWCFLRMRWAQPGGAAFSLAYAGLVALLVAAIFLCNGSVTLSLCRMYRQQKRHQGSLGPRPRTGEDEVDHLILLALMTVVMAVCSLPLTHVERPRQDRMRWLTPVIPALWEAEAGGSFEVRSSRPVWPT

SEQ ID NO: 11047 - protein, 115 aa, Homo sapiens
MGDLLAFRFYAFNPILDPWVFILFRKAVFQRLKLWVCCLCLGPAHGDSQTPLSQLASGRRDPRAPSAPVGKEGSCVPLSAWGEGQVEPLPPTQQSSGSAVGTSSKAEASVACSLC

SEQ ID NO: 11048 - protein, 143 aa, Homo sapiens
MTVVMAVCSLPLTIRCFTQAVAPDSSSEMGDLLAFRFYAFNPILDPWVFILFRKAVFQRLKLWVCCLCLGPAHGDSQTPLSQLASGRRDPRAPSAPVGKEGSCVPLSAWGEGQVEPLPPTQQSSGSAVGTSSKAEASVACSLC

SEQ ID NO: 11049 - protein, 174 aa, Homo sapiens
MYRQQKRHQGSLGPRPRTGEDEVDHLILLALMTVVMAVCSLPLTIRCFTQAVAPDSSSEMGDLLAFRFYAFNPILDPWVFILFRKAVFQRLKLWVCCLCLGPAHGDSQTPLSQLASGRRDPRAPSAPVGKEGSCVPLSAWGEGQVEPLPPTQQSSGSAVGTSSKAEASVACSLC

SEQ ID NO: 11050 - protein, 490 aa, Homo sapiens
MLMRLVLTVRSNLIPSPPTYNSAHDYISWESFSNVSYYTRILPSVPKDCPTPMGTKGKKQLPDAQLLARRFLLRRKFIPDPQGTNLMFAFFAQHFTHQFFKTSGKMGPGFTKALGHGVDLGHIYGDNLERQYQLRLFKDGKLKYQVLDGEMYPPSVEEAPVLMHYPRGIPPQSQMAVGQEVFGLLPGLMLYATLWLREHNRVCDLLKAEHPTWGDEQLFQTTRLILIGETIKIVIEEYVQQLSGYFLQLKFDPELLFGVQFQYRNRIAMEFNHLYHWHPLMPDSFKVGSQEYSYEQFLFNTSMLVDYGVEALVDAFSRQIAGRIGGGRNMDHHILHVAVDVIRESREMRLQPFNEYRKRFGMKPYTSFQELVGEKEMAAELEELYGDIDALEFYPGLLLEKCHPNSIFGESMIEIGAPFSLKGLLGNPICSPEYWKPSTFGGEVGFNIVKTATLKKLVCLNTKTCPYVSFRVPDASQDDGPAVERPSTEL

SEQ ID NO: 11051 - protein, 402 aa, Homo sapiens
MLMRLVLTVRSNLIPSPPTYNSAHDYISWESFSNVSYYTRILPSVPKDCPTPMGTKGKKQLPDAQLLARRFLLRRKFIPDPQGTNLMFAFFAQHFTHQFFKTSGKMGPGFTKALGHGVDLGHIYGDNLERQYQLRLFKDGKLKYQVLDGEMYPPSVEEAPVLMHYPRGIPPQSQMAVGQEVFGLLPGLMLYATLWLREHNRVCDLLKAEHPTWGDEQLFQTTRLILIGETIKIVIEEYVQQLSGYFLQLKFDPELLFGVQFQYRNRIAMEFNHLYHWHPLMPDSFKIGGGRNMDHHILHVAVDVIRESREMRLQPFNEYRKRFGMKPYTSFQELVGEKEMAAELEELYGDIDALEFYPGLLLEKCHPNSIFGESMIEIGAPFSLKGLLGNPICSPEYWKPST

SEQ ID NO: 11052 - protein, 537 aa, Homo sapiens
MRKPRLMNPCCYYPCQHQGICVRFGLDRYQCDCTRTGYSGPNCTIPGLWTWLRNSLRPSPSFTHFLLTHGRWFWEFVNATFIREMLMRLVLTVRSNLIPSPPTYNSAHDYISWESFSNVSYYTRILPSVPKDCPTPMGTKGKKQLPDAQLLARRFLLRRKFIPDPQGTNLMFAFFAQHFTHQFFKTSGKMGPGFTKALGHGVDLGHIYGDNLERQYQLRLFKDGKLKYQVLDGEMYPPSVEEAPVLMHYPRGIPPQSQMAVGQEVFGLLPGLMLYATLWLREHNRVCDLLKAEHPTWGDEQLFQTTRLILIGETIKIVIEEYVQQLSGYFLQLKFDPELLFGVQFQYRNRIAMEFNHLYHWHPLMPDSFKIGGGRNMDHHILHVAVDVIRESREMRLQPFNEYRKRFGMKPYTSFQELVGEKEMAAELEELYGDIDALEFYPGLLLEKCHPNSIFGESMIEIGAPFSLKGLLGNPICSPEYWKPSTFGGEVGFNIVKTATLKKLVCLNTKTCPYVSFRVPDASQDDGPAVERPSTEL

SEQ ID NO: 11053 - protein, 172 aa, Homo sapiens
MSRSLLLWFLLFLLLLPPLPVLLADPGAPTPAGLWTWLRNSLRPSPSFTHFLLTHGRWFWEFVNATFIREMLMRLVLTVRSNLIPSPPTYNSAHDYISWESFSNFFKTSGKMGPGFTKALGHGVDLGHIYGDNLERQYQLRLFKDGKLKYQVLDGEMYPPSVEEAPVLMHYP

SEQ ID NO: 11054 - protein, 41 aa, Homo sapiens
MSRSLLLWFLLFLLLLPPLPVLLADPGAPTPAPGHLCPLRP

SEQ ID NO: 11055 - protein, 551 aa, Homo sapiens
MSRSLLLWFLLFLLLLPPLPVLLADPGAPTPVNPCCYYPCQHQGICVRFGLDRYQCDCTRTGYSGPNCTIPGLWTWLRNSLRPSPSFTHFLLTHGRWFWEFVNATFIREMLMRLVLTGKKQLPDAQLLARRFLLRRKFIPDPQGTNLMFAFFAQHFTHQFFKTSGKMGPGFTKALGHGVDLGHIYGDNLERQYQLRLFKDGKLKYQVLDGEMYPPSVEEAPVLMHYPRGIPPQSQMAVGQEVFGLLPGLMLYATLWLREHNRVCDLLKAEHPTWGDEQLFQTTRLILIGETIKIVIEEYVQQLSGYFLQLKFDPELLFGVQFQYRNRIAMEFNHLYHWHPLMPDSFKVGSQEYSYEQFLFNTSMLVDYGVEALVDAFSRQIAGRIGGGRNMDHHILHVAVDVIRESREMRLQPFNEYRKRFGMKPYTSFQELVGEKEMAAELEELYGDIDALEFYPGLLLEKCHPNSIFGESMIEIGAPFSLKGLLGNPICSPEYWKPSTFGGEVGFNIVKTATLKKLVCLNTKTCPYVSFRVPDASQDDGPAVERPSTEL

SEQ ID NO: 11056 - protein, 562 aa, Homo sapiens
MSRSLLLWFLLFLLLLPPLPVLLADPGAPTPVNPCCYYPCQHQGICVRFGLDRYQCDCTRTGYSGPNCTIPGLWTWLRNSLRPSPSFTHFLLTHGRWFWEFVNATFIREMLMRLVLTVRSNLIPSPPTYNSAHDYISWESFSNVSYYTRILPSVPKDCPTPMGTKGKKQLPDAQLLARRFLLRRKFIPDPQGTNLMFAFFAQHFTHQFFKTSGKMGPGFTKALGHGVDLGHIYGDNLERQYQLRLFKDGKLKYQVLDGEMYPPSVEEAPVLMHYPRGIPPQSQMAVGQEVFGLLPGLMLYATLWLREHNRVCDLLKAEHPTWGDEQLFQTTRLILIGETIKIVIEEYVQQLSGYFLQLKFDPELLFGVQFQYRNRIAMEFNHLYHWHPLMPDSFKIGGGRNMDHHILHVAVDVIRESREMRLQPFNEYRKRFGMKPYTSFQELVGEKEMAAELEELYGDIDALEFYPGLLLEKCHPNSIFGESMIEIGAPFSLKGLLGNPICSPEYWKPSTFGGEVGFNIVKTATLKKLVCLNTKTCPYVSFRVPDASQDDGPAVERPSTEL

SEQ ID NO: 11057 - protein, 599 aa, Homo sapiens
MSRSLLLWFLLFLLLLPPLPVLLADPGAPTPVNPCCYYPCQHQGICVRFGLDRYQCDCTRTGYSGPNCTIPGLWTWLRNSLRPSPSFTHFLLTHGRWFWEFVNATFIREMLMRLVLTVRSNLIPSPPTYNSAHDYISWESFSNVSYYTRILPSVPKDCPTPMGTKGKKQLPDAQLLARRFLLRRKFIPDPQGTNLMFAFFAQHFTHQFFKTSGKMGPGFTKALGHGVDLGHIYGDNLERQYQLRLFKDGKLKYQVLDGEMYPPSVEEAPVLMHYPRGIPPQSQMAVGQEVFGLLPGLMLYATLWLREHNRVCDLLKAEHPTWGDEQLFQTTRLILIGETIKIVIEEYVQQLSGYFLQLKFDPELLFGVQFQYRNRIAMEFNHLYHWHPLMPDSFKVGSQEYSYEQFLFNTSMLVDYGVEALVDAFSRQIAGRIGGGRNMDHHILHVAVDVIRESREMRLQPFNEYRKRFGMKPYTSFQELVGEKEMAAELEELYGDIDALEFYPGLLLEKCHPNSIFGESMIEIGAPFSLKGLLGNPICSPEYWKPSTFGGEVGFNIVKTATLKKLVCLNTKTCPYVSFRVPDASQDDGPAVERPSTEL

SEQ ID NO: 11058 - protein, 599 aa, Homo sapiens; identical to SEQ ID NO: 11057

SEQ ID NO: 11059 - protein, 163 aa, Homo sapiens
MLARALLLCAVLALSHTANPCCSHPCQNRGVCMSVGFDQYKCDCTRTGFYGENCSTPEFLTRIKLFLKPTPNTVHYILTHFKGFWNVVNNIPFLRNAIMSYVLTSRSHLIDSPPTYNADYGYKSWEAFSNLSYYTRALPPVPDDCPTPLGVKALHASVFQDRS

SEQ ID NO: 11060 - protein, 604 aa, Homo sapiens
MLARALLLCAVLALSHTANPCCSHPCQNRGVCMSVGFDQYKCDCTRTGFYGENCSTPEFLTRIKLFLKPTPNTVHYILTHFKGFWNVVNNIPFLRNAIMSYVLTSRSHLIDSPPTYNADYGYKSWEAFSNLSYYTRALPPVPDDCPTPLGVKGKKQLPDSNEIVEKLLLRRKFIPDPQGSNMMFAFFAQHFTHQFFKTDHKRGPAFTNGLGHGVDLNHIYGETLARQRKLRLFKDGKMKYQIIDGEMYPPTVKDTQAEMIYPPQVPEHLRFAVGQEVFGLVPGLMMYATIWLREHNRVCDVLKQEHPEWGDEQLFQTSRLILIGETIKIVIEDYVQHLSGYHFKLKFDPELLFNKQFQYQNRIAAEFNTLYHWHPLLPDTFQIHDQKYNYQQFIYNNSILLEHGITQFVESFTRQIAGRVAGGRNVPPAVQKVSQASIDQSRQMKYQSFNEYRKRFMLKPYESFEELTGEKEMSAELEALYGDIDAVELYPALLVEKPRPDAIFGETMVEVGAPFSLKGLMGNVICSPAYWKPSTFGGEVGFQIINTASIQSLICNNVKGCPFTSFSVPDPELIKTVTINASSSRSGLDDINPTVLLKERSTEL

SEQ ID NO: 11061 - protein, 115 aa, Homo sapiens
MIPAKDMAKVMIVMLAICFLTKSDGKSVKKRSVSEIQLMHNLGKHLNSMERVEWLRKKLQDVHNFVALGAPLAPRDAGSQRPRKKEDNVLVESHEKSLGEADKADVNVLTKAKSQ

SEQ ID NO: 11062 - protein, 115 aa, Homo sapiens; identical to SEQ ID NO: 11061

SEQ ID NO: 11063 - protein, 100 aa, Homo sapiens
METRQVSRSPRVRLLLLLLLLLVVPWGVRTASGVALPPVGVLSLRPPGRAWADPATPRPRRSLALADDAAFRERARLLAALERRHWLNSYMHKLLVLDAP

SEQ ID NO: 11064 - protein, 172 aa, Homo sapiens
MQRRLVQQWSVAVFLLSYAVPSCGRSVEGLSRRLKRAVSEHQLLHDKGKSIQDLRRRFFLHHLIAEIHTAEIRATSEVSPNSKPSPNTKNHPVRFGSDDEGRYLTQETNKVETYKEQPLKTPGKKKKGKPGKRKEQEKKKRRTRSAWLDSGVTGSGLEGDHLSDTSTTSLEL

SEQ ID NO: 11065 - protein, 175 aa, Homo sapiens
MQRRLVQQWSVAVFLLSYAVPSCGRSVEGLSRRLKRAVSEHQLLHDKGKSIQDLRRRFFLHHLIAEIHTAEIRATSEVSPNSKPSPNTKNHPVRFGSDDEGRYLTQETNKVETYKEQPLKTPGKKKKGKPGKRKEQEKKKRRTRSAWLDSGVTGSGLEGDHLSDTSTTSLELDSR

SEQ ID NO: 11066 - protein, 175 aa, Homo sapiens; identical to SEQ ID NO: 11065

SEQ ID NO: 11067 - protein, 175 aa, Homo sapiens; identical to SEQ ID NO: 11065

SEQ ID NO: 11068 - protein, 177 aa, Homo sapiens
MQRRLVQQWSVAVFLLSYAVPSCGRSVEGLSRRLKRAVSEHQLLHDKGKSIQDLRRRFFLHHLIAEIHTAEIRATSEVSPNSKPSPNTKNHPVRFGSDDEGRYLTQETNKVETYKEQPLKTPGKKKKGKPGKRKEQEKKKRRTRSAWLDSGVTGSGLEGDHLSDTSTTSLELDSRRH

SEQ ID NO: 11069 - protein, 177 aa, Homo sapiens; identical to SEQ ID NO: 11068

SEQ ID NO: 11070 - protein, 177 aa, Homo sapiens; identical to SEQ ID NO: 11068

SEQ ID NO: 11071 - protein, 209 aa, Homo sapiens
MQRRLVQQWSVAVFLLSYAVPSCGRSVEGLSRRLKRAVSEHQLLHDKGKSIQDLRRRFFLHHLIAEIHTAEIRATSEVSPNSKPSPNTKNHPVRFGSDDEGRYLTQETNKVETYKEQPLKTPGKKKKGKPGKRKEQEKKKRRTRSAWLDSGVTGSGLEGDHLSDTSTTSLELDSRTALLWGLKKKKENNRRTHHMQLMISLFKSPLLLL

SEQ ID NO: 11072 - protein, 111 aa, Homo sapiens
MSRARAETMQRRLVQQWSVAVFLLSYAVPSCGRSVEGLSRRLKRAVSEHQLLHDKGKSIQDLRRRFFLHHLIAEIHTAEIRATSEVSPNSKPSPNTKNHPVRFGSDDEGRY

SEQ ID NO: 11073 - protein, 269 aa, Homo sapiens
FSAQPPPSLQWLFEDETPITNRSRPPHLRRATVFANGSLLLTQVRPRNAGIYRCIGQGQRGPPIILEATLHLAEIEDMPLFEPRVFTAGSEERVTCLPPKGLPEPSVWWEHAGVRLPTHGRVYQKGHELVLANIAESDAGVYTCHAANLAGQRRQDVNITVASEHLCPEGQGEVEGNTGLGVMDRGFPAVPSWLKKPQDSQLEEGKPGYLDCLTQATPKPTVVWYRNQMLISEDSRFEVFKNGTLRINSVEVYDGTWYRCMSSTPAGSI

SEQ ID NO: 11074 - protein, 139 aa, Homo sapiens
MGAARGSPARPRRLPLLSVLLLPLLGGTQTAIVFIKQPSSQDALQGRRALLRCEVEAPGPVHVYWLLDGAPVQDTERRFAQGSSLSFAAVDRLQDSGTFQCVARDDVTGEEARSANASFNIKCESQGGCAQSPCQTLND

SEQ ID NO: 11075 - protein, 157 aa, Homo sapiens
MGAARGSPARPRRLPLLSVLLLPLLGGTQTAIVFIKQPSSQDALQGRRALLRCEVEAPGPVHVYWLLDGAPVQDTERRFAQGSSLSFAAVDRLQDSGTFQCVARDDVTGEEARSANASFNIKWIEAGPVVLKHPASEAEIQPQTQVTLRCHIDGHPR

SEQ ID NO: 11076 - protein, 1070 aa, Homo sapiens
MGAARGSPARPRRLPLLSVLLLPLLGGTQTAIVFIKQPSSQDALQGRRALLRCEVEAPGPVHVYWLLDGAPVQDTERRFAQGSSLSFAAVDRLQDSGTFQCVARDDVTGEEARSANASFNIKWIEAGPVVLKHPASEAEIQPQTQVTLRCHIDGHPRPTYQWFRDGTPLSDGQSNHTVSSKERNLTLRPAGPEHSGLYSCCAHSAFGQACSSQNFTLSIADESFARVVLAPQDVVVARYEEAMFHCQFSAQPPPSLQWLFEDETPITNRSRPPHLRRATVFANGSLLLTQVRPRNAGIYRCIGQGQRGPPIILEATLHLAEIEDMPLFEPRVFTAGSEERVTCLPPKGLPEPSVWWEHAGVRLPTHGRVYQKGHELVLANIAESDAGVYTCHAANLAGQRRQDVNITVATVPSWLKKPQDSQLEEGKPGYLDCLTQATPKPTVVWYRNQMLISEDSRFEVFKNGTLRINSVEVYDGTWYRCMSSTPAGSIEAQARVQVLEKLKFTPPPQPQQCMEFDKEATVPCSATGREKPTIKWERADGSSLPEWVTDNAGTLHFARVTRDDAGNYTCIASNGPQGQIRAHVQLTVAVFITFKVEPERTTVYQGHTALLQCEAQGDPKPLIQWKGKDRILDPTKLGPRMHIFQNGSLVIHDVAPEDSGRYTCIAGNSCNIKHTEAPLYVVDKPVPEESEGPGSPPPYKMIQTIGLSVGAAVAYIIAVLGLMFYCKKRCKAKRLQKQPEGEEPEMECLNGGPLQNGQPSAEIQEEVALTSLGSGPAATNKRHSTSDKMHFPRSSLQPITTLGKSEFGEVFLAKAQGLEEGVAETLVLVKSLQSKDEQQQLDFRRELEMFGKLNHANVVRLLGLCREAEPHYMVLEYVDLGDLKQFLRISKSKDEKLKSQPLSTKQKVALCTQVALGMEHLSNNRFVHKDLAARNCLVSAQRQVKVSALGLSKDVYNSEYYHFRQAWVPLRWMSPEAILEGDFSTKSDVWAFGVLMWEVFTHGEMPHGGQADDEVLADLQAGKARLPQPEGCPSKLYRLMQRCWALSPKDRPSFSEIASALGDSTVDSKP

SEQ ID NO: 11077 - protein, 816 aa, Homo sapiens
MGAARGSPARPRRLPLLSVLLLPLLGGTQTAIVFIKQPSSQDALQGRRALLRCEVEAPGPVHVYWLLDGAPVQDTERRFAQGSSLSFAAVDRLQDSGTFQCVARDDVTGEEARSANASFNIKWIEAGPVVLKHPASEAEIQPQTQVTLRCHIDGHPRPTYQWFRDGTPLSDGQSNHTVSSKERNLTLRPAGPEHSGLYSCCAHSAFGQACSSQNFTLSIADESFARVVLAPQDVVVARYEEAMFHCQFSAQPPPSLQWLFEDETPITNRSRPPHLRRATVFANGSLLLTQVRPRNAGIYRCIGQGQRGPPIILEATLHLAEIEDMPLFEPRVFTAGSEERVTCLPPKGLPEPSVWWEHAGVRLPTHGRVYQKGHELVLANIAESDAGVYTCHAANLAGQRRQDVNITVATVPSWLKKPQDSQLEEGKPGYLDCLTQATPKPTVVWYRNQMLISEDSRFEVFKNGTLRINSVEVYDGTWYRCMSSTPAGSIEAQARVQVLEKLKFTPPPQPQQCMEFDKEATVPCSATGREKPTIKWERADGSSLPEWVTDNAGTLHFARVTRDDAGNYTCIASNGPQGQIRAHVQLTVAVFITFKVEPERTTVYQGHTALLQCEAQGDPKPLIQWKGKDRILDPTKLGPRMHIFQNGSLVIHDVAPEDSGRYTCIAGNSCNIKHTEAPLYVVDKPVPEESEGPGSPPPYKMIQTIGLSVGAAVAYIIAVLGLMFYCKKRCKAKRLQKQPEGEEPEMECLNGGPLQNGQPSAEIQEEVALTSLGSGPAATNKRHSTSDKMHFPRSSLQPITTLGRPQAVPEDFQEQG

SEQ ID NO: 11078 - protein, 940 aa, Homo sapiens
MGAARGSPARPRRLPLLSVLLLPLLGGTQTAIVFIKQPSSQDALQGRRALLRCEVEAPGPVHVYWLLDGAPVQDTERRFAQGSSLSFAAVDRLQDSGTFQCVARDDVTGEEARSANASFNIKWIEAGPVVLKHPASEAEIQPQTQVTLRCHIDGHPRPTYQWFRDGTPLSDGQSNHTVSSKERNLTLRPAGPEHSGLYSCCAHSAFGQACSSQNFTLSIADESFARVVLAPQDVVVARYEEAMFHCQFSAQPPPSLQWLFEDETPITNRSRPPHLRRATVFANGSLLLTQVRPRNAGIYRCIGQGQRGPPIILEATLHLAEIEDMPLFEPRVFTAGSEERVTCLPPKGLPEPSVWWEHAGVRLPTHGRVYQKGHELVLANIAESDAGVYTCHAANLAGQRRQDVNITVANGSSLPEWVTDNAGTLHFARVTRDDAGNYTCIASNGPQGQIRAHVQLTVAVFITFKVEPERTTVYQGHTALLQCEAQGDPKPLIQWKGKDRILDPTKLGPRMHIFQNGSLVIHDVAPEDSGRYTCIAGNSCNIKHTEAPLYVVDKPVPEESEGPGSPPPYKMIQTIGLSVGAAVAYIIAVLGLMFYCKKRCKAKRLQKQPEGEEPEMECLNGGPLQNGQPSAEIQEEVALTSLGSGPAATNKRHSTSDKMHFPRSSLQPITTLGKSEFGEVFLAKAQGLEEGVAETLVLVKSLQSKDEQQQLDFRRELEMFGKLNHANVVRLLGLCREAEPHYMVLEYVDLGDLKQFLRISKSKDEKLKSQPLSTKQKVALCTQVALGMEHLSNNRFVHKDLAARNCLVSAQRQVKVSALGLSKDVYNSEYYHFRQAWVPLRWMSPEAILEGDFSTKSDVWAFGVLMWEVFTHGEMPHGGQADDEVLADLQAGKARLPQPEGCPSKLYRLMQRCWALSPKDRPSFSEIASALGDSTVDSKP

SEQ ID NO: 11079 - protein, 1030 aa, Homo sapiens
MGAARGSPARPRRLPLLSVLLLPLLGGTQTAIVFIKQPSSQDALQGRRALLRCEVEAPGPVHVYWLLDGAPVQDTERRFAQGSSLSFAAVDRLQDSGTFQCVARDDVTGEEARSANASFNIKWIEAGPVVLKHPASEAEIQPQTQVTLRCHIDGHPRPTYQWFRDGTPLSDGQSNHTVSSKERNLTLRPAGPEHSGLYSCCAHSAFGQACSSQNFTLSIADESFARVVLAPQDVVVARYEEAMFHCQFSAQPPPSLQWLFEDETPITNRSRPPHLRRATVFANGSLLLTQVRPRNAGIYRCIGQGQRGPPIILEATLHLAEIEDMPLFEPRVFTAGSEERVTCLPPKGLPEPSVWWEHAGVRLPTHGRVYQKGHELVLANIAESDAGVYTCHAANLAGQRRQDVNITVATVPSWLKKPQDSQLEEGKPGYLDCLTQATPKPTVVWYRNQMLISEDSRFEVFKNGTLRINSVEVYDGTWYRCMSSTPAGSIEAQARVQVLDGSSLPEWVTDNAGTLHFARVTRDDAGNYTCIASNGPQGQIRAHVQLTVAVFITFKVEPERTTVYQGHTALLQCEAQGDPKPLIQWKGKDRILDPTKLGPRMHIFQNGSLVIHDVAPEDSGRYTCIAGNSCNIKHTEAPLYVVDKPVPEESEGPGSPPPYKMIQTIGLSVGAAVAYIIAVLGLMFYCKKRCKAKRLQKQPEGEEPEMECLNGGPLQNGQPSAEIQEEVALTSLGSGPAATNKRHSTSDKMHFPRSSLQPITTLGKSEFGEVFLAKAQGLEEGVAETLVLVKSLQSKDEQQQLDFRRELEMFGKLNHANVVRLLGLCREAEPHYMVLEYVDLGDLKQFLRISKSKDEKLKSQPLSTKQKVALCTQVALGMEHLSNNRFVHKDLAARNCLVSAQRQVKVSALGLSKDVYNSEYYHFRQAWVPLRWMSPEAILEGDFSTKSDVWAFGVLMWEVFTHGEMPHGGQADDEVLADLQAGKARLPQPEGCPSKLYRLMQRCWALSPKDRPSFSEIASALGDSTVDSKP

SEQ ID NO: 11080 - protein, 1014 aa, Homo sapiens
MGAARGSPARPRRLPLLSVLLLPLLGGTQTAIVFIKQPSSQDALQGRRALLRCEVEAPGPVHVYWLLDGAPVQDTERRFAQGSSLSFAAVDRLQDSGTFQCVARDDVTGEEARSANASFNIKWIEAGPVVLKHPASEAEIQPQTQVTLRCHIDGHPRPTYQWFRDGTPLSDGQSNHTVSSKERNLTLRPAGPEHSGLYSCCAHSAFGQACSSQNFTLSIADESFARVVLAPQDVVVARYEEAMFHCQFSAQPPPSLQWLFEDETPITNRSRPPHLRRATVFANGSLLLTQVRPRNAGIYRCIGQGQRGPPIILEATLHLAEIEDMPLFEPRVFTAGSEERVTCLPPKGLPEPSVWWEHAGVRLPTHGRVYQKGHELVLANIAESDAGVYTCHAANLAGQRRQDVNITVATVPSWLKKPQDSQLEEGKPGYLDCLTQATPKPTVVWYRNQMLISEDSRFEVFKNGTLRINSVEVYDGTWYRCMSSTPAGSIEAQARVQVLEKLKFTPPPQPQQCMEFDKEATVPCSATGREKPTIKWERADGSSLPEWVTDNAGTLHFARVTRDDAGNYTCIASNGPQGQIRAHVQLTVAVFITFKVEPERTTVYQGHTALLQCEAQGDPKPLIQWKDKPVPEESEGPGSPPPYKMIQTIGLSVGAAVAYIIAVLGLMFYCKKRCKAKRLQKQPEGEEPEMECLNGGPLQNGQPSAEIQEEVALTSLGSGPAATNKRHSTSDKMHFPRSSLQPITTLGKSEFGEVFLAKAQGLEEGVAETLVLVKSLQSKDEQQQLDFRRELEMFGKLNHANVVRLLGLCREAEPHYMVLEYVDLGDLKQFLRISKSKDEKLKSQPLSTKQKVALCTQVALGMEHLSNNRFVHKDLAARNCLVSAQRQVKVSALGLSKDVYNSEYYHFRQAWVPLRWMSPEAILEGDFSTKSDVWAFGVLMWEVFTHGEMPHGGQADDEVLADLQAGKARLPQPEGCPSKLYRLMQRCWALSPKDRPSFSEIASALGDSTVDSKP

SEQ ID NO: 11081 - protein, 459 aa, Homo sapiens
MGAARGSPARPRRLPLLSVLLLPLLGGTQTAIVFIKQPSSQDALQGRRALLRCEVEAPGPVHVYWLLDGAPVQDTERRFAQGSSLSFAAVDRLQDSGTFQCVARDDVTGEEARSANASFNIKWIEAGPVVLKHPASEAEIQPQTQVTLRCHIDGHPRPTYQWFRDGTPLSDGQSNHTVSSKERNLTLRPAGPEHSGLYSCCAHSAFGQACSSQNFTLSIADESFARVVLAPQDVVVARYEEAMFHCQFSAQPPPSLQWLFEDETPITNRSRPPHLRRATVFANGSLLLTQVRPRNAGIYRCIGQGQRGPPIILEATLHLAEIEDMPLFEPRVFTAGSEERVTCLPPKGLPEPSVWWEHAGVRLPTHGRVYQKGHELVLANIAESDAGVYTCHAANLAGQRRQDVNITVASEHLCPEGQGEVEGNTGLGVMDRGFPGTHLRSSQFWALQAWESVHYWESV

SEQ ID NO: 11082 - protein, 1078 aa, Homo sapiens
MGSFLSGEKRPSAPTVGSAMEKKEFPTPPGRVGPGTQTAIVFIKQPSSQDALQGRRALLRCEVEAPGPVHVYWLLDGAPVQDTERRFAQGSSLSFAAVDRLQDSGTFQCVARDDVTGEEARSANASFNIKWIEAGPVVLKHPASEAEIQPQTQVTLRCHIDGHPRPTYQWFRDGTPLSDGQSNHTVSSKERNLTLRPAGPEHSGLYSCCAHSAFGQACSSQNFTLSIADESFARVVLAPQDVVVARYEEAMFHCQFSAQPPPSLQWLFEDETPITNRSRPPHLRRATVFANGSLLLTQVRPRNAGIYRCIGQGQRGPPIILEATLHLAEIEDMPLFEPRVFTAGSEERVTCLPPKGLPEPSVWWEHAGVRLPTHGRVYQKGHELVLANIAESDAGVYTCHAANLAGQRRQDVNITVATVPSWLKKPQDSQLEEGKPGYLDCLTQATPKPTVVWYRNQMLISEDSRFEVFKNGTLRINSVEVYDGTWYRCMSSTPAGSIEAQARVQVLEKLKFTPPPQPQQCMEFDKEATVPCSATGREKPTIKWERADGSSLPEWVTDNAGTLHFARVTRDDAGNYTCIASNGPQGQIRAHVQLTVAVFITFKVEPERTTVYQGHTALLQCEAQGDPKPLIQWKGKDRILDPTKLGPRMHIFQNGSLVIHDVAPEDSGRYTCIAGNSCNIKHTEAPLYVVDKPVPEESEGPGSPPPYKMIQTIGLSVGAAVAYIIAVLGLMFYCKKRCKAKRLQKQPEGEEPEMECLNGGPLQNGQPSAEIQEEVALTSLGSGPAATNKRHSTSDKMHFPRSSLQPITTLGKSEFGEVFLAKAQGLEEGVAETLVLVKSLQSKDEQQQLDFRRELEMFGKLNHANVVRLLGLCREAEPHYMVLEYVDLGDLKQFLRISKSKDEKLKSQPLSTKQKVALCTQVALGMEHLSNNRFVHKDLAARNCLVSAQRQVKVSALGLSKDVYNSEYYHFRQAWVPLRWMSPEAILEGDFSTKSDVWAFGVLMWEVFTHGEMPHGGQADDEVLADLQAGKARLPQPEGCPSKLYRLMQRCWALSPKDRPSFSEIASALGDSTVDSKP

SEQ ID NO: 11083 - protein, 257 aa, Homo sapiens
MVARVSGLIVTLLSSSFPGGPLQNGQPSAEIQEEVALTSLGSGPAATNKRHSTSDKMHFPRSSLQPITTLGKSEFGEVFLAKAQGLEEGVAETLVLVKSLQSKDEQQQLDFRRELEMFGKLNHANVVRLLGLCREAEPHYMVLEYVDLGDLKQFLRISKSKDEKLKSQPLSTKQKVALCTQVALGMEHLSNNRFVHKDLAARNCLVSAQRQVKVSALGLSKDVYNSEYYHFRQAWVPLRWMSPEAILEGDFSTKSDV

SEQ ID NO: 11084 - protein, 84 aa, Homo sapiens
MVARVSGLIVTLLSSSFPGGPLQNGQPSAEIQEEVALTSLGSGPAATNKRHSTSDKMHFPRSSLQPITTLGRPQAVPEDFQEQG

SEQ ID NO: 11085 - protein, 25 aa, Homo sapiens
TEHGTEAIFVAAVGIRPSHHAAAQS

SEQ ID NO: 11086 - protein, 25 aa, Homo sapiens
TEHGTEAIFVAAVGIRPSHHAAAQS

SEQ ID NO: 11087 - protein, 365 aa, Homo sapiens
  SITE 1: note = misc_feature - Xaa can be any naturally occurring amino acid
XEHAGVRLPTHGRVYQKGHELVLANIAESDAGVYTCHAANLAGQRRQDVNITVATVPSWLKKPQDSQLEEGKPGYLDCLTQATPKPTVVWYRNQMLISEDSRFEVFLAKAQGLEEGVAETLVLVKSLQSKDEQQQLDFRRELEMFGKLNHANVVRLLGLCREAEPHYMVLEYVDLGDLKQFLRISKSKDEKLKSQPLSTKQKVALCTQVALGMEHLSNNRFVHKDLAARNCLVSAQRQVKVSALGLSKDVYNSEYYHFRQAWVPLRWMSPEAILEGDFSTKSDVWAFGVLMWEVFTHGEMPHGGQADDEVLADLQAGKARLPQPEGCPSKLYRLMQRCWALSPKDRPSFSEIASALGDSTVDSKP

SEQ ID NO: 11088 - protein, 25 aa, Homo sapiens
  SITE 1: note = misc_feature - Xaa can be any naturally occurring amino acid
XEHGTEAIFVAAVGIRPSHHAAAQS

SEQ ID NO: 11089 - protein, 168 aa, Homo sapiens
MQAQQYQQQRRKFAAAFLAFIFILAAVDTAEAGKKEKPEKKVKKSDCGEWQWSVCVPTSGDCGLGTREGTRTGAECKQTMKTQRCKIPCNWKKQFGAECKYQFQAWGECDLNTALKTRTGSLKRALHNAECQKTVTISKPCGKLTKPKPQAESKKKKKEGKKQEKMLD

SEQ ID NO: 11090 - protein, 166 aa, Homo sapiens
MQAQQYQQQRRKFAAAFLAFIFILAAVDTAEAGKKEKPEKKVKKSDCGEWQWSVCVPTSGDCGLGTREGTRTGAECKQTMKTQRCKIPCNWKKQFGAECKYQFQAWGECDLNTALKTRTGSLKRALHNAECQKTVTISKPCGKLTKPKPQEKGKWRHRSGESLRRW

SEQ ID NO: 11091 - protein, 138 aa, Homo sapiens
MDSWFILVLLGSGLICVSANNATTVAPSVGITRLINSSTAEPVKEEAKTSNPTSSLTSLSVAPTFSPNITLGPTYLTTVNSSDSDNGTTRTASTNSIGITISPNGTWLPDNQFTDARTEPWEGNSSTAATTPETFPPS

SEQ ID NO: 11092 - protein, 253 aa, Homo sapiens
MDSWFILVLLGSGLICVSANNATTVAPSVGITRLINSSTAEPVKEEAKTSNPTSSLTSLSVAPTFSPNITLGPTYLTTVNSSDSDNGTTRTASTNSIGITISPNGTWLPDNQFTDARTEPWEGNSSTAATTPETFPPSDETPIIAVMVALSSLLVIVFIIIVLYMLRFKKYKQAGSHSNSFRLSNGRTEDVEPQSVPLLARSPSTNRKYPPLPVDKLEEEINRRMADDNKLFREEFNALPACPIQATCEAASK

SEQ ID NO: 11093 - protein, 793 aa, Homo sapiens
MDSWFILVLLGSGLICVSANNATTVAPSVGITRLINSSTAEPVKEEAKTSNPTSSLTSLSVAPTFSPNITLGPTYLTTVNSSDSDNGTTRTASTNSIGITISPNGTWLPDNQFTDARTEPWEGNSSTAATTPETFPPSDETPIIAVMVALSSLLVIVFIIIVLYMLRFKKYKQAGSHSNSFRLSNGRTEDVEPQSVPLLARSPSTNRKYPPLPVDKLEEEINRRMADDNKLFREEFNALPACPIQATCEAASKEENKEKNRYVNILPYDHSRVHLTPVEGVPDSDYINASFINGYQEKNKFIAAQGPKEETVNDFWRMIWEQNTATIVMVTNLKERKECKCAQYWPDQGCWTYGNIRVSVEDVTVLVDYTVRKFCIQQVGDMTNRKPQRLITQFHFTSWPDFGVPFTPIGMLKFLKKVKACNPQYAGAIVVHCSAGVGRTGTFVVIDAMLDMMHTERKVDVYGFVSRIRAQRCQMVQTDMQYVFIYQALLEHYLYGDTELEVTSLETHLQKIYNKIPGTSNNGLEEEFKKLTSIKIQNDKMRTGNLPANMKKNRVLQIIPYEFNRVIIPVKRGEENTDYVNASFIDGYRQKDSYIASQGPLLHTIEDFWRMIWEWKSCSIVMLTELEERGQEKCAQYWPSDGLVSYGDITVELKKEEECESYTVRDLLVTNTRENKSRQIRQFHFHGWPEVGIPSDGKGMISIIAAVQKQQQQSGNHPITVHCSAGAGRTGTFCALSTVLERVKAEGILDVFQTVKSLRLQRPHMVQTLEQYEFCYKVVQEYIDAFSDYANFK

SEQ ID NO: 11094 - protein, 793 aa, Homo sapiens; identical to SEQ ID NO: 11093

SEQ ID NO: 11095 - protein, 793 aa, Homo sapiens; identical to SEQ ID NO: 11093

SEQ ID NO: 11096 - protein, 175 aa, Homo sapiens
MDSWFILVLLGSGLICVSANNATTVAPSVGITRLINSSTAEPVKEEAKTSNPTSSLTSLSVAPTFSPNITLGPTYLTTVNSSDSDNGTTRTASTNSIGITISPNGTWLPDNQFTDARTEPWEGNSSTAATTPETFPPSGNSDSKDRRDETPIIAVMVALSSLLVIVFIIIVLYML

SEQ ID NO: 11097 - protein, 802 aa, Homo sapiens
MDSWFILVLLGSGLICVSANNATTVAPSVGITRLINSSTAEPVKEEAKTSNPTSSLTSLSVAPTFSPNITLGPTYLTTVNSSDSDNGTTRTASTNSIGITISPNGTWLPDNQFTDARTEPWEGNSSTAATTPETFPPSGNSDSKDRRDETPIIAVMVALSSLLVIVFIIIVLYMLRFKKYKQAGSHSNSFRLSNGRTEDVEPQSVPLLARSPSTNRKYPPLPVDKLEEEINRRMADDNKLFREEFNALPACPIQATCEAASKEENKEKNRYVNILPYDHSRVHLTPVEGVPDSDYINASFINGYQEKNKFIAAQGPKEETVNDFWRMIWEQNTATIVMVTNLKERKECKCAQYWPDQGCWTYGNIRVSVEDVTVLVDYTVRKFCIQQVGDMTNRKPQRLITQFHFTSWPDFGVPFTPIGMLKFLKKVKACNPQYAGAIVVHCSAGVGRTGTFVVIDAMLDMMHTERKVDVYGFVSRIRAQRCQMVQTDMQYVFIYQALLEHYLYGDTELEVTSLETHLQKIYNKIPGTSNNGLEEEFKKLTSIKIQNDKMRTGNLPANMKKNRVLQIIPYEFNRVIIPVKRGEENTDYVNASFIDGYRQKDSYIASQGPLLHTIEDFWRMIWEWKSCSIVMLTELEERGQEKCAQYWPSDGLVSYGDITVELKKEEECESYTVRDLLVTNTRENKSRQIRQFHFHGWPEVGIPSDGKGMISIIAAVQKQQQQSGNHPITVHCSAGAGRTGTFCALSTVLERVKAEGILDVFQTVKSLRLQRPHMVQTLEQYEFCYKVVQEYIDAFSDYANFK

SEQ ID NO: 11098 - protein, 802 aa, Homo sapiens; identical to SEQ ID NO: 11097

SEQ ID NO: 11099 - protein, 1407 aa, Homo sapiens
MEAEFYMVILTCLIFRNSEGFQIVHVQKQQCLFKNEKVVVGSCNRTIQNQQWMWTEDEKLLHVKSALCLAFIRNAAENYSQNSSERQHPNLHMTGITDTSWVLSTTQPFSSTTEETGLAEPERCNFTLAESKASSHSVSIQWRILGSPCNFSLIYSSDTLGAALCPTFRIDNTTYGCNLQDLQAGTIYNFRIISLDEERTVVLQTDPLPPARFGVSKEKTTSTSLHVWWTPSSGKVTSYEVQLFDENNQKIQGVQIQESTSWNEYTFFNLTAGSKYNIAITAVSGGKRSFSVYTNGSTVPSPVKDIGISTKANSLLISWSHGSGNVERYRLMLMDKGILVHGGVVDKHATSYAFHGLTPGYLYNLTVMTEAAGLQNYRWKLVRTAPMEVSNLKVTNDGSLTSLKVKWQRPPGNVDSYNITLSHKGTIKESRVLAPWITETHFKELVPGRLYQVTVSCVSGELSAQKMAVGRTFPDKVANLEANNNGRMRSLVVSWSPPAGDWEQYRILLFNDSVVLLNITVGKEETQYVMDDTGLVPGRQYEVEVIVESGNLKNSERCQGRTVPLAVLQLRVKHANETSLSIMWQTPVAEWEKYIISLADRDLLLIHKSLSKDAKEFTFTDLVPGRKYMATVTSISGDLKNSSSVKGRTVPAQVTDLHVANQGMTSSLFTNWTQAQGDVEFYQVLLIHENVVIKNESISSETSRYSFHSLKSGSLYSVVVTTVSGGISSRQVVVEGRTVPSSVSGVTVNNSGRNDYLSVSWLLAPGDVDNYEVTLSHDGKVVQSLVIAKSVRECSFSSLTPGRLYTVTITTRSGKYENHSFSQERTVPDKVQGVSVSNSARSDYLRVSWVHATGDFDHYEVTIKNKNNFIQTKSIPKSENECVFVQLVPGRLYSVTVTTKSGQYEANEQGNGRTIPEPVKDLTLRNRSTEDLHVTWSGANGDVDQYEIQLLFNDMKVFPPFHLVNTATEYRFTSLTPGRQYKILVLTISGDVQQSAFIEGFTVPSAVKNIHISPNGATDSLTVNWTPGGGDVDSYTVSAFRHSQKVDSQTIPKHVFEHTFHRLEAGEQYQIMIASVSGSLKNQINVVGRTVPASVQGVIADNAYSSYSLIVSWQKAAGVAERYDILLLTENGILLRNTSEPATTKQHKFEDLTPGKKYKIQILTVSGGLFSKEAQTEGRTVPAAVTDLRITENSTRHLSFRWTASEGELSWYNIFLYNPDGNLQERAQVDPLVQSFSFQNLLQGRMYKMVIVTHSGELSNESFIFGRTVPASVSHLRGSNRNTTDSLWFNWSPASGDFDFYELILYNPNGTKKENWKDKDLTEWRFQGLVPGRKYVLWVVTHSGDLSNKVTAESRTAPSPPSLMSFADIANTSLAITWKGPPDWTDYNDFELQWLPRDALTVFNPYN

SEQ ID NO: 11100 - protein, 2215 aa, Homo sapiens
MEAEFYMVILTCLIFRNSEGFQIVHVQKQQCLFKNEKVVVGSCNRTIQNQQWMWTEDEKLLHVKSALCLAISNSSRGPSRSAILDRCSQAPRWTCYDQEGFLEVENASLFLQKQGSRVVVKKARKYLHSWMKIDVNKEGKLVNESLCLQKAGLGAEVSVRSTRNTAPPQILTTFNAVPDGLVFLIRNTTEAFIRNAAENYSQNSSERQHPNLHMTGITDTSWVLSTTQPFSSTTEETGLAEPERCNFTLAESKASSHSVSIQWRILGSPCNFSLIYSSDTLGAALCPTFRIDNTTYGCNLQDLQAGTIYNFRIISLDEERTVVLQTDPLPPARFGVSKEKTTSTSLHVWWTPSSGKVTSYEVQLFDENNQKIQGVQIQESTSWNEYTFFNLTAGSKYNIAITAVSGGKRSFSVYTNGSTVPSPVKDIGISTKANSLLISWSHGSGNVERYRLMLMDKGILVHGGVVDKHATSYAFHGLTPGYLYNLTVMTEAAGLQNYRWKLVRTAPMEVSNLKVTNDGSLTSLKVKWQRPPGNVDSYNITLSHKGTIKESRVLAPWITETHFKELVPGRLYQVTVSCVSGELSAQKMAVGRTFPDKVANLEANNNGRMRSLVVSWSPPAGDWEQYRILLFNDSVVLLNITVGKEETQYVMDDTGLVPGRQYEVEVIVESGNLKNSERCQGRTVPLAVLQLRVKHANETSLSIMWQTPVAEWEKYIISLADRDLLLIHKSLSKDAKEFTFTDLVPGRKYMATVTSISGDLKNSSSVKGRTVPAQVTDLHVANQGMTSSLFTNWTQAQGDVEFYQVLLIHENVVIKNESISSETSRYSFHSLKSGSLYSVVVTTVSGGISSRQVVVEGRTVPSSVSGVTVNNSGRNDYLSVSWLLAPGDVDNYEVTLSHDGKVVQSLVIAKSVRECSFSSLTPGRLYTVTITTRSGKYENHSFSQERTVPDKVQGVSVSNSARSDYLRVSWVHATGDFDHYEVTIKNKNNFIQTKSIPKSENECVFVQLVPGRLYSVTVTTKSGQYEANEQGNGRTIPEPVKDLTLRNRSTEDLHVTWSGANGDVDQYEIQLLFNDMKVFPPFHLVNTATEYRFTSLTPGRQYKILVLTISGDVQQSAFIEGFTVPSAVKNIHISPNGATDSLTVNWTPGGGDVDSYTVSAFRHSQKVDSQTIPKHVFEHTFHRLEAGEQYQIMIASVSGSLKNQINVVGRTVPASVQGVIADNAYSSYSLIVSWQKAAGVAERYDILLLTENGILLRNTSEPATTKQHKFEDLTPGKKYKIQILTVSGGLFSKEAQTEGRTVPAAVTDLRITENSTRHLSFRWTASEGELSWYNIFLYNPDGNLQERAQVDPLVQSFSFQNLLQGRMYKMVIVTHSGELSNESFIFGRTVPASVSHLRGSNRNTTDSLWFNWSPASGDFDFYELILYNPNGTKKENWKDKDLTEWRFQGLVPGRKYVLWVVTHSGDLSNKVTAESRTAPSPPSLMSFADIANTSLAITWKGPPDWTDYNDFELQWLPRDALTVFNPYNNRKSEGRIVYGLRPGRSYQFNVKTVSGDSWKTYSKPIFGSVRTKPDKIQNLHCRPQNSTAIACSWIPPDSDFDGYSIECRKMDTQEVEFSRKLEKEKSLLNIMMLVPHKRYLVSIKVQSAGMTSEVVEDSTITMIDRPPPPPPHIRVNEKDVLISKSSINFTVNCSWFSDTNGAVKYFTVVVREADGSDELKPEQQHPLPSYLEYRHNASIRVYQTNYFASKCAENPNSNSKSFNIKLGAEMESLGGKCDPTQQKFCDGPLKPHTAYRISIRAFTQLFDEDLKEFTKPLYSDTFFSLPITTESEPLFGAIEGVSAGLFLIGMLVAVVALLICRQKVSHGRERPSARLSIRRDRPLSVHLNLGQKGNRKTSCPIKINQFEGHFMKLQADSNYLLSKEYEELKDVGRNQSCDIALLPENRGKNRYNNILPYDATRVKLSNVDDDPCSDYINASYIPGNNFRREYIVTQGPLPGTKDDFWKMVWEQNVHNIVMVTQCVEKGRVKCDHYWPADQDSLYYGDLILQMLSESVLPEWTIREFKICGEEQLDAHRLIRHFHYTVWPDHGVPETTQSLIQFVRTVRDYINRSPGAGPTVVHCSAGVGRTGTFIALDRILQQLDSKDSVDIYGAVHDLRLHRVHMVQTECQYVYLHQCVRDVLRARKLRSEQENPLFPIYENVNPEYHRDPVYSRH

SEQ ID NO: 11101 - protein, 2127 aa, Homo sapiens
MEAEFYMVILTCLIFRNSEGFQIVHVQKQQCLFKNEKVVVGSCNRTIQNQQWMWTEDEKLLHVKSALCLAISNSSRGPSRSAILDRCSQAPRWTCYDQEGFLEVENASLFLQKQGSRVVVKKARKYLHSWMKIDVNKEGKLVNESLCLQKAGLGAEVSVRSTRNTAPPQILTTFNAVPDGLVFLIRNTTEAFIRNAAENYSQNSSERQHPNLHMTGITDTSWVLSTTQPFSSTTEETGLAEPERCNFTLAESKASSHSVSIQWRILGSPCNFSLIYSSDTLGAALCPTFRIDNTTYGCNLQDLQAGTIYNFRIISLDEERTVVLQTDPLPPARFGVSKEKTTSTSLHVWWTPSSGKVTSYEVQLFDENNQKIQGVQIQESTSWNEYTFFNLTAGSKYNIAITAVSGGKRSFSVYTNGSTVPSPVKDIGISTKANSLLISWSHGSGNVERYRLMLMDKGILVHGGVVDKHATSYAFHGLTPGYLYNLTVMTEAAGLQNYRWKLVRTAPMEVSNLKVTNDGSLTSLKVKWQRPPGNVDSYNITLSHKGTIKESRVLAPWITETHFKELVPGRLYQVTVSCVSGELSAQKMAVGRTFPDKVANLEANNNGRMRSLVVSWSPPAGDWEQYRILLFNDSVVLLNITVGKEETQYVMDDTGLVPGRQYEVEVIVESGNLKNSERCQGRTVPLAVLQLRVKHANETSLSIMWQTPVAEWEKYIISLADRDLLLIHKSLSKDAKEFTFTDLVPGRKYMATVTSISGDLKNSSSVKGRTVPAQVTDLHVANQGMTSSLFTNWTQAQGDVEFYQVLLIHENVVIKNESISSETSRYSFHSLKSGSLYSVVVTTVSGGISSRQVVVEGRTVPDKVQGVSVSNSARSDYLRVSWVHATGDFDHYEVTIKNKNNFIQTKSIPKSENECVFVQLVPGRLYSVTVTTKSGQYEANEQGNGRTIPEPVKDLTLRNRSTEDLHVTWSGANGDVDQYEIQLLFNDMKVFPPFHLVNTATEYRFTSLTPGRQYKILVLTISGDVQQSAFIEGFTVPSAVKNIHISPNGATDSLTVNWTPGGGDVDSYTVSAFRHSQKVDSQTIPKHVFEHTFHRLEAGEQYQIMIASVSGSLKNQINVVGRTVPASVQGVIADNAYSSYSLIVSWQKAAGVAERYDILLLTENGILLRNTSEPATTKQHKFEDLTPGKKYKIQILTVSGGLFSKEAQTEGRTVPAAVTDLRITENSTRHLSFRWTASEGELSWYNIFLYNPDGNLQERAQVDPLVQSFSFQNLLQGRMYKMVIVTHSGELSNESFIFGRTVPASVSHLRGSNRNTTDSLWFNWSPASGDFDFYELILYNPNGTKKENWKDKDLTEWRFQGLVPGRKYVLWVVTHSGDLSNKVTAESRTAPSPPSLMSFADIANTSLAITWKGPPDWTDYNDFELQWLPRDALTVFNPYNNRKSEGRIVYGLRPGRSYQFNVKTVSGDSWKTYSKPIFGSVRTKPDKIQNLHCRPQNSTAIACSWIPPDSDFDGYSIECRKMDTQEVEFSRKLEKEKSLLNIMMLVPHKRYLVSIKVQSAGMTSEVVEDSTITMIDRPPPPPPHIRVNEKDVLISKSSINFTVNCSWFSDTNGAVKYFTVVVREADGSDELKPEQQHPLPSYLEYRHNASIRVYQTNYFASKCAENPNSNSKSFNIKLGAEMESLGGKCDPTQQKFCDGPLKPHTAYRISIRAFTQLFDEDLKEFTKPLYSDTFFSLPITTESEPLFGAIEGVSAGLFLIGMLVAVVALLICRQKVSHGRERPSARLSIRRDRPLSVHLNLGQKGNRKTSCPIKINQFEGHFMKLQADSNYLLSKEYEELKDVGRNQSCDIALLPENRGKNRYNNILPYDATRVKLSNVDDDPCSDYINASYIPGNNFRREYIVTQGPLPGTKDDFWKMVWEQNVHNIVMVTQCVEKGRVKCDHYWPADQDSLYYGDLILQMLSESVLPEWTIREFKICGEEQLDAHRLIRHFHYTVWPDHGVPETTQSLIQFVRTVRDYINRSPGAGPTVVHCSAGVGRTGTFIALDRILQQLDSKDSVDIYGAVHDLRLHRVHMVQTECQYVYLHQCVRDVLRARKLRSEQENPLFPIYENVNPEYHRDPVYSRH

SEQ ID NO: 11102 - protein, 1583 aa, Homo sapiens
MEAEFYMVILTCLIFRNSGFQIVHVQKQQCLFKNEKVVVGSCNRTIQNQQWMWTEDEKLLHVKSALCLAISNSSRGPSRSAILDRCSQAPRWTCYDQEGFLEVENASLFLQKQGSRVVVKKARKYLHSWMKIDVNKEGKLVNESLCLQKAGLGAEVSVRSTRNTAPPQILTTFNAVPDGLVFLIRNTTEAFIRNAAENYSQNSSERQHPNLHMTGITDTSWVLSTTQPFSSTTEETGLAEPERCNFTLAESKASSHSVSIQWRILGSPCNFSLIYSSDTLGAALCPTFRIDNTTYGCNLQDLQAGTIYNFRIISLDEERTVVLQTDPLPPARFGVSKEKTTSTSLHVWWTPSSGKVTSYEVQLFDENNQKIQGVQIQESTSWNEYTFFNLTAGSKYNIAITAVSGGKRSFSVYTNGSTVPSPVKDIGISTKANSLLISWSHGSGNVERYRLMLMDKGILVHGGVVDKHATSYAFHGLTPGYLYNLTVMTEAAGLQNYRWKLVRTAPMEVSNLKVTNDGSLTSLKVKWQRPPGNVDSYNITLSHKGTIKESRVLAPWITETHFKELVPGRLYQVTVSCVSGELSAQKMAVGRTFPDKVANLEANNNGRMRSLVVSWSPPAGDWEQYRILLFNDSVVLLNITVGKEETQYVMDDTGLVPGRQYEVEVIVESGNLKNSERCQGRTVPLAVLQLRVKHANETSLSIMWQTPVAEWEKYIISLADRDLLLIHKSLSKDAKEFTFTDLVPGRKYMATVTSISGDLKNSSSVKGRTVPAQVTDLHVANQGMTSSLFTNWTQAQGDVEFYQVLLIHENVVIKNESISSETSRYSFHSLKSGSLYSVVVTTVSGGISSRQVVVEGRTVPSSVSGVTVNNSGRNDYLSVSWLLAPGDVDNYEVTLSHDGKVVQSLVIAKSVRECSFSSLTPGRLYTVTITTRSGKYENHSFSQERTVPDKVQGVSVSNSARSDYLRVSWVHATGDFDHYEVTIKNKNNFIQTKSIPKSENECVFVQLVPGRLYSVTVTTKSGQYEANEQGNGRTIPEPVKDLTLRNRSTEDLHVTWSGANGDVDQYEIQLLFNDMKVFPPFHLVNTATEYRFTSLTPGRQYKILVLTISGDVQQSAFIEGFTVPSAVKNIHISPNGATDSLTVNWTPGGGDVDSYTVSAFRHSQKVDSQTIPKHVFEHTFHRLEAGEQYQIMIASVSGSLKNQINVVGRTVPASVQGVIADNAYSSYSLIVSWQKAAGVAERYDILLLTENGILLRNTSEPATTKQHKFEDLTPGKKYKIQILTVSGGLFSKEAQTEGRTVPAAVTDLRITENSTRHLSFRWTASEGELSWYNIFLYNPDGNLQERAQVDPLVQSFSFQNLLQGRMYKMVIVTHSGELSNESFIFGRTVPASVSHLRGSNRNTTDSLWFNWSPASGDFDFYELILYNPNGTKKENWKDKDLTEWRFQGLVPGRKYVLWVVTHSGDLSNKVTAESRTAPSPPSLMSFADIANTSLAITWKGPPDWTDYNDFELQWLPRDALTVFNPYNNRKSEGRIVYGLRPGRSYQFNVKTVSGDSWKTYSKPIFGSVRTSMTCFATLISQME

SEQ ID NO: 11103 - protein, 1997 aa, Homo sapiens
MLSHGAGLALWITLSLLQTGLAEPERCNFTLAESKASSHSVSIQWRILGSPCNFSLIYSSDTLGAALCPTFRIDNTTYGCNLQDLQAGTIYNFRIISLDEERTVVLQTDPLPPARFGVSKEKTTSTSLHVWWTPSSGKVTSYEVQLFDENNQKIQGVQIQESTSWNEYTFFNLTAGSKYNIAITAVSGGKRSFSVYTNGSTVPSPVKDIGISTKANSLLISWSHGSGNVERYRLMLMDKGILVHGGVVDKHATSYAFHGLTPGYLYNLTVMTEAAGLQNYRWKLVRTAPMEVSNLKVTNDGSLTSLKVKWQRPPGNVDSYNITLSHKGTIKESRVLAPWITETHFKELVPGRLYQVTVSCVSGELSAQKMAVGRTFPDKVANLEANNNGRMRSLVVSWSPPAGDWEQYRILLFNDSVVLLNITVGKEETQYVMDDTGLVPGRQYEVEVIVESGNLKNSERCQGRTVPLAVLQLRVKHANETSLSIMWQTPVAEWEKYIISLADRDLLLIHKSLSKDAKEFTFTDLVPGRKYMATVTSISGDLKNSSSVKGRTVPAQVTDLHVANQGMTSSLFTNWTQAQGDVEFYQVLLIHENVVIKNESISSETSRYSFHSLKSGSLYSVVVTTVSGGISSRQVVVEGRTVPSSVSGVTVNNSGRNDYLSVSWLLAPGDVDNYEVTLSHDGKVVQSLVIAKSVRECSFSSLTPGRLYTVTITTRSGKYENHSFSQERTVPDKVQGVSVSNSARSDYLRVSWVHATGDFDHYEVTIKNKNNFIQTKSIPKSENECVFVQLVPGRLYSVTVTTKSGQYEANEQGNGRTIPEPVKDLTLRNRSTEDLHVTWSGANGDVDQYEIQLLFNDMKVFPPFHLVNTATEYRFTSLTPGRQYKILVLTISGDVQQSAFIEGFTVPSAVKNIHISPNGATDSLTVNWTPGGGDVDSYTVSAFRHSQKVDSQTIPKHVFEHTFHRLEAGEQYQIMIASVSGSLKNQINVVGRTVPASVQGVIADNAYSSYSLIVSWQKAAGVAERYDILLLTENGILLRNTSEPATTKQHKFEDLTPGKKYKIQILTVSGGLFSKEAQTEGRTVPAAVTDLRITENSTRHLSFRWTASEGELSWYNIFLYNPDGNLQERAQVDPLVQSFSFQNLLQGRMYKMVIVTHSGELSNESFIFGRTVPASVSHLRGSNRNTTDSLWFNWSPASGDFDFYELILYNPNGTKKENWKDKDLTEWRFQGLVPGRKYVLWVVTHSGDLSNKVTAESRTAPSPPSLMSFADIANTSLAITWKGPPDWTDYNDFELQWLPRDALTVFNPYNNRKSEGRIVYGLRPGRSYQFNVKTVSGDSWKTYSKPIFGSVRTKPDKIQNLHCRPQNSTAIACSWIPPDSDFDGYSIECRKMDTQEVEFSRKLEKEKSLLNIMMLVPHKRYLVSIKVQSAGMTSEVVEDSTITMIDRPPPPPPHIRVNEKDVLISKSSINFTVNCSWFSDTNGAVKYFTVVVREADGSDELKPEQQHPLPSYLEYRHNASIRVYQTNYFASKCAENPNSNSKSFNIKLGAEMESLGGKCDPTQQKFCDGPLKPHTAYRISIRAFTQLFDEDLKEFTKPLYSDTFFSLPITTESEPLFGAIEGVSAGLFLIGMLVAVVALLICRQKVSHGRERPSARLSIRRDRPLSVHLNLGQKGNRKTSCPIKINQFEGHFMKLQADSNYLLSKEYEELKDVGRNQSCDIALLPENRGKNRYNNILPYDATRVKLSNVDDDPCSDYINASYIPGNNFRREYIVTQGPLPGTKDDFWKMVWEQNVHNIVMVTQCVEKGRVKCDHYWPADQDSLYYGDLILQMLSESVLPEWTIREFKICGEEQLDAHRLIRHFHYTVWPDHGVPETTQSLIQFVRTVRDYINRSPGAGPTVVHCSAGVGRTGTFIALDRILQQLDSKDSVDIYGAVHDLRLHRVHMVQTECQYVYLHQCVRDVLRARKLRSEQENPLFPIYENVNPEYHRDPVYSRH

SEQ ID NO: 11104 - protein, 1907 aa, Homo sapiens
MLSHGAGLALWITLSLLQTGLAEPERCNFTLAESKASSHSVSIQWRILGSPCNFSLIYSSDTLGAALCPTFRIDNTTYGCNLQDLQAGTIYNFRIISLDEERTVVLQTDPLPPARFGVSKEKTTSTSLHVWWTPSSGKVTSYEVQLFDENNQKIQGVQIQESTSWNEYTFFNLTAGSKYNIAITAVSGGKRSFSVYTNGSTVPSPVKDIGISTKANSLLISWSHGSGNVERYRLMLMDKGILVHGGVVDKHATSYAFHGLTPGYLYNLTVMTEAAGLQNYRWKLVRTAPMEVSNLKVTNDGSLTSLKVKWQRPPGNVDSYNITLSHKGTIKESRVLAPWITETHFKELVPGRLYQVTVSCVSGELSAQKMAVGRTFPDKVANLEANNNGRMRSLVVSWSPPAGDWEQYRILLFNDSVVLLNITVGKEETQYVMDDTGLVPGRQYEVEVIVESGNLKNSERCQGRTVPLAVLQLRVKHANETSLSIMWQTPVAEWEKYIISLADRDLLLIHKSLSKDAKEFTFTDLVPGRKYMATVTSISGDLKNSSSVKGRTVPAQVTDLHVANQGMTSSLFTNWTQAQGDVEFYQVLLIHENVVIKNESISSETSRYSFHSLKSGSLYSVVVTTVSGGISSRQVVVEGRTVPSSVSGVTVNNSGRNDYLSVSWLLAPGDVDNYEVTLSHDGKVVQSLVIAKSVRECSFSSLTPGRLYTVTITTRSGKYENHSFSQERTVPDKVQGVSVSNSARSDYLRVSWVHATGDFDHYEVTIKNKNNFIQTKSIPKSENECVFVQLVPGRLYSVTVTTKSGQYEANEQGNGRTIPEPVKDLTLRNRSTEDLHVTWSGANGDVDQYEIQLLFNDMKVFPPFHLVNTATEYRFTSLTPGRQYKILVLTISGDVQQSAFIEGFTVPSAVKNIHISPNGATDSLTVNWTPGGGDVDSYTVSAFRHSQKVDSQTIPKHVFEHTFHRLEAGEQYQIMIASVSGSLKNQINVVGRTVPAAVTDLRITENSTRHLSFRWTASEGELSWYNIFLYNPDGNLQERAQVDPLVQSFSFQNLLQGRMYKMVIVTHSGELSNESFIFGRTVPASVSHLRGSNRNTTDSLWFNWSPASGDFDFYELILYNPNGTKKENWKDKDLTEWRFQGLVPGRKYVLWVVTHSGDLSNKVTAESRTAPSPPSLMSFADIANTSLAITWKGPPDWTDYNDFELQWLPRDALTVFNPYNNRKSEGRIVYGLRPGRSYQFNVKTVSGDSWKTYSKPIFGSVRTKPDKIQNLHCRPQNSTAIACSWIPPDSDFDGYSIECRKMDTQEVEFSRKLEKEKSLLNIMMLVPHKRYLVSIKVQSAGMTSEVVEDSTITMIDRPPPPPPHIRVNEKDVLISKSSINFTVNCSWFSDTNGAVKYFTVVVREADGSDELKPEQQHPLPSYLEYRHNASIRVYQTNYFASKCAENPNSNSKSFNIKLGAEMESLGGKCDPTQQKFCDGPLKPHTAYRISIRAFTQLFDEDLKEFTKPLYSDTFFSLPITTESEPLFGAIEGVSAGLFLIGMLVAVVALLICRQKVSHGRERPSARLSIRRDRPLSVHLNLGQKGNRKTSCPIKINQFEGHFMKLQADSNYLLSKEYEELKDVGRNQSCDIALLPENRGKNRYNNILPYDATRVKLSNVDDDPCSDYINASYIPGNNFRREYIVTQGPLPGTKDDFWKMVWEQNVHNIVMVTQCVEKGRVKCDHYWPADQDSLYYGDLILQMLSESVLPEWTIREFKICGEEQLDAHRLIRHFHYTVWPDHGVPETTQSLIQFVRTVRDYINRSPGAGPTVVHCSAGVGRTGTFIALDRILQQLDSKDSVDIYGAVHDLRLHRVHMVQTECQYVYLHQCVRDVLRARKLRSEQENPLFPIYENVNPEYHRDPVYSRH

SEQ ID NO: 11105 - protein, 1907 aa, Homo sapiens
MLSHGAGLALWITLSLLQTGLAEPERCNFTLAESKASSHSVSIQWRILGSPCNFSLIYSSDTLGAALCPTFRIDNTTYGCNLQDLQAGTIYNFRIISLDEERTVVLQTDPLPPARFGVSKEKTTSTSLHVWWTPSSGKVTSYEVQLFDENNQKIQGVQIQESTSWNEYTFFNLTAGSKYNIAITAVSGGKRSFSVYTNGSTVPSPVKDIGISTKANSLLISWSHGSGNVERYRLMLMDKGILVHGGVVDKHATSYAFHGLTPGYLYNLTVMTEAAGLQNYRWKLVRTAPMEVSNLKVTNDGSLTSLKVKWQRPPGNVDSYNITLSHKGTIKESRVLAPWITETHFKELVPGRLYQVTVSCVSGELSAQKMAVGRTFPLAVLQLRVKHANETSLSIMWQTPVAEWEKYIISLADRDLLLIHKSLSKDAKEFTFTDLVPGRKYMATVTSISGDLKNSSSVKGRTVPAQVTDLHVANQGMTSSLFTNWTQAQGDVEFYQVLLIHENVVIKNESISSETSRYSFHSLKSGSLYSVVVTTVSGGISSRQVVVEGRTVPSSVSGVTVNNSGRNDYLSVSWLLAPGDVDNYEVTLSHDGKVVQSLVIAKSVRECSFSSLTPGRLYTVTITTRSGKYENHSFSQERTVPDKVQGVSVSNSARSDYLRVSWVHATGDFDHYEVTIKNKNNFIQTKSIPKSENECVFVQLVPGRLYSVTVTTKSGQYEANEQGNGRTIPEPVKDLTLRNRSTEDLHVTWSGANGDVDQYEIQLLFNDMKVFPPFHLVNTATEYRFTSLTPGRQYKILVLTISGDVQQSAFIEGFTVPSAVKNIHISPNGATDSLTVNWTPGGGDVDSYTVSAFRHSQKVDSQTIPKHVFEHTFHRLEAGEQYQIMIASVSGSLKNQINVVGRTVPASVQGVIADNAYSSYSLIVSWQKAAGVAERYDILLLTENGILLRNTSEPATTKQHKFEDLTPGKKYKIQILTVSGGLFSKEAQTEGRTVPAAVTDLRITENSTRHLSFRWTASEGELSWYNIFLYNPDGNLQERAQVDPLVQSFSFQNLLQGRMYKMVIVTHSGELSNESFIFGRTVPASVSHLRGSNRNTTDSLWFNWSPASGDFDFYELILYNPNGTKKENWKDKDLTEWRFQGLVPGRKYVLWVVTHSGDLSNKVTAESRTAPSPPSLMSFADIANTSLAITWKGPPDWTDYNDFELQWLPRDALTVFNPYNNRKSEGRIVYGLRPGRSYQFNVKTVSGDSWKTYSKPIFGSVRTKPDKIQNLHCRPQNSTAIACSWIPPDSDFDGYSIECRKMDTQEVEFSRKLEKEKSLLNIMMLVPHKRYLVSIKVQSAGMTSEVVEDSTITMIDRPPPPPPHIRVNEKDVLISKSSINFTVNCSWFSDTNGAVKYFTVVVREADGSDELKPEQQHPLPSYLEYRHNASIRVYQTNYFASKCAENPNSNSKSFNIKLGAEMESLGGKCDPTQQKFCDGPLKPHTAYRISIRAFTQLFDEDLKEFTKPLYSDTFFSLPITTESEPLFGAIEGVSAGLFLIGMLVAVVALLICRQKVSHGRERPSARLSIRRDRPLSVHLNLGQKGNRKTSCPIKINQFEGHFMKLQADSNYLLSKEYEELKDVGRNQSCDIALLPENRGKNRYNNILPYDATRVKLSNVDDDPCSDYINASYIPGNNFRREYIVTQGPLPGTKDDFWKMVWEQNVHNIVMVTQCVEKGRVKCDHYWPADQDSLYYGDLILQMLSESVLPEWTIREFKICGEEQLDAHRLIRHFHYTVWPDHGVPETTQSLIQFVRTVRDYINRSPGAGPTVVHCSAGVGRTGTFIALDRILQQLDSKDSVDIYGAVHDLRLHRVHMVQTECQYVYLHQCVRDVLRARKLRSEQENPLFPIYENVNPEYHRDPVYSRH

SEQ ID NO: 11106 - protein, 103 aa, Homo sapiens
  SITE 1: note = misc_feature - Xaa can be any naturally occurring amino acid
XLWITLSLLQTGLAEPERCNFTLAESKASSHSVSIQWRILGSPCNFSLIYSSDTLGAALCPTFRIDNTTYGCNLQDLQAGTIYNFRIISLDEERTVVLQTGKG

SEQ ID NO: 11107 - protein, 148 aa, Homo sapiens
MTMYLWLKLLAFGFAFLDTEVFVTGQSPTPSPTDAYLNASETTTLSPSGSAVISTTTIATTPSKPTCDEKYANITVDYLYNKETKLFTAKLNVNENVECGNNTCTNNEVHNLTECKNASVSISHNSCTAPDKTLILDVPPGVEKFQLH

SEQ ID NO: 11108 - protein, 1145 aa, Homo sapiens
MTMYLWLKLLAFGFAFLDTEVFVTGQSPTPSPTDAYLNASETTTLSPSGSAVISTTTIATTPSKPTCDEKYANITVDYLYNKETKLFTAKLNVNENVECGNNTCTNNEVHNLTECKNASVSISHNSCTAPDKTLILDVPPGVEKFQLHDCTQVEKADTTICLKWKNIETFTCDTQNITYRFQCGNMIFDNKEIKLENLEPEHEYKCDSEILYNNHKFTNASKIIKTDFGSPGEPQIIFCRSEAAHQGVITWNPPQRSFHNFTLCYIKETEKDCLNLDKNLIKYDLQNLKPYTKYVLSLHAYIIAKVQRNGSAAMCHFTTKSAPPSQVWNMTVSMTSDNSMHVKCRPPRDRNGPHERYHLEVEAGNTLVRNESHKNCDFRVKDLQYSTDYTFKAYFHNGDYPGEPFILHHSTSYNSKALIAFLAFLIIVTSIALLVVLYKIYDLHKKRSCNLDEQQELVERDDEKQLMNVEPIHADILLETYKRKIADEGRLFLAEFQSIPRVFSKFPIKEARKPFNQNKNRYVDILPYDYNRVELSEINGDAGSNYINASYIDGFKEPRKYIAAQGPRDETVDDFWRMIWEQKATVIVMVTRCEEGNRNKCAEYWPSMEEGTRAFGDVVVKINQHKRCPDYIIQKLNIVNKKEKATGREVTHIQFTSWPDHGVPEDPHLLLKLRRRVNAFSNFFSGPIVVHCSAGVGRTGTYIGIDAMLEGLEAENKVDVYGYVVKLRRQRCLMVQVEAQYILIHQALVEYNQFGETEVNLSELHPYLHNMKKRDPPSEPSPLEAEFQRLPSYRSWRTQHIGNQEENKSKNRNSNVIPYDYNRVPLKHELEMSKESEHDSDESSDDDSDSEEPSKYINASFIMSYWKPEVMIAAQGPLKETIGDFWQMIFQRKVKVIVMLTELKHGDQEICAQYWGEGKQTYGDIEVDLKDTDKSSTYTLRVFELRHSKRKDSRTVYQYQYTNWSVEQLPAEPKELISMIQVVKQKLPQKNSSEGNKHHKSTPLLIHCRDGSQQTGIFCALLNLLESAETEEVVDIFQVVKALRKARPGMVSTFEQYQFLYDVIASTYPAQNGQVKKNNHQEDKIEFDNEVDKVKQDANCVNPLGAPEKLPEAKEQAEGSEPTSGTEGPEHSVNGPASPALNQGS

SEQ ID NO: 11109 - protein, 87 aa, Homo sapiens
MTMYLWLKLLAFGFAFLDTEVFVTGQSPTPSPTGHLQAEEQGSQSKSPNLKSREADSSAFSWWPKAREPLTNHWSKSKSPKAEELGV

SEQ ID NO: 11110 - protein, 151 aa, Homo sapiens
MTMYLWLKLLAFGFAFLDTEVFVTGQSPTPSPTGHLQAEEQGSQSKSPNLKSREADSSAFSWWPKAREPLTNHWSVSSVQTPHLPTHADSQTPSAGTDTQTFSGSAANAKLNPTPGSNAISDAYLNASETTTLSPSGSAVISTTTIATTPS

SEQ ID NO: 11111 - protein, 36 aa, Homo sapiens
MTMYLWLKLLAFGFAFLDTEVFVTGQSPTPSPTGKN

SEQ ID NO: 11112 - protein, 118 aa, Homo sapiens
MTMYLWLKLLAFGFAFLDTEVFVTGQSPTPSPTGLTTAKMPSVPLSSDPLPTHTTAFSPASTFERENDFSETTTSLSPDNTSTQVSPDSLDNASAFNTTGVSSVQTPHLPTHADSQTP

SEQ ID NO: 11113 - protein, 753 aa, Homo sapiens
MTMYLWLKLLAFGFAFLDTEVFVTGQSPTPSPTGLTTAKMPSVPLSSDPLPTHTTAFSPASTFERENDFSETTTSLSPDNTSTQVSPDSLDNASAFNTTGVSSVQTPHLPTHADSQTPSAGTDTQTFSGSAANAKLNPTPGSNAISDAYLNASETTTLSPSGSAVISTTTIATTPSKPTCDEKYANITVDYLYNKETKLFTAKLNVNENVECGNNTCTNNEVHNLTECKNASVSISHNSCTAPDKTLILDVPPGVEKFQLHDCTQVEKADTTICLKWKNIETFTCDTQNITYRFQCGNMIFDNKEIKLENLEPEHEYKCDSEILYNNHKFTNASKIIKTDFGSPGEPQIIFCRSEAAHQGVITWNPPQRSFHNFTLCYIKETEKDCLNLDKNLIKYDLQNLKPYTKYVLSLHAYIIAKVQRNGSAAMCHFTTKSAPPSQVWNMTVSMTSDNSMHVKCRPPRDRNGPHERYHLEVEAGNTLVRNESHKNCDFRVKDLQYSTDYTFKAYFHNGDYPGEPFILHHSTSYNSKALIAFLAFLIIVTSIALLVVLYKIYDLHKKRSCNLDEQQELVERDDEKQLMNVEPIHADILLETYKRKIADEGRLFLAEFQSIPRVFSKFPIKEARKPFNQNKNRYVDILPYDYNRVELSEINGDAGSNYINASYIDGFKEPRKYIAAQGPRDETVDDFWRMIWEQKATVIVMVTRCEEGNRNKCAEYWPSMEEGTRAFGDVVVKINQHKRCPDYIIQKLNIVN

SEQ ID NO: 11114 - protein, 1306 aa, Homo sapiens
MTMYLWLKLLAFGFAFLDTEVFVTGQSPTPSPTGLTTAKMPSVPLSSDPLPTHTTAFSPASTFERENDFSETTTSLSPDNTSTQVSPDSLDNASAFNTTGVSSVQTPHLPTHADSQTPSAGTDTQTFSGSAANAKLNPTPGSNAISDVPGERSTASTFPTDPVSPLTTTLSLAHHSSAALPARTSNTTITANTSDAYLNASETTTLSPSGSAVISTTTIATTPSKPTCDEKYANITVDYLYNKETKLFTAKLNVNENVECGNNTCTNNEVHNLTECKNASVSISHNSCTAPDKTLILDVPPGVEKFQLHDCTQVEKADTTICLKWKNIETFTCDTQNITYRFQCGNMIFDNKEIKLENLEPEHEYKCDSEILYNNHKFTNASKIIKTDFGSPGEPQIIFCRSEAAHQGVITWNPPQRSFHNFTLCYIKETEKDCLNLDKNLIKYDLQNLKPYTKYVLSLHAYIIAKVQRNGSAAMCHFTTKSAPPSQVWNMTVSMTSDNSMHVKCRPPRDRNGPHERYHLEVEAGNTLVRNESHKNCDFRVKDLQYSTDYTFKAYFHNGDYPGEPFILHHSTSYNSKALIAFLAFLIIVTSIALLVVLYKIYDLHKKRSCNLDEQQELVERDDEKQLMNVEPIHADILLETYKRKIADEGRLFLAEFQSIPRVFSKFPIKEARKPFNQNKNRYVDILPYDYNRVELSEINGDAGSNYINASYIDGFKEPRKYIAAQGPRDETVDDFWRMIWEQKATVIVMVTRCEEGNRNKCAEYWPSMEEGTRAFGDVVVKINQHKRCPDYIIQKLNIVNKKEKATGREVTHIQFTSWPDHGVPEDPHLLLKLRRRVNAFSNFFSGPIVVHCSAGVGRTGTYIGIDAMLEGLEAENKVDVYGYVVKLRRQRCLMVQVEAQYILIHQALVEYNQFGETEVNLSELHPYLHNMKKRDPPSEPSPLEAEFQRLPSYRSWRTQHIGNQEENKSKNRNSNVIPYDYNRVPLKHELEMSKESEHDSDESSDDDSDSEEPSKYINASFIMSYWKPEVMIAAQGPLKETIGDFWQMIFQRKVKVIVMLTELKHGDQEICAQYWGEGKQTYGDIEVDLKDTDKSSTYTLRVFELRHSKRKDSRTVYQYQYTNWSVEQLPAEPKELISMIQVVKQKLPQKNSSEGNKHHKSTPLLIHCRDGSQQTGIFCALLNLLESAETEEVVDIFQVVKALRKARPGMVSTFEQYQFLYDVIASTYPAQNGQVKKNNHQEDKIEFDNEVDKVKQDANCVNPLGAPEKLPEAKEQAEGSEPTSGTEGPEHSVNGPASPALNQGS

SEQ ID NO: 11115 - protein, 161 aa, Homo sapiens
MTMYLWLKLLAFGFAFLDTEVFVTGQSPTPSPTGVSSVQTPHLPTHADSQTPSAGTDTQTFSGSAANAKLNPTPGSNAISDAYLNASETTTLSPSGSAVISTTTIATTPSKPTCDEKYANITVDYLYNKETKLFTAKLNVNENVECGNNTCTNNEVHNLTE

SEQ ID NO: 11116 - protein, 600 aa, Homo sapiens
MTMYLWLKLLAFGFAFLDTEVFVTGQSPTPSPTGVSSVQTPHLPTHADSQTPSAGTDTQTFSGSAANAKLNPTPGSNAISDAYLNASETTTLSPSGSAVISTTTIATTPSKPTCDEKYANITVDYLYNKETKLFTAKLNVNENVECGNNTCTNNEVHNLTECKNASVSISHNSCTAPDKTLILDVPPGVEKFQLHDCTQVEKADTTICLKWKNIETFTCDTQNITYRFQCGNMIFDNKEIKLENLEPEHEYKCDSEILYNNHKFTNASKIIKTDFGSPGEPQIIFCRSEAAHQGVITWNPPQRSFHNFTLCYIKETEKDCLNLDKNLIKYDLQNLKPYTKYVLSLHAYIIAKVQRNGSAAMCHFTTKSAPPSQVWNMTVSMTSDNSMHVKCRPPRDRNGPHERYHLEVEAGNTLVRNESHKNCDFRVKDLQYSTDYTFKAYFHNGDYPGEPFILHHSTSYNSKALIAFLAFLIIVTSIALLVVLYKIYDLHKKRSCNLDEQQELVERDDEKQLMNVEPIHADILLETYKRKIADEGRLFLAEFQSIPRVFSKFPIKEARKPFNQNKNRYVDILPYDYNRVELSEINGDAGSNYINASYID

SEQ ID NO: 11117 - protein, 735 aa, Homo sapiens
MTMYLWLKLLAFGFAFLDTEVFVTGQSPTPSPTGVSSVQTPHLPTHADSQTPSAGTDTQTFSGSAANAKLNPTPGSNAISDVPGERSTASTFPTDPVSPLTTTLSLAHHSSAALPARTSNTTITANTSDAYLNASETTTLSPSGSAVISTTTIATTPSKPTCDEKYANITVDYLYNKETKLFTAKLNVNENVECGNNTCTNNEVHNLTECKNASVSISHNSCTAPDKTLILDVPPGVEKFQLHDCTQVEKADTTICLKWKNIETFTCDTQNITYRFQCGNMIFDNKEIKLENLEPEHEYKCDSEILYNNHKFTNASKIIKTDFGSPGEPQIIFCRSEAAHQGVITWNPPQRSFHNFTLCYIKETEKDCLNLDKNLIKYDLQNLKPYTKYVLSLHAYIIAKVQRNGSAAMCHFTTKSAPPSQVWNMTVSMTSDNSMHVKCRPPRDRNGPHERYHLEVEAGNTLVRNESHKNCDFRVKDLQYSTDYTFKAYFHNGDYPGEPFILHHSTSYNSKALIAFLAFLIIVTSIALLVVLYKIYDLHKKRSCNLDEQQELVERDDEKQLMNVEPIHADILLETYKRKIADEGRLFLAEFQSIPRVFSKFPIKEARKPFNQNKNRYVDILPYDYNRVELSEINGDAGSNYINASYIDGFKEPRKYIAAQGPRDETVDDFWRMIWEQKATVIVMVTRCEEGNRNKCAEYWPSMEEGTRAFGDVVVKINQHKRCPDYIIQKLNIVN

SEQ ID NO: 11118 - protein, 206 aa, Homo sapiens
MALPCTLGLGMLLALPGALGSGGSAEDSVGSSSVTVVLLLLLLLLLATGLALAWRRLSRDSGGYYHPARLGAALWGRTRRLLWASPPGRWLQARAELGSTDNDLERQEDEQDTDYDHVADGGLQADPGEGEQQCGEASSPEQVPVRAEEARDSDTEGDLVLGSPGPASAGGSAEALLSDLHAFAGSAAWDDSARAAGGQGLHVTAL

SEQ ID NO: 11119 - protein, 93 aa, Homo sapiens
MVHVARLLLLLLTFFLRTDAETPPRFTRTPVDQTGVSGGVASFICQATGDPRPKIVWNKKGKKVSNQRFEVIEFDDGSGSVLRIQPLRTPRDE

SEQ ID NO: 11120 - protein, 1496 aa, Homo sapiens
MVHVARLLLLLLTFFLRTDAETPPRFTRTPVDQTGVSGGVASFICQATGDPRPKIVWNKKGKKVSNQRFEVIEFDDGSGSVLRIQPLRTPRDEAIYECVASNNVGEISVSTRLTVLREDQIPRGFPTIDMGPQLKVVERTRTATMLCAASGNPDPEITWFKDFLPVDTSNNNGRIKQLRSESIGALQIEQSEESDQGKYECVATNSAGTRYSAPANLYVRELREVRRVPPRFSIPPTNHEIMPGGSVNITCVAVGSPMPYVKWMLGAEDLTPEDDMPIGRNVLELNDVRQSANYTCVAMSTLGVIEAIAQITVKALPKPPGTPVVTESTATSITLTWDSGNPEPVSYYIIQHKPKNSEELYKEIDGVATTRYSVAGLSPYSDYEFRVVAVNNIGRGPPSEPVLTQTSEQAPSSAPRDVQARMLSSTTILVQWKEPEEPNGQIQGYRVYYTMDPTQHVNNWMKHNVADSQITTIGNLVPQKTYSVKVLAFTSIGDGPLSSDIQVITQTGVPGQPLNFKAEPESETSILLSWTPPRSDTIANYELVYKDGEHGEEQRITIEPGTSYRLQGLKPNSLYYFRLAARSPQGLGASTAEISARTMQSTVFAKNFHVKAVMKTSVLLSWEIPENYNSAMPFKILYDDGKMVEEVDGRATQKLIVNLKPEKSYSFVLTNRGNSAGGLQHRVTAKTAPDVLRTKPAFIGKTNLDGMITVQLPEVPANENIKGYYIIIVPLKKSRGKFIKPWESPDEMELDELLKEISRKRRSIRYGREVELKPYIAAHFDVLPTEFTLGDDKHYGGFTNKQLQSGQEYVFFVLAVMEHAESKMYATSPYSDPVVSMDLDPQPITDEEEGLIWVVGPVLAVVFIICIVIAILLYKRKRAESDSRKSSIPNNKEIPSHHPTDPVELRRLNFQTPGMASHPPIPILELADHIERLKANDNLKFSQEYESIDPGQQFTWEHSNLEVNKPKNRYANVIAYDHSRVLLSAIEGIPGSDYVNANYIDGYRKQNAYIATQGSLPETFGDFWRMIWEQRSATVVMMTKLEERSRVKCDQYWPSRGTETHGLVQVTLLDTVELATYCVRTFALYKNGSSEKREVRQFQFTAWPDHGVPEHPTPFLAFLRRVKTCNPPDAGPMVVHCSAGVGRTGCFIVIDAMLERIKHEKTVDIYGHVTLMRAQRNYMVQTEDQYIFIHDALLEAVTCGNTEVPARNLYAYIQKLTQIETGENVTGMELEFKRLASSKAHTSRFISANLPCNKFKNRLVNIMPYESTRVCLQPIRGVEGSDYINASFIDGYRQQKAYIATQGPLAETTEDFWRMLWEHNSTIVVMLTKLREMGREKCHQYWPAERSARYQYFVVDPMAEYNMPQYILREFKVTDARDGQSRTVRQFQFTDWPEQGVPKSGEGFIDFIGQVHKTKEQFGQDGPISVHCSAGVGRTGVFITLSIVLERMRYEGVVDIFQTVKMLRTQRPAMVQTEDQYQFSYRAALEYLGSFDHYAT

SEQ ID NO: 11121 - protein, 1505 aa, Homo sapiens
MVHVARLLLLLLTFFLRTDAETPPRFTRTPVDQTGVSGGVASFICQATGDPRPKIVWNKKGKKVSNQRFEVIEFDDGSGSVLRIQPLRTPRDEAIYECVASNNVGEISVSTRLTVLREDQIPRGFPTIDMGPQLKVVERTRTATMLCAASGNPDPEITWFKDFLPVDTSNNNGRIKQLRSESIGALQIEQSEESDQGKYECVATNSAGTRYSAPANLYVRVRRVPPRFSIPPTNHEIMPGGSVNITCVAVGSPMPYVKWMLGAEDLTPEDDMPIGRNVLELNDVRQSANYTCVAMSTLGVIEAIAQITVKALPKPPGTPVVTESTATSITLTWDSGNPEPVSYYIIQHKPKNSEELYKEIDGVATTRYSVAGLSPYSDYEFRVVAVNNIGRGPPSEPVLTQTSEQAPSSAPRDVQARMLSSTTILVQWKEPEEPNGQIQGYRVYYTMDPTQHVNNWMKHNVADSQITTIGNLVPQKTYSVKVLAFTSIGDGPLSSDIQVITQTGVPGQPLNFKAEPESETSILLSWTPPRSDTIANYELVYKDGEHGEEQRITIEPGTSYRLQGLKPNSLYYFRLAARSPQGLGASTAEISARTMQSMFAKNFHVKAVMKTSVLLSWEIPENYNSAMPFKILYDDGKMVEEVDGRATQKLIVNLKPEKSYSFVLTNRGNSAGGLQHRVTAKTAPDVLRTKPAFIGKTNLDGMITVQLPEVPANENIKGYYIIIVPLKKSRGKFIKPWESPDEMELDELLKEISRKRRSIRYGREVELKPYIAAHFDVLPTEFTLGDDKHYGGFTNKQLQSGQEYVFFVLAVMEHAESKMYATSPYSDPVVSMDLDPQPITDEEEGLIWVVGPVLAVVFIICIVIAILLYKRKRAESDSRKSSIPNNKEIPSHHPTDPVELRRLNFQTPGSDDSGYPGNLHSSSMASHPPIPILELADHIERLKANDNLKFSQEYESIDPGQQFTWEHSNLEVNKPKNRYANVIAYDHSRVLLSAIEGIPGSDYVNANYIDGYRKQNAYIATQGSLPETFGDFWRMIWEQRSATVVMMTKLEERSRVKCDQYWPSRGTETHGLVQVTLLDTVELATYCVRTFALYKNGSSEKREVRQFQFTAWPDHGVPEHPTPFLAFLRRVKTCNPPDAGPMVVHCSAGVGRTGCFIVIDAMLERIKHEKTVDIYGHVTLMRAQRNYMVQTEDQYIFIHDALLEAVTCGNTEVPARNLYAYIQKLTQIETGENVTGMELEFKRLASSKAHTSRFISANLPCNKFKNRLVNIMPYESTRVCLQPIRGVEGSDYINASFIDGYRQQKAYIATQGPLAETTEDFWRMLWEHNSTIVVMLTKLREMGREKCHQYWPAERSARYQYFVVDPMAEYNMPQYILREFKVTDARDGQSRTVRQFQFTDWPEQGVPKSGEGFIDFIGQVHKTKEQFGQDGPISVHCSAGVGRTGVFITLSIVLERMRYEGVVDIFQTVKMLRTQRPAMVQTEDQYQFSYRAALEYLGSFDHYAT

SEQ ID NO: 11122 - protein, 1506 aa, Homo sapiens
MVHVARLLLLLLTFFLRTDAETPPRFTRTPVDQTGVSGGVASFICQATGDPRPKIVWNKKGKKVSNQRFEVIEFDDGSGSVLRIQPLRTPRDEAIYECVASNNVGEISVSTRLTVLREDQIPRGFPTIDMGPQLKVVERTRTATMLCAASGNPDPEITWFKDFLPVDTSNNNGRIKQLRSESIGGTPIRGALQIEQSEESDQGKYECVATNSAGTRYSAPANLYVRELREVRRVPPRFSIPPTNHEIMPGGSVNITCVAVGSPMPYVKWMLGAEDLTPEDDMPIGRNVLELNDVRQSANYTCVAMSTLGVIEAIAQITVKALPKPPGTPVVTESTATSITLTWDSGNPEPVSYYIIQHKPKNSEELYKEIDGVATTRYSVAGLSPYSDYEFRVVAVNNIGRGPPSEPVLTQTSEQAPSSAPRDVQARMLSSTTILVQWKEPEEPNGQIQGYRVYYTMDPTQHVNNWMKHNVADSQITTIGNLVPQKTYSVKVLAFTSIGDGPLSSDIQVITQTGVPGQPLNFKAEPESETSILLSWTPPRSDTIANYELVYKDGEHGEEQRITIEPGTSYRLQGLKPNSLYYFRLAARSPQGLGASTAEISARTMQSMFAKNFHVKAVMKTSVLLSWEIPENYNSAMPFKILYDDGKMVEEVDGRATQKLIVNLKPEKSYSFVLTNRGNSAGGLQHRVTAKTAPDVLRTKPAFIGKTNLDGMITVQLPEVPANENIKGYYIIIVPLKKSRGKFIKPWESPDEMELDELLKEISRKRRSIRYGREVELKPYIAAHFDVLPTEFTLGDDKHYGGFTNKQLQSGQEYVFFVLAVMEHAESKMYATSPYSDPVVSMDLDPQPITDEEEGLIWVVGPVLAVVFIICIVIAILLYKSSKPDRKRAESDSRKSSIPNNKEIPSHHPTDPVELRRLNFQTPGMASHPPIPILELADHIERLKANDNLKFSQEYESIDPGQQFTWEHSNLEVNKPKNRYANVIAYDHSRVLLSAIEGIPGSDYVNANYIDGYRKQNAYIATQGSLPETFGDFWRMIWEQRSATVVMMTKLEERSRVKCDQYWPSRGTETHGLVQVTLLDTVELATYCVRTFALYKNGSSEKREVRQFQFTAWPDHGVPEHPTPFLAFLRRVKTCNPPDAGPMVVHCSAGVGRTGCFIVIDAMLERIKHEKTVDIYGHVTLMRAQRNYMVQTEDQYIFIHDALLEAVTCGNTEVPARNLYAYIQKLTQIETGENVTGMELEFKRLASSKAHTSRFISANLPCNKFKNRLVNIMPYESTRVCLQPIRGVEGSDYINASFIDGYRQQKAYIATQGPLAETTEDFWRMLWEHNSTIVVMLTKLREMGREKCHQYWPAERSARYQYFVVDPMAEYNMPQYILREFKVTDARDGQSRTVRQFQFTDWPEQGVPKSGEGFIDFIGQVHKTKEQFGQDGPISVHCSAGVGRTGVFITLSIVLERMRYEGVVDIFQTVKMLRTQRPAMVQTEDQYQFSYRAALEYLGSFDHYAT

SEQ ID NO: 11123 - protein, 1912 aa, Homo sapiens
MVHVARLLLLLLTFFLRTDAETPPRFTRTPVDQTGVSGGVASFICQATGDPRPKIVWNKKGKKVSNQRFEVIEFDDGSGSVLRIQPLRTPRDEAIYECVASNNVGEISVSTRLTVLREDQIPRGFPTIDMGPQLKVVERTRTATMLCAASGNPDPEITWFKDFLPVDTSNNNGRIKQLRSESIGGTPIRGALQIEQSEESDQGKYECVATNSAGTRYSAPANLYVRELREVRRVPPRFSIPPTNHEIMPGGSVNITCVAVGSPMPYVKWMLGAEDLTPEDDMPIGRNVLELNDVRQSANYTCVAMSTLGVIEAIAQITVKALPKPPGTPVVTESTATSITLTWDSGNPEPVSYYIIQHKPKNSEELYKEIDGVATTRYSVAGLSPYSDYEFRVVAVNNIGRGPPSEPVLTQTSEQAPSSAPRDVQARMLSSTTILVQWKEPEEPNGQIQGYRVYYTMDPTQHVNNWMKHNVADSQITTIGNLVPQKTYSVKVLAFTSIGDGPLSSDIQVITQTGVPGQPLNFKAEPESETSILLSWTPPRSDTIANYELVYKDGEHGEEQRITIEPGTSYRLQGLKPNSLYYFRLAARSPQGLGASTAEISARTMQSKPSAPPQDISCTSPSSTSILVSWQPPPVEKQNGIITEYSIKYTAVDGEDDKPHEILGIPSDTTKYLLEQLEKWTEYRITVTAHTDVGPGPESLSVLIRTNEDVPSGPPRKVEVEAVNSTSVKVSWRSPVPNKQHGQIRGYQVHYVRMENGEPKGQPMLKDVMLADAQWEFDDTTEHDMIISGLQPETSYSLTVTAYTTKGDGARSKPKLVSTTGAVPGKPRLVINHTQMNTALIQWHPPVDTFGPLQGYRLKFGRKDMEPLTTLEFSEKEDHFTATDIHKGASYVFRLSARNKVGFGEEMVKEISIPEEVPTGFPQNLHSEGTTSTSVQLSWQPPVLAERNGIITKYTLLYRDINIPLLPMEQLIVPADTTMTLTGLKPDTTYDVKVRAHTSKGPGPYSPSVQFRTLPVDQVFAKNFHVKAVMKTSVLLSWEIPENYNSAMPFKILYDDGKMVEEVDGRATQKLIVNLKPEKSYSFVLTNRGNSAGGLQHRVTAKTAPDVLRTKPAFIGKTNLDGMITVQLPEVPANENIKGYYIIIVPLKKSRGKFIKPWESPDEMELDELLKEISRKRRSIRYGREVELKPYIAAHFDVLPTEFTLGDDKHYGGFTNKQLQSGQEYVFFVLAVMEHAESKMYATSPYSDPVVSMDLDPQPITDEEEGLIWVVGPVLAVVFIICIVIAILLYKRKRAESDSRKSSIPNNKEIPSHHPTDPVELRRLNFQTPGMASHPPIPILELADHIERLKANDNLKFSQEYESIDPGQQFTWEHSNLEVNKPKNRYANVIAYDHSRVLLSAIEGIPGSDYVNANYIDGYRKQNAYIATQGSLPETFGDFWRMIWEQRSATVVMMTKLEERSRVKCDQYWPSRGTETHGLVQVTLLDTVELATYCVRTFALYKNGSSEKREVRQFQFTAWPDHGVPEHPTPFLAFLRRVKTCNPPDAGPMVVHCSAGVGRTGCFIVIDAMLERIKHEKTVDIYGHVTLMRAQRNYMVQTEDQYIFIHDALLEAVTCGNTEVPARNLYAYIQKLTQIETGENVTGMELEFKRLASSKAHTSRFISANLPCNKFKNRLVNIMPYESTRVCLQPIRGVEGSDYINASFIDGYRQQKAYIATQGPLAETTEDFWRMLWEHNSTIVVMLTKLREMGREKCHQYWPAERSARYQYFVVDPMAEYNMPQYILREFKVTDARDGQSRTVRQFQFTDWPEQGVPKSGEGFIDFIGQVHKTKEQFGQDGPISVHCSAGVGRTGVFITLSIVLERMRYEGVVDIFQTVKMLRTQRPAMVQTEDQYQFSYRAALEYLGSFDHYAT

SEQ ID NO: 11124 - protein, 1912 aa, Homo sapiens; identical to SEQ ID NO: 11123

SEQ ID NO: 11125 - protein, 1912 aa, Homo sapiens; identical to SEQ ID NO: 11123

SEQ ID NO: 11126 - protein, 1505 aa, Homo sapiens
MVHVARLLLLLLTFFLRTDAETPPRFTRTPVDQTGVSGGVASFICQATGDPRPKIVWNKKGKKVSNQRFEVIEFDDGSGSVLRIQPLRTPRDEAIYECVASNNVGEISVSTRLTVLREDQIPRGFPTIDMGPQLKVVERTRTATMLCAASGNPDPEITWFKDFLPVDTSNNNGRIKQLRSESIGGTPIRGALQIEQSEESDQGKYECVATNSAGTRYSAPANLYVRELREVRRVPPRFSIPPTNHEIMPGGSVNITCVAVGSPMPYVKWMLGAEDLTPEDDMPIGRNVLELNDVRQSANYTCVAMSTLGVIEAIAQITVKALPKPPGTPVVTESTATSITLTWDSGNPEPVSYYIIQHKPKNSEELYKEIDGVATTRYSVAGLSPYSDYEFRVVAVNNIGRGPPSEPVLTQTSEQAPSSAPRDVQARMLSSTTILVQWKEPEEPNGQIQGYRVYYTMDPTQHVNNWMKHNVADSQITTIGNLVPQKTYSVKVLAFTSIGDGPLSSDIQVITQTGVPGQPLNFKAEPESETSILLSWTPPRSDTIANYELVYKDGEHGEEQRITIEPGTSYRLQGLKPNSLYYFRLAARSPQGLGASTAEISARTMQSMFAKNFHVKAVMKTSVLLSWEIPENYNSAMPFKILYDDGKMVEEVDGRATQKLIVNLKPEKSYSFVLTNRGNSAGGLQHRVTAKTAPDVLRTKPAFIGKTNLDGMITVQLPEVPANENIKGYYIIIVPLKKSRGKFIKPWESPDEMELDELLKEISRKRRSIRYGREVELKPYIAAHFDVLPTEFTLGDDKHYGGFTNKQLQSGQEYVFFVLAVMEHAESKMYATSPYSDPVVSMDLDPQPITDEEEGLIWVVGPVLAVVFIICIVIAILLYKSKPDRKRAESDSRKSSIPNNKEIPSHHPTDPVELRRLNFQTPGMASHPPIPILELADHIERLKANDNLKFSQEYESIDPGQQFTWEHSNLEVNKPKNRYANVIAYDHSRVLLSAIEGIPGSDYVNANYIDGYRKQNAYIATQGSLPETFGDFWRMIWEQRSATVVMMTKLEERSRVKCDQYWPSRGTETHGLVQVTLLDTVELATYCVRTFALYKNGSSEKREVRQFQFTAWPDHGVPEHPTPFLAFLRRVKTCNPPDAGPMVVHCSAGVGRTGCFIVIDAMLERIKHEKTVDIYGHVTLMRAQRNYMVQTEDQYIFIHDALLEAVTCGNTEVPARNLYAYIQKLTQIETGENVTGMELEFKRLASSKAHTSRFISANLPCNKFKNRLVNIMPYESTRVCLQPIRGVEGSDYINASFIDGYRQQKAYIATQGPLAETTEDFWRMLWEHNSTIVVMLTKLREMGREKCHQYWPAERSARYQYFVVDPMAEYNMPQYILREFKVTDARDGQSRTVRQFQFTDWPEQGVPKSGEGFIDFIGQVHKTKEQFGQDGPISVHCSAGVGRTGVFITLSIVLERMRYEGVVDIFQTVKMLRTQRPAMVQTEDQYQFSYRAALEYLGSFDHYAT

SEQ ID NO: 11127 - protein, 1502 aa, Homo sapiens
MVHVARLLLLLLTFFLRTDAETPPRFTRTPVDQTGVSGGVASFICQATGDPRPKIVWNKKGKKVSNQRFEVIEFDDGSGSVLRIQPLRTPRDEAIYECVASNNVGEISVSTRLTVLREDQIPRGFPTIDMGPQLKVVERTRTATMLCAASGNPDPEITWFKDFLPVDTSNNNGRIKQLRSGGTPIRGALQIEQSEESDQGKYECVATNSAGTRYSAPANLYVRELREVRRVPPRFSIPPTNHEIMPGGSVNITCVAVGSPMPYVKWMLGAEDLTPEDDMPIGRNVLELNDVRQSANYTCVAMSTLGVIEAIAQITVKALPKPPGTPVVTESTATSITLTWDSGNPEPVSYYIIQHKPKNSEELYKEIDGVATTRYSVAGLSPYSDYEFRVVAVNNIGRGPPSEPVLTQTSEQAPSSAPRDVQARMLSSTTILVQWKEPEEPNGQIQGYRVYYTMDPTQHVNNWMKHNVADSQITTIGNLVPQKTYSVKVLAFTSIGDGPLSSDIQVITQTGVPGQPLNFKAEPESETSILLSWTPPRSDTIANYELVYKDGEHGEEQRITIEPGTSYRLQGLKPNSLYYFRLAARSPQGLGASTAEISARTMQSMFAKNFHVKAVMKTSVLLSWEIPENYNSAMPFKILYDDGKMVEEVDGRATQKLIVNLKPEKSYSFVLTNRGNSAGGLQHRVTAKTAPDVLRTKPAFIGKTNLDGMITVQLPEVPANENIKGYYIIIVPLKKSRGKFIKPWESPDEMELDELLKEISRKRRSIRYGREVELKPYIAAHFDVLPTEFTLGDDKHYGGFTNKQLQSGQEYVFFVLAVMEHAESKMYATSPYSDPVVSMDLDPQPITDEEEGLIWVVGPVLAVVFIICIVIAILLYKSKPDRKRAESDSRKSSIPNNKEIPSHHPTDPVELRRLNFQTPGMASHPPIPILELADHIERLKANDNLKFSQEYESIDPGQQFTWEHSNLEVNKPKNRYANVIAYDHSRVLLSAIEGIPGSDYVNANYIDGYRKQNAYIATQGSLPETFGDFWRMIWEQRSATVVMMTKLEERSRVKCDQYWPSRGTETHGLVQVTLLDTVELATYCVRTFALYKNGSSEKREVRQFQFTAWPDHGVPEHPTPFLAFLRRVKTCNPPDAGPMVVHCSAGVGRTGCFIVIDAMLERIKHEKTVDIYGHVTLMRAQRNYMVQTEDQYIFIHDALLEAVTCGNTEVPARNLYAYIQKLTQIETGENVTGMELEFKRLASSKAHTSRFISANLPCNKFKNRLVNIMPYESTRVCLQPIRGVEGSDYINASFIDGYRQQKAYIATQGPLAETTEDFWRMLWEHNSTIVVMLTKLREMGREKCHQYWPAERSARYQYFVVDPMAEYNMPQYILREFKVTDARDGQSRTVRQFQFTDWPEQGVPKSGEGFIDFIGQVHKTKEQFGQDGPISVHCSAGVGRTGVFITLSIVLERMRYEGVVDIFQTVKMLRTQRPAMVQTEDQYQFSYRAALEYLGSFDHYAT

SEQ ID NO: 11128 - protein, 202 aa, Homo sapiens
MVHVARLLLLLLTFFLRTDAETPPRFTRTPVDQTGVSGGVASFICQATGDPRPKIVWNKKGKKVSNQRFEVIEFDDGSGSVLRIQPLRTPRDEAIYECVASNNVGEISVSTRLTVLREDQIPRGFPTIDMGPQLKVVERTRTATMLCAASGNPDPEITWFKDFLPVDTSNNNGRIKQLRSGTDFSPSSLSLLLNGWSMFVMS

SEQ ID NO: 11129 - protein, 1505 aa, Homo sapiens [sequence omitted]

SEQ ID NO: 11130 - protein, 297 aa, Homo sapiens
  SITE 1: note = misc_feature - Xaa can be any naturally occurring amino acid
XAGGLQHRVTAKTAPDVLRTKPAFIGKTNLDGMITVQLPEVPANENIKGYYIIIVPLKKSRGKFIKPWESPDEMELDELLKEISRKRRSIRYGREVELKPYIAAHFDVLPTEFTLGDDKHYGGFTNKQLQSGQEYVFFVLAVMEHAESKMYATSPYSDPVVSMDLDPQPITDEEEGLIWVVGPVLAVVFIICIVIAILLYKSKPDRKRAESDSRKSSIPNNKEIPSHHPTDPVELRRLNFQTPALSSNSVPYASLIGSVSSLSSQTTTQSIYDNNSLPRSARKGMASHPPIPILELA

SEQ ID NO: 11131 - protein, 262 aa, Homo sapiens
MAPEPAPGRTMVPLVPALVMLGLVAGAHGDSKPVFIKVPEDQTGLSGGVASFVCQATGEPKPRITWMKKGKKVSSQRFEVIEFDDGAGSVLRIQPLRVQRDEAIYECTATNSLGEINTSAKLSVLEEEQLPPGFPSIDMGPQLKVVEKARTATMLCAAGGNPDPEISWFKDFLPVDPATSNGRIKQLRSGALQIESSEESDQGKYECVATNSAGTRYSAPANLYVRGLAAWARSPMGIWSHPIRLLGVCACVCAHTGTLICV

SEQ ID NO: 11132 - protein, 262 aa, Homo sapiens; identical to SEQ ID NO: 11131

SEQ ID NO: 11133 - protein, 1907 aa, Homo sapiens
MAPEPAPGRTMVPLVPALVMLGLVAGAHGDSKPVFIKVPEDQTGLSGGVASFVCQATGEPKPRITWMKKGKKVSSQRFEVIEFDDGAGSVLRIQPLRVQRDEAIYECTATNSLGEINTSAKLSVLEEEQLPPGFPSIDMGPQLKVVEKARTATMLCAAGGNPDPEISWFKDFLPVDPATSNGRIKQLRSGALQIESSEESDQGKYECVATNSAGTRYSAPANLYVRVRRVAPRFSIPPSSQEVMPGGSVNLTCVAVGAPMPYVKWMMGAEELTKEDEMPVGRNVLELSNVVRSANYTCVAISSLGMIEATAQVTVKALPKPPIDLVVTETTATSVTLTWDSGNSEPVTYYGIQYRAAGTEGPFQEVDGVATTRYSIGGLSPFSEYAFRVLAVNSIGRGPPSEAVRARTGEQAPSSPPRRVQARMLSASTMLVQWEPPEEPNGLVRGYRVYYTPDSRRPPNAWHKHNTDAGLLTTVGSLLPGITYSLRVLAFTAVGDGPPSPTIQVKTQQGVPAQPADFQAEVESDTRIQLSWLLPPQERIIMYELVYWAAEDEDQQHKVTFDPTSSYTLEDLKPDTLYRFQLAARSDMGVGVFTPTIEARTAQSTPSAPPQKVMCVSMGSTTVRVSWVPPPADSRNGVITQYSVAYEAVDGEDRGRHVVDGISREHSSWDLVGLEKWTEYRVWVRAHTDVGPGPESSPVLVRTDEDVPSGPPRKVEVEPLNSTAVHVYWKLPVPSKQHGQIRGYQVTYVRLENGEPRGLPIIQDVMLAEAQWRPEESEDYETTISGLTPETTYSVTVAAYTTKGDGARSKPKIVTTTGAVPGRPTMMISTTAMNTALLQWHPPKELPGELLGYRLQYCRADEARPNTIDFGKDDQHFTVTGLHKGTTYIFRLAAKNRAGLGEEFEKEIRTPEDLPSGFPQNLHVTGLTTSTTELAWDPPVLAERNGRIISYTVVFRDINSQQELQNITTDTRFTLTGLKPDTTYDIKVRAWTSKGSGPLSPSIQSRTMPVEQVFAKNFRVAAAMKTSVLLSWEVPDSYKSAVPFKILYNGQSVEVDGHSMRKLIADLQPNTEYSFVLMNRGSSAGGLQHLVSIRTAPDLLPHKPLPASAYIEDGRFDLSMPHVQDPSLVRWFYIVVVPIDRVGGSMLTPRWSTPEELELDELLEAIEQGGEEQRRRRRQAERLKPYVAAQLDVLPETFTLGDKKNYRGFYNRPLSPDLSYQCFVLASLKEPMDQKRYASSPYSDEIVVQVTPAQQQEEPEMLWVTGPVLAVILIILIVIAILLFKRKRTHSPSSKDEQSIGLKDSLLAHSSDPVEMRRLNYQTPGMRDHPPIPITDLADNIERLKANDGLKFSQEYESIDPGQQFTWENSNLEVNKPKNRYANVIAYDHSRVILTSIDGVPGSDYINANYIDGYRKQNAYIATQGPLPETMGDFWRMVWEQRTATVVMMTRLEEKSRVKCDQYWPARGTETCGLIQVTLLDTVELATYTVRTFALHKSGSSEKRELRQFQFMAWPDHGVPEYPTPILAFLRRVKACNPLDAGPMVVHCSAGVGRTGCFIVIDAMLERMKHEKTVDIYGHVTCMRSQRNYMVQTEDQYVFIHEALLEAATCGHTEVPARNLYAHIQKLGQVPPGESVTAMELEFKLLASSKAHTSRFISANLPCNKFKNRLVNIMPYELTRVCLQPIRGVEGSDYINASFLDGYRQQKAYIATQGPLAESTEDFWRMLWEHNSTIIVMLTKLREMGREKCHQYWPAERSARYQYFVVDPMAEYNMPQYILREFKVTDARDGQSRTIRQFQFTDWPEQGVPKTGEGFIDFIGQVHKTKEQFGQDGPITVHCSAGVGRTGVFITLSIVLERMRYEGVVDMFQTVKTLRTQRPAMVQTEDQYQLCYRAALEYLGSFDHYAT

SEQ ID NO: 11134 - protein, 1898 aa, Homo sapiens
MAPEPAPGRTMVPLVPALVMLGLVAGAHGDSKPVFIKVPEDQTGLSGGVASFVCQATGEPKPRITWMKKGKKVSSQRFEVIEFDDGAGSVLRIQPLRVQRDEAIYECTATNSLGEINTSAKLSVLEEEQLPPGFPSIDMGPQLKVVEKARTATMLCAAGGNPDPEISWFKDFLPVDPATSNGRIKQLRSGALQIESSEESDQGKYECVATNSAGTRYSAPANLYVRVRRVAPRFSIPPSSQEVMPGGSVNLTCVAVGAPMPYVKWMMGAEELTKEDEMPVGRNVLELSNVVRSANYTCVAISSLGMIEATAQVTVKALPKPPIDLVVTETTATSVTLTWDSGNSEPVTYYGIQYRAAGTEGPFQEVDGVATTRYSIGGLSPFSEYAFRVLAVNSIGRGPPSEAVRARTGEQAPSSPPRRVQARMLSASTMLVQWEPPEEPNGLVRGYRVYYTPDSRRPPNAWHKHNTDAGLLTTVGSLLPGITYSLRVLAFTAVGDGPPSPTIQVKTQQGVPAQPADFQAEVESDTRIQLSWLLPPQERIIMYELVYWAAEDEDQQHKVTFDPTSSYTLEDLKPDTLYRFQLAARSDMGVGVFTPTIEARTAQSTPSAPPQKVMCVSMGSTTVRVSWVPPPADSRNGVITQYSVAYEAVDGEDRGRHVVDGISREHSSWDLVGLEKWTEYRVWVRAHTDVGPGPESSPVLVRTDEDVPSGPPRKVEVEPLNSTAVHVYWKLPVPSKQHGQIRGYQVTYVRLENGEPRGLPIIQDVMLAEAQETTISGLTPETTYSVTVAAYTTKGDGARSKPKIVTTTGAVPGRPTMMISTTAMNTALLQWHPPKELPGELLGYRLQYCRADEARPNTIDFGKDDQHFTVTGLHKGTTYIFRLAAKNRAGLGEEFEKEIRTPEDLPSGFPQNLHVTGLTTSTTELAWDPPVLAERNGRIISYTVVFRDINSQQELQNITTDTRFTLTGLKPDTTYDIKVRAWTSKGSGPLSPSIQSRTMPVEQVFAKNFRVAAAMKTSVLLSWEVPDSYKSAVPFKILYNGQSVEVDGHSMRKLIADLQPNTEYSFVLMNRGSSAGGLQHLVSIRTAPDLLPHKPLPASAYIEDGRFDLSMPHVQDPSLVRWFYIVVVPIDRVGGSMLTPRWSTPEELELDELLEAIEQGGEEQRRRRRQAERLKPYVAAQLDVLPETFTLGDKKNYRGFYNRPLSPDLSYQCFVLASLKEPMDQKRYASSPYSDEIVVQVTPAQQQEEPEMLWVTGPVLAVILIILIVIAILLFKRKRTHSPSSKDEQSIGLKDSLLAHSSDPVEMRRLNYQTPGMRDHPPIPITDLADNIERLKANDGLKFSQEYESIDPGQQFTWENSNLEVNKPKNRYANVIAYDHSRVILTSIDGVPGSDYINANYIDGYRKQNAYIATQGPLPETMGDFWRMVWEQRTATVVMMTRLEEKSRVKCDQYWPARGTETCGLIQVTLLDTVELATYTVRTFALHKSGSSEKRELRQFQFMAWPDHGVPEYPTPILAFLRRVKACNPLDAGPMVVHCSAGVGRTGCFIVIDAMLERMKHEKTVDIYGHVTCMRSQRNYMVQTEDQYVFIHEALLEAATCGHTEVPARNLYAHIQKLGQVPPGESVTAMELEFKLLASSKAHTSRFISANLPCNKFKNRLVNIMPYELTRVCLQPIRGVEGSDYINASFLDGYRQQKAYIATQGPLAESTEDFWRMLWEHNSTIIVMLTKLREMGREKCHQYWPAERSARYQYFVVDPMAEYNMPQYILREFKVTDARDGQSRTIRQFQFTDWPEQGVPKTGEGFIDFIGQVHKTKEQFGQDGPITVHCSAGVGRTGVFITLSIVLERMRYEGVVDMFQTVKTLRTQRPAMVQTEDQYQLCYRAALEYLGSFDHYAT

SEQ ID NO: 11135 - protein, 979 aa, Homo sapiens
TYVRLENGEPRGLPIIQDVMLAEAQWRPEESEDYETTISGLTPETTYSVTVAAYTTKGDGARSKPKIVTTTGAVFAKNFRVAAAMKTSVLLSWEVPDSYKSAVPFKILYNGQSVEVDGHSMRKLIADLQPNTEYSFVLMNRGSSAGGLQHLVSIRTAPDLLPHKPLPASAYIEDGRFDLSMPHVQDPSLVRWFYIVVVPIDRVGGSMLTPRWSTPEELELDELLEAIEQGGEEQRRRRRQAERLKPYVAAQLDVLPETFTLGDKKNYRGFYNRPLSPDLSYQCFVLASLKEPMDQKRYASSPYSDEIVVQVTPAQQQEEPEMLWVTGPVLAVILIILIVIAILLFKRKRTHSPSSKDEQSIGLKDSLLAHSSDPVEMRRLNYQTPGSSVPSCPNTSSMRDHPPIPITDLADNIERLKANDGLKFSQEYESIDPGQQFTWENSNLEVNKPKNRYANVIAYDHSRVILTSIDGVPGSDYINANYIDGYRKQNAYIATQGPLPETMGDFWRMVWEQRTATVVMMTRLEEKSRVKCDQYWPARGTETCGLIQVTLLDTVELATYTVRTFALHKSGSSEKRELRQFQFMAWPDHGVPEYPTPILAFLRRVKACNPLDAGPMVVHCSAGVGRTGCFIVIDAMLERMKHEKTVDIYGHVTCMRSQRNYMVQTEDQYVFIHEALLEAATCGHTEVPARNLYAHIQKLGQVPPGESVTAMELEFKLLASSKAHTSRFISANLPCNKFKNRLVNIMPYELTRVCLQPIRGVEGSDYINASFLDGYRQQKAYIATQGPLAESTEDFWRMLWEHNSTIIVMLTKLREMGREKCHQYWPAERSARYQYFVVDPMAEYNMPQYILREFKVTDARDGQSRTIRQFQFTDWPEQGVPKTGEGFIDFIGQVHKTKEQFGQDGPITVHCSAGVGRTGVFITLSIVLERMRYEGVVDMFQTVKTLRTQRPAMVQTEDQYQLCYRAALEYLGSFDHYAT

SEQ ID NO: 11136 - protein, 1553 aa, Homo sapiens
  SITE 1: note = misc_feature - Xaa can be any naturally occurring amino acid
XEPVTYYGIQYRAAGTEGPFQEVDGVATTRYSIGGLSPFSEYAFRVLAVNSIGRGPPSEAVRARTGEQAPSSPPRRVQARMLSASTMLVQWEPPEEPNGLVRGYRVYYTPDSRRPPNAWHKHNTDAGLLTTVGSLLPGITYSLRVLAFTAVGDGPPSPTIQVKTQQGVPAQPADFQAEVESDTRIQLSWLLPPQERIIMYELVYWAAEDEDQQHKVTFDPTSSYTLEDLKPDTLYRFQLAARSDMGVGVFTPTIEARTAQSTPSAPPQKVMCVSMGSTTVRVSWVPPPADSRNGVITQYSVAYEAVDGEDRGRHVVDGISREHSSWDLVGLEKWTEYRVWVRAHTDVGPGPESSPVLVRTDEDVPSGPPRKVEVEPLNSTAVHVYWKLPVPSKQHGQIRGYQVTYVRLENGEPRGLPIIQDVMLAEAQETTISGLTPETTYSVTVAAYTTKGDGARSKPKIVTTTVPGRPTMMISTTAMNTALLQWHPPKELPGELLGYRLQYCRADEARPNTIDFGKDDQHFTVTGLHKGTTYIFRLAAKNRAGLGEEFEKEIRTPEDLPSGFPQNLHVTGLTTSTTELAWDPPVLAERNGRIISYTVVFRDINSQQELQNITTDTRFTLTGLKPDTTYDIKVRAWTSKGSGPLSPSIQSRTMPVEQVFAKNFRVAAAMKTSVLLSWEVPDSYKSAVPFKILYNGQSVEVDGHSMRKLIADLQPNTEYSFVLMNRGSSAGGLQHLVSIRTAPDLLPHKPLPASAYIEDGRFDLSMPHVQDPSLVRWFYIVVVPIDRVGGSMLTPRWSTPEELELDELLEAIEQGGEEQRRRRRQAERLKPYVAAQLDVLPETFTLGDKKNYRGFYNRPLSPDLSYQCFVLASLKEPMDQKRYASSPYSDEIVVQVTPAQQQEEPEMLWVTGPVLAVILIILIVIAILLFKRKRTHSPSSKDEQSIGLKDSLLAHSSDPVEMRRLNYQTPGMRDHPPIPITDLADNIERLKANDGLKFSQEYESIDPGQQFTWENSNLEVNKPKNRYANVIAYDHSRVILTSIDGVPGSDYINANYIDGYRKQNAYIATQGPLPETMGDFWRMVWEQRTATVVMMTRLEEKSRVKCDQYWPARGTETCGLIQVTLLDTVELATYTVRTFALHKSGSSEKRELRQFQFMAWPDHGVPEYPTPILAFLRRVKACNPLDAGPMVVHCSAGVGRTGCFIVIDAMLERMKHEKTVDIYGHVTCMRSQRNYMVQTEDQYVFIHEALLEAATCGHTEVPARNLYAHIQKLGQVPPGESVTAMELEFKLLASSKAHTSRFISANLPCNKFKNRLVNIMPYELTRVCLQPIRGVEGSDYINASFLDGYRQQKAYIATQGPLAESTEDFWRMLWEHNSTIIVMLTKLREMGREKCHQYWPAERSARYQYFVVDPMAEYNMPQYILREFKVTDARDGQSRTIRQFQFTDWPEQGVPKTGEGFIDFIGQVHKTKEQFGQDGPITVHCSAGVGRTGVFITLSIVLERMRYEGVVDMFQTVKTLRTQRPAMVQTEDQYQLCYRAALEYLGSFDHYAT

SEQ ID NO: 11137 - protein, 1332 aa, Homo sapiens
  SITE 1: note = misc_feature - Xaa can be any naturally occurring amino acid
XSLLPGITYSLRVLAFTAVGDGPPSPTIQVKTQQGVPAQPADFQAEVESDTRIQLSWLLPPQERIIMYELVYWAAEDEDQQHKVTFDPTSSYTLEDLKPDTLYRFQLAARSDMGVGVFTPTIEARTAQSMPSGPPRKVEVEPLNSTAVHVYWKLPVPSKQHGQIRGYQVTYVRLENGEPRGLPIIQDVMLAEAQETTISGLTPETTYSVTVAAYTTKGDGARSKPKIVTTTGAVPGRPTMMISTTAMNTALLQWHPPKELPGELLGYRLQYCRADEARPNTIDFGKDDQHFTVTGLHKGTTYIFRLAAKNRAGLGEEFEKEIRTPEDLPSGFPQNLHVTGLTTSTTELAWDPPVLAERNGRIISYTVVFRDINSQQELQNITTDTRFTLTGLKPDTTYDIKVRAWTSKGSGPLSPSIQSRTMPVEQVFAKNFRVAAAMKTSVLLSWEVPDSYKSAVPFKILYNGQSVEVDGHSMRKLIADLQPNTEYSFVLMNRGSSAGGLQHLVSIRTAPDLLPHKPLPASAYIEDGRFDLSMPHVQDPSLVRWFYIVVVPIDRVGGSMLTPRWSTPEELELDELLEAIEQGGEEQRRRRRQAERLKPYVAAQLDVLPETFTLGDKKNYRGFYNRPLSPDLSYQCFVLASLKEPMDQKRYASSPYSDEIVVQVTPAQQQEEPEMLWVTGPVLAVILIILIVIAILLFKRKRTHSPSSKDEQSIGLKDSLLAHSSDPVEMRRLNYQTPGSSVPSCPNTSSMRDHPPIPITDLADNIERLKANDGLKFSQEYESIDPGQQFTWENSNLEVNKPKNRYANVIAYDHSRVILTSIDGVPGSDYINANYIDGYRKQNAYIATQGPLPETMGDFWRMVWEQRTATVVMMTRLEEKSRVKCDQYWPARGTETCGLIQVTLLDTVELATYTVRTFALHKSGSSEKRELRQFQFMAWPDHGVPEYPTPILAFLRRVKACNPLDAGPMVVHCSAGVGRTGCFIVIDAMLERMKHEKTVDIYGHVTCMRSQRNYMVQTEDQYVFIHEALLEAATCGHTEVPARNLYAHIQKLGQVPPGESVTAMELEFKLLASSKAHTSRFISANLPCNKFKNRLVNIMPYELTRVCLQPIRGVEGSDYINASFLDGYRQQKAYIATQGPLAESTEDFWRMLWEHNSTIIVMLTKLREMGREKCHQYWPAERSARYQYFVVDPMAEYNMPQYILREFKVTDARDGQSRTIRQFQFTDWPEQGVPKTGEGFIDFIGQVHKTKEQFGQDGPITVHCSAGVGRTGVFITLSIVLERMRYEGVVDMFQTVKTLRTQRPAMVQTEDQYQLCYRAALEYLGSFDHYAT

SEQ ID NO: 11138 - protein, 1291 aa, Homo sapiens
  SITE 1: note = misc_feature - Xaa can be any naturally occurring amino acid
XSVTLTWDSGNSEPVTYYGIQYRAAGTEGPFQEVDGVATTRYSIGGLSPFSEYAFRVLAVNSIGRGPPSEAVRARTGEQAPSSPPRRVQARMLSASTMLVQWEPPEEPNGLVRGYRVYYTPDSRRPPNAWHKHNTDAGLLTTVGSLLPGITYSLRVLAFTAVGDGPPSPTIQVKTQQGVPAQPADFQAEVESDTRIQLSWLLPPQERIIMYELVYWAAEDEDQQHKVTFDPTSSYTLEDLKPDTLYRFQLAARSDMGVGVFTPTIEARTAQSMPSGPPRKVEVEPLNSTAVHVYWKLPVPSKQHGQIRGYQVTYVRLENGEPRGLPIIQDVMLAEAQWRPEESEDYETTISGLTPETTYSVTVAAYTTKGDGARSKPKIVTTTGAVFAKNFRVAAAMKTSVLLSWEVPDSYKSAVPFKILYNGQSVEVDGHSMRKLIADLQPNTEYSFVLMNRGSSAGGLQHLVSIRTAPDLLPHKPLPASAYIEDGRFDLSMPHVQDPSLVRWFYIVVVPIDRVGGSMLTPRWSTPEELELDELLEAIEQGGEEQRRRRRQAERLKPYVAAQLDVLPETFTLGDKKNYRGFYNRPLSPDLSYQCFVLASLKEPMDQKRYASSPYSDEIVVQVTPAQQQEEPEMLWVTGPVLAVILIILIVIAILLFKRKRTHSPSSKDEQSIGLKDSLLAHSSDPVEMRRLNYQTPGSSVPSCPNTSSMRDHPPIPITDLADNIERLKANDGLKFSQEYESIDPGQQFTWENSNLEVNKPKNRYANVIAYDHSRVILTSIDGVPGSDYINANYIDGYRKQNAYIATQGPLPETMGDFWRMVWEQRTATVVMMTRLEEKSRVKCDQYWPARGTETCGLIQVTLLDTVELATYTVRTFALHKSGSSEKRELRQFQFMAWPDHGVPEYPTPILAFLRRVKACNPLDAGPMVVHCSAGVGRTGCFIVIDAMLERMKHEKTVDIYGHVTCMRSQRNYMVQTEDQYVFIHEALLEAATCGHTEVPARNLYAHIQKLGQVPPGESVTAMELEFKLLASSKAHTSRFISANLPCNKFKNRLVNIMPYELTRVCLQPIRGVEGSDYINASFLDGYRQQKAYIATQGPLAESTEDFWRMLWEHNSTIIVMLTKLREMGREKCHQYWPAERSARYQYFVVDPMAEYNMPQYILREFKVTDARDGQSRTIRQFQFTDWPEQGVPKTGEGFIDFIGQVHKTKEQFGQDGPITVHCSAGVGRTGVFITLSIVLERMRYEGVVDMFQTVKTLRTQRPAMVQTEDQYQLCYRAALEYLGSFDHYAT

SEQ ID NO: 11139 - protein, 120 aa, Homo sapiens
MKPAAREARLPPRSPGLRWALPLLLLLLRLGQILCAGGRPSPVFDIKAVSISPTNVILTWKSNDTAASEYKYVVKHKMENEKTITVVHQPWCNITGLRPATSYVFSITPGIGNETWGDPR

SEQ ID NO: 11140 - protein, 147 aa, Homo sapiens [sequence omitted]

SEQ ID NO: 11141 - protein, 539 aa, Homo sapiens
MKPAAREARLPPRSPGLRWALPLLLLLLRLGQILCAGGTPSPIPDPSVATVATGENGITQISSTAESFHKQNGTGTPQVETNTSEDGESSGANDSLRTPEQGSNGTDGASQKTPSSTGPSPVFDIKAVSISPTNVILTWKSNDTAASEYKYVVKHKMENEKTITVVHQPWCNITGLRPATSYVFSITPGIGNETWGDPRVIKVITEPIPVSDLRVALTGVRKAALSWSNGNGTASCRVLLESIGSHEELTQDSRLQVNISGLKPGVQYNINPYLLQSNKTKGDPLGTEGGLDASNTERSRAGSPTAPVHDESLVGPVDPSSGQQSRDTEVLLVGLEPGTRYNATVYSQAANGTEGQPQAIEFRTNAIQVFDVTAVNISATSLTLIWKVSDNESSSNYTYKIHVAGETDSSNLNVSEPRAVIPGLRSSTFYNITVCPVLGDIEGTPGFLQVHTPPVPVSDFRVTVVSTTEIGLAWSSHDAESFQMHITQEGAGNSRVEITTNQSIIIGGLFPGTKYCFEIVPKGPNGTEGASRTVCNRTG

SEQ ID NO: 11142 - protein, 1337 aa, Homo sapiens
MKPAAREARLPPRSPGLRWALPLLLLLLRLGQILCAGGTPSPIPDPSVATVATGENGITQISSTAESFHKQNGTGTPQVETNTSEDGESSGANDSLRTPEQGSNGTDGASQKTPSSTGPSPVFDIKAVSISPTNVILTWKSNDTAASEYKYVVKHKMENEKTITVVHQPWCNITGLRPATSYVFSITPGIGNETWGDPRVIKVITEPIPVSDLRVALTGVRKAALSWSNGNGTASCRVLLESIGSHEELTQDSRLQVNISGLKPGVQYNINPYLLQSNKTKGDPLGTEGGLDASNTERSRAGSPTAPVHDESLVGPVDPSSGQQSRDTEVLLVGLEPGTRYNATVYSQAANGTEGQPQAIEFRTNAIQVFDVTAVNISATSLTLIWKVSDNESSSNYTYKIHVAGETDSSNLNVSEPRAVIPGLRSSTFYNITVCPVLGDIEGTPGFLQVHTPPVPVSDFRVTVVSTTEIGLAWSSHDAESFQMHITQEGAGNSRVEITTNQSIIIGGLFPGTKYCFEIVPKGPNGTEGASRTVCNRTVPSAVFDIHVVYVTTTEMWLDWKSPDGASEYVYHLVIESKHGSNHTSTYDKAITLQGLIPGTLYNITISPEVDHVWGDPNSTAQYTRPSNVSNIDVSTNTTAATLSWQNFDDASPTYSYCLLIEKAGNSSNATQVVTDIGITDATVTELIPGSSYTVEIFAQVGDGIKSLEPGRKSFCTDPASMASFDCEVVPKEPALVLKWTCPPGANAGFELEVSSGAWNNATHLESCSSENGTEYRTEVTYLNFSTSYNISITTVSCGKMAAPTRNTCTTGITDPPPPDGSPNITSVSHNSVKVKFSGFEASHGPIKAYAVILTTGEAGHPSADVLKYTYEDFKKGASDTYVTYLIRTEEKGRSQSLSEVLKYEIDVGNESTTLGYYNGKLEPLGSYRACVAGFTNITFHPQNKGLIDGAESYVSFSRYSDAVSLPQDPGVICGAVFGCIFGALVIVTVGGFIFWRKKRKDAKNNEVSFSQIKPKKSKLIRVENFEAYFKKQQADSNCGFAEEYEDLKLVGISQPKYAAELAENRGKNRYNNVLPYDISRVKLSVQTHSTDDYINANYMPGYHSKKDFIATQGPLPNTLKDFWRMVWEKNVYAIIMLTKCVEQGRTKCEEYWPSKQAQDYGDITVAMTSEIVLPEWTIRDFTVKNIQTSESHPLRQFHFTSWPDHGVPDTTDLLINFRYLVRDYMKQSPPESPILVHCSAGVGRTGTFIAIDRLIYQIENENTVDVYGIVYDLRMHRPLMVQTEDQYVFLNQCVLDIVRSQKDSKVDLIYQNTTAMTIYENLAPVTTFGKTNGYIA

SEQ ID NO: 11143 - protein, 1342 aa, Homo sapiens
MKPAAREARLPPRSPGLRWALPLLLLLLRLGQILCAGGTPSPIPDPSVATVATGENGITQISSTAESFHKQNGTGTPQVETNTSEDGESSGANDSLRTPEQGSNGTDGASQKTPSSTGPSPVFDIKAVSISPTNVILTWKSNDTAASEYKYVVKHKMENEKTITVVHQPWCNITGLRPATSYVFSITPGIGNETWGDPRVIKVITEPIPVSDLRVALTGVRKAALSWSNGNGTASCRVLLESIGSHEELTQDSRLQVNISGLKPGVQYNINPYLLQSNKTKGDPLGTEGGLDASNTERSRAGSPTAPVHDESLVGPVDPSSGQQSRDTEVLLVGLEPGTRYNATVYSQAANGTEGQPQAIEFRTNAIQVFDVTAVNISATSLTLIWKVSDNESSSNYTYKIHVAGETDSSNLNVSEPRAVIPGLRSSTFYNITVCPVLGDIEGTPGFLQVHTPPVPVSDFRVTVVSTTEIGLAWSSHDAESFQMHITQEGAGNSRVEITTNQSIIIGGLFPGTKYCFEIVPKGPNGTEGASRTVCNRTVPSAVFDIHVVYVTTTEMWLDWKSPDGASEYVYHLVIESKHGSNHTSTYDKAITLQGLIPGTLYNITISPEVDHVWGDPNSTAQYTRPSNVSNIDVSTNTTAATLSWQNFDDASPTYSYCLLIEKAGNSSNATQVVTDIGITDATVTELIPGSSYTVEIFAQVGDGIKSLEPGRKSFCTDPASMASFDCEVVPKEPALVLKWTCPPGANAGFELEVSSGAWNNATHLESCSSENGTEYRTEVTYLNFSTSYNISITTVSCGKMAAPTRNTCTTGITDPPPPDGSPNITSVSHNSVKVKFSGFEASHGPIKAYAVILTTGEAGHPSADVLKYTYEDFKKGASDTYVTYLIRTEEKGRSQSLSEVLKYEIDVGNESTTLGYYNGKLEPLGSYRCLLRACVAGFTNITFHPQNKGLIDGAESYVSFSRYSDAVSLPQDPGVICGAVFGCIFGALVIVTVGGFIFWRKKRKDAKNNEVSFSQIKSLKRSKLIRVENFEAYFKKQQADSNCGFAEEYEDLKLVGISQPKYAAELAENRGKNRYNNVLPYDISRVKLSVQTHSTDDYINANYMPGYHSKKDFIATQGPLPNTLKDFWRMVWEKNVYAIIMLTKCVEQGRTKCEEYWPSKQAQDYGDITVAMTSEIVLPEWTIRDFTVKNIQTSESHPLRQFHFTSWPDHGVPDTTDLLINFRYLVRDYMKQSPPESPILVHCSAGVGRTGTFIAIDRLIYQIENENTVDVYGIVYDLRMHRPLMVQTEDQYVFLNQCVLDIVRSQKDSKVDLIYQNTTAMTIYENLAPVTTFGKTNGYIA

SEQ ID NO: 11144 - protein, 1338 aa, Homo sapiens [sequence omitted]

SEQ ID NO: 11145 - protein, 1216 aa, Homo sapiens
MGHLPTGIHGARRLLPLLWLFVLFKNATAFHVTVQDDNNIVVSLEASDVISPASVYVVKITGESKNYFFEFEEFNSTLPPPVIFKASYHGLYYIITLVVVNGNVVTKPSRSITVLTKPLPVTSVSIYDYKPSPETGVLFEIHYPEKYNVFTRVNISYWEGKDFRTMLYKDFFKGKTVFNHWLPGMCYSNITFQLVSEATFNKSTLVEYSGVSHEPKQHRTAPYPPQNISVRIVNLNKNNWEEQSGNFPEESFMRSQDTIGKEKLFHFTEETPEIPSGNISSGWPDFNSSDYETTSQPYWWDSASAAPESEDEFVSVLPMEYENNSTLSETEKSTSGSFSFFPVQMILTWLPPKPPTAFDGFHIHIEREENFTEYLMVDEEAHEFVAELKEPGKYKLSVTTFSSSGSCETRKSQSAKSLSFYISPSGEWIEELTEKPQHVSVHVLSSTTALMSWTSSQENYNSTIVSVVSLTCQKQKESQRLEKQYCTQVNSSKPIIENLVPGAQYQVVIYLRKGPLIGPPSDPVTFAIVPTGIKDLMLYPLGPTAVVLSWTRPYLGVFRKYVVEMFYFNPATMTSEWTTYYEIAATVSLTASVRIANLLPAWYYNFRVTMVTWGDPELSCCDSSTISFITAPVAPEITSVEYFNSLLYISWTYGDDTTDLSHSRMLHWMVVAEGKKKIKKSVTRNVMTAILSLPPGDIYNLSVTACTERGSNTSMLRLVKLEPAPPKSLFAVNKTQTSVTLLWVEEGVADFFEVFCQQVGSSQKTKLQEPVAVSSHVVTISSLLPATAYNCSVTSFSHDSPSVPTFIAVSTMVTEMNPNVVVISVLAILSTLLIGLLLVTLIILRKKHLQMARECGAGTFVNFASLERDGKLPYNWRRSIFAFLTLLPSCLWTDYLLAFYINPWSKNGLKKRKLTNPVQLDDFDAYIKDMAKDSDYKFSLQFEELKLIGLDIPHFAADLPLNRCKNRYTNILPYDFSRVRLVSMNEEEGADYINANYIPGYNSPQEYIATQGPLPETRNDFWKMVLQQKSQIIVMLTQCNEKRRVKCDHYWPFTEEPIAYGDITVEMISEEEQDDWACRHFRINYADEMQDVMHFNYTAWPDHGVPTANAAESILQFVHMVRQQATKSKGPMIIHCSAGVGRTGTFIALDRLLQHIRDHEFVDILGLVSEMRSYRMSMVQTEEQYIFIHQCVQLMWMKKKQQFCISDVIYENVSKS

SEQ ID NO: 11146 - protein, 1188 aa, Homo sapiens
MGHLPTGIHGARRLLPLLWLFVLFKNATAFHVTVQDDNNIVVSLEASDVISPASVYVVKITGESKNYFFEFEEFNSTLPPPVIFKASYHGLYYIITLVVVNGNVVTKPSRSITVLTKPLPVTSVSIYDYKPSPETGVLFEIHYPEKYNVFTRVNISYWEGKDFRTMLYKDFFKGKTVFNHWLPGMCYSNITFQLVSEATFNKSTLVEYSGVSHEPKQHRTAPYPPQNISVRIVNLNKNNWEEQSGNFPEESFMRSQDTIGKEKLFHFTEETPEIPSGNISSGWPDFNSSDYETTSQPYWWDSASAAPESEDEFVSVLPMEYENNSTLSETEKSTSGSFSFFPVQMILTWLPPKPPTAFDGFHIHIEREENFTEYLMVDEEAHEFVAELKEPGKYKLSVTTFSSSGSCETRKSQSAKSLSFYISPSGEWIEELTEKPQHVSVHVLSSTTALMSWTSSQENYNSTIVSVVSLTCQKQKESQRLEKQYCTQVNSSKPIIENLVPGAQYQVVIYLRKGPLIGPPSDPVTFAIVPTGIKDLMLYPLGPTAVVLSWTRPYLGVFRKYVVEMFYFNPATMTSEWTTYYEIAATVSLTASVRIANLLPAWYYNFRVTMVTWGDPELSCCDSSTISFITAPVAPEITSVEYFNSLLYISWTYGDDTTDLSHSRMLHWMVVAEGKKKIKKSVTRNVMTAILSLPPGDIYNLSVTACTERGSNTSMLRLVKLEPAPPKSLFAVNKTQTSVTLLWVEEGVADFFEVFCQQVGSSQKTKLQEPVAVSSHVVTISSLLPATAYNCSVTSFSHDSPSVPTFIAVSTMVTEMNPNVVVISVLAILSTLLIGLLLVTLIILRKKHLQMARECGAGTFVNFASLERDGKLPYNWSKNGLKKRKLTNPVQLDDFDAYIKDMAKDSDYKFSLQFEELKLIGLDIPHFAADLPLNRCKNRYTNILPYDFSRVRLVSMNEEEGADYINANYIPGYNSPQEYIATQGPLPETRNDFWKMVLQQKSQIIVMLTQCNEKRRVKCDHYWPFTEEPIAYGDITVEMISEEEQDDWACRHFRINYADEMQDVMHFNYTAWPDHGVPTANAAESILQFVHMVRQQATKSKGPMIIHCSAGVGRTGTFIALDRLLQHIRDHEFVDILGLVSEMRSYRMSMVQTEEQYIFIHQCVQLMWMKKKQQFCISDVIYENVSKS

SEQ ID NO: 11147 - protein, 597 aa, Homo sapiens
MGHLPTGIHGARRLLPLLWLFVLFKNATAFHVTVQDDNNIVVSLEASDVISPASVYVVKITGESKNYFFEFEEFNSTLPPPVIFKASYHGLYYIITLVVVNGNVVTKPSRSITVLTKPLPVTSVSIYDYKPSPETGVLFEIHYPEKYNVFTRVNISYWEGKDFRTMLYKDFFKGKTVFNHWLPGMCYSNITFQLVSEATFNKSTLVEYSGVSHEPKQHRTAPYPPQNISVRIVNLNKNNWEEQSGNFPEESFMRSQDTIGKEKLFHFTEETPEIPSGNISSGWPDFNSSDYETTSQPYWWDSASAAPESEDEFVSVLPMEYENNSTLSETEKSTSGSFSFFPVQMILTWLPPKPPTAFDGFHIHIEREENFTEYLMVDEEAHEFVAELKEPGKYKLSVTTFSSSGSCETRKSQSAKSLSFYISPSGEWIEELTEKPQHVSVHVLSSTTALMSWTSSQENYNSTIVSVVSLTCQKQKESQRLEKQYCTQVNSSKPIIENLVPGAQYQVVIYLRKGPLIGPPSDPVTFAIVPTGIKDLMLYPLGPTAVVLSWTRPYLGVFRKYVVEMFYFNPATMTSEWTTYYEIAATVSLTASVVIFP

SEQ ID NO: 11148 - protein, 405 aa, Homo sapiens
MVTEMNPNVVVISVLAILSTLLIGLLLVTLIILRKKHLQMARECGAGTFVNFASLERDGKLPYNWRRSIFAFLTLLPSCLWTDYLLAFYINPWSKNGLKKRKLTNPVQLDDFDAYIKDMAKDSDYKFSLQFEELKLIGLDIPHFAADLPLNRCKNRYTNILPYDFSRVRLVSMNEEEGADYINANYIPGYNSPQEYIATQGPLPETRNDFWKMVLQQKSQIIVMLTQCNEKRRVKCDHYWPFTEEPIAYGDITVEMISEEEQDDWACRHFRINYADEMQDVMHFNYTAWPDHGVPTANAAESILQFVHMVRQQATKSKGPMIIHCSAGVGRTGTFIALDRLLQHIRDHEFVDILGLVSEMRSYRMSMVQTEEQYIFIHQCVQLMWMKKKQQFCISDVIYENVSKS

SEQ ID NO: 11149 - protein, 405 aa, Homo sapiens; identical to SEQ ID NO: 11148

SEQ ID NO: 11150 - protein, 377 aa, Homo sapiens
MVTEMNPNVVVISVLAILSTLLIGLLLVTLIILRKKHLQMARECGAGTFVNFASLERDGKLPYNWSKNGLKKRKLTNPVQLDDFDAYIKDMAKDSDYKFSLQFEELKLIGLDIPHFAADLPLNRCKNRYTNILPYDFSRVRLVSMNEEEGADYINANYIPGYNSPQEYIATQGPLPETRNDFWKMVLQQKSQIIVMLTQCNEKRRVKCDHYWPFTEEPIAYGDITVEMISEEEQDDWACRHFRINYADEMQDVMHFNYTAWPDHGVPTANAAESILQFVHMVRQQATKSKGPMIIHCSAGVGRTGTFIALDRLLQHIRDHEFVDILGLVSEMRSYRMSMVQTEEQYIFIHQCVQLMWMKKKQQFCISDVIYENVSKS

SEQ ID NO: 11151 - protein, 377 aa, Homo sapiens; identical to SEQ ID NO: 11150

SEQ ID NO: 11152 - protein, 116 aa, Homo sapiens
WKMVLQQKSQIIVMLTQCNEKRRVKCDHYWPFTEEPIAYGDITVEMISEEEQDDWACRHFRINYADEMQDVMHFNYTAWPDHGVPTANAAESILQFVHMVRQQATKSKGPMIIHCR

SEQ ID NO: 11153 - protein, 88 aa, Homo sapiens
  SITE 1: note = misc_feature - Xaa can be any naturally occurring amino acid
XVTLLWVEEGVADFFEVFCQQVGSSQKTKLQEPVAVSSHVVTISSLLPATAYNCSVTSFSHDSPSVPTFIAVSTMGSVELVHLSILHP

SEQ ID NO: 11154 - protein, 79 aa, Homo sapiens
MAPTWGPGMVSVVGPMGLLVVLLVGGCAAEEPPRFIKEPKDQIGVSGGVASFVCQATGDPKPRVTWNKKGKKVNSQRFE

SEQ ID NO: 11155 - protein, 91 aa, Homo sapiens
MAPTWGPGMVSVVGPMGLLVVLLVGGCAAEEPPRFIKEPKDQIGVSGGVASFVCQATGDPKPRVTWNKKGKKVNSQRFETIEFDESAGAVL

SEQ ID NO: 11156 - protein, 1948 aa, Homo sapiens
MAPTWGPGMVSVVGPMGLLVVLLVGGCAAEEPPRFIKEPKDQIGVSGGVASFVCQATGDPKPRVTWNKKGKKVNSQRFETIEFDESAGAVLRIQPLRTPRDENVYECVAQNSVGEITVHAKLTVLREDQLPSGFPNIDMGPQLKVVERTRTATMLCAASGNPDPEITWFKDFLPVDPSASNGRIKQLRSETFESTPIRGALQIESSEETDQGKYECVATNSAGVRYSSPANLYVRELREVRRVAPRFSILPMSHEIMPGGNVNITCVAVGSPMPYVKWMQGAEDLTPEDDMPVGRNVLELTDVKDSANYTCVAMSSLGVIEAVAQITVKSLPKAPGTPMVTENTATSITITWDSGNPDPVSYYVIEYKSKSQDGPYQIKEDITTTRYSIGGLSPNSEYEIWVSAVNSIGQGPPSESVVTRTGEQAPASAPRNVQARMLSATTMIVQWEEPVEPNGLIRGYRVYYTMEPEHPVGNWQKHNVDDSLLTTVGSLLEDETYTVRVLAFTSVGDGPLSDPIQVKTQQGVPGQPMNLRAEARSETSITLSWSPPRQESIIKYELLFREGDHGREVGRTFDPTTSYVVEDLKPNTEYAFRLAARSPQGLGAFTPVVRQRTLQSKPSAPPQDVKCVSVRSTAILVSWRPPPPETHNGALVGYSVRYRPLGSEDPEPKEVNGIPPTTTQILLEALEKWTQYRITTVAHTEVGPGPESSPVVVRTDEDVPSAPPRKVEAEALNATAIRVLWRSPAPGRQHGQIRGYQVHYVRMEGAEARGPPRIKDVMLADAQWETDDTAEYEMVITNLQPETAYSITVAAYTMKGDGARSKPKVVVTKGAVLGRPTLSVQQTPEGSLLARWEPPAGTAEDQVLGYRLQFGREDSTPLATLEFPPSEDRYTASGVHKGATYVFRLAARSRGGLGEEAAEVLSIPEDTPRGHPQILEAAGNASAGTVLLRWLPPVPAERNGAIVKYTVAVREAGALGPARETELPAAAEPGAENALTLQGLKPDTAYDLQVRAHTRRGPGPFSPPVRYRTFLRDQVSPKNFKVKMIMKTSVLLSWEFPDNYNSPTPYKIQYNGLTLDVDGRTTKKLITHLKPHTFYNFVLTNRGSSLGGLQQTVTAWTAFNLLNGKPSVAPKPDADGFIMVYLPDGQSPVPVQSYFIVMVPLRKSRGGQFLTPLGSPEDMDLEELIQDISRLQRRSLRHSRQLEVPRPYIAARFSVLPPTFHPGDQKQYGGFDNRGLEPGHRYVLFVLAVLQKSEPTFAASPFSDPFQLDNPDPQPIVDGEEGLIWVIGPVLAVVFIICIVIAILLYKNKPDSKRKDSEPRTKCLLNNADLAPHHPKDPVEMRRINFQTPDSGLRSPLREPGFHFESMLSHPPIPIADMAEHTERLKANDSLKLSQEYESIDPGQQFTWEHSNLEVNKPKNRYANVIAYDHSRVILQPIEGIMGSDYINANYVDGYRCQNAYIATQGPLPETFGDFWRMVWEQRSATIVMMTRLEEKSRIKCDQYWPNRGTETYGFIQVTLLDTIELATFCVRTFSLHKNGSSEKREVRQFQFTAWPDHGVPEYPTPFLAFLRRVKTCNPPDAGPIVVHCSAGVGRTGCFIVIDAMLERIKPEKTVDVYGHVTLMRSQRNYMVQTEDQYSFIHEALLEAVGCGNTEVPARSLYAYIQKLAQVEPGEHVTGMELEFKRLANSKAHTSRFISANLPCNKFKNRLVNIMPYESTRVCLQPIRGVEGSDYINASFIDGYRQQKAYIATQGPLAETTEDFWRMLWENNSTIVVMLTKLREMGREKCHQYWPAERSARYQYFVVDPMAEYNMPQYILREFKVTDARDGQSRTVRQFQFTDWPEQGVPKSGEGFIDFIGQVHKTKEQFGQDGPISVHCSAGVGRTGVFITLSIVLERMRYEGVVDIFQTVKMLRTQRPAMVQTEDEYQFCYQAALEYLGSFDHYAT

SEQ ID NO: 11157 - protein, 1505 aa, Homo sapiens
MAPTWGPGMVSVVGPMGLLVVLLVGGCAAEEPPRFIKEPKDQIGVSGGVASFVCQATGDPKPRVTWNKKGKKVNSQRFETIEFDESAGAVLRIQPLRTPRDENVYECVAQNSVGEITVHAKLTVLREDQLPSGFPNIDMGPQLKVVERTRTATMLCAASGNPDPEITWFKDFLPVDPSASNGRIKQLRSGALQIESSEETDQGKYECVATNSAGVRYSSPANLYVRELREVRRVAPRFSILPMSHEIMPGGNVNITCVAVGSPMPYVKWMQGAEDLTPEDDMPVGRNVLELTDVKDSANYTCVAMSSLGVIEAVAQITVKSLPKAPGTPMVTENTATSITITWDSGNPDPVSYYVIEYKSKSQDGPYQIKEDITTTRYSIGGLSPNSEYEIWVSAVNSIGQGPPSESVVTRTGEQAPASAPRNVQARMLSATTMIVQWEEPVEPNGLIRGYRVYYTMEPEHPVGNWQKHNVDDSLLTTVGSLLEDETYTVRVLAFTSVGDGPLSDPIQVKTQQGVPGQPMNLRAEARSETSITLSWSPPRQESIIKYELLFREGDHGREVGRTFDPTTSYVVEDLKPNTEYAFRLAARSPQGLGAFTPVVRQRTLQSISPKNFKVKMIMKTSVLLSWEFPDNYNSPTPYKIQYNGLTLDVDGRTTKKLITHLKPHTFYNFVLTNRGSSLGGLQQTVTAWTAFNLLNGKPSVAPKPDADGFIMVYLPDGQSPVPVQSYFIVMVPLRKSRGGQFLTPLGSPEDMDLEELIQDISRLQRRSLRHSRQLEVPRPYIAARFSVLPPTFHPGDQKQYGGFDNRGLEPGHRYVLFVLAVLQKSEPTFAASPFSDPFQLDNPDPQPIVDGEEGLIWVIGPVLAVVFIICIVIAILLYKNKPDSKRKDSEPRTKCLLNNADLAPHHPKDPVEMRRINFQTPGMLSHPPIPIADMAEHTERLKANDSLKLSQEYESIDPGQQFTWEHSNLEVNKPKNRYANVIAYDHSRVILQPIEGIMGSDYINANYVDGYRCQNAYIATQGPLPETFGDFWRMVWEQRSATIVMMTRLEEKSRIKCDQYWPNRGTETYGFIQVTLLDTIELATFCVRTFSLHKNGSSEKREVRQFQFTAWPDHGVPEYPTPFLAFLRRVKTCNPPDAGPIVVHCSAGVGRTGCFIVIDAMLERIKPEKTVDVYGHVTLMRSQRNYMVQTEDQYSFIHEALLEAVGCGNTEVPARSLYAYIQKLAQVEPGEHVTGMELEFKRLANSKAHTSRFISANLPCNKFKNRLVNIMPYESTRVCLQPIRGVEGSDYINASFIDGYRQQKAYIATQGPLAETTEDFWRMLWENNSTIVVMLTKLREMGREKCHQYWPAERSARYQYFVVDPMAEYNMPQYILREFKVTDARDGQSRTVRQFQFTDWPEQGVPKSGEGFIDFIGQVHKTKEQFGQDGPISVHCSAGVGRTGVFITLSIVLERMRYEGVVDIFQTVKMLRTQRPAMVQTEDEYQFCYQAALEYLGSFDHYAT

SEQ ID NO: 11158 - protein, 1501 aa, Homo sapiens
MAPTWGPGMVSVVGPMGLLVVLLVGGCAAEEPPRFIKEPKDQIGVSGGVASFVCQATGDPKPRVTWNKKGKKVNSQRFETIEFDESAGAVLRIQPLRTPRDENVYECVAQNSVGEITVHAKLTVLREDQLPSGFPNIDMGPQLKVVERTRTATMLCAASGNPDPEITWFKDFLPVDPSASNGRIKQLRSGALQIESSEETDQGKYECVATNSAGVRYSSPANLYVRVRRVAPRFSILPMSHEIMPGGNVNITCVAVGSPMPYVKWMQGAEDLTPEDDMPVGRNVLELTDVKDSANYTCVAMSSLGVIEAVAQITVKSLPKAPGTPMVTENTATSITITWDSGNPDPVSYYVIEYKSKSQDGPYQIKEDITTTRYSIGGLSPNSEYEIWVSAVNSIGQGPPSESVVTRTGEQAPASAPRNVQARMLSATTMIVQWEEPVEPNGLIRGYRVYYTMEPEHPVGNWQKHNVDDSLLTTVGSLLEDETYTVRVLAFTSVGDGPLSDPIQVKTQQGVPGQPMNLRAEARSETSITLSWSPPRQESIIKYELLFREGDHGREVGRTFDPTTSYVVEDLKPNTEYAFRLAARSPQGLGAFTPVVRQRTLQSISPKNFKVKMIMKTSVLLSWEFPDNYNSPTPYKIQYNGLTLDVDGRTTKKLITHLKPHTFYNFVLTNRGSSLGGLQQTVTAWTAFNLLNGKPSVAPKPDADGFIMVYLPDGQSPVPVQSYFIVMVPLRKSRGGQFLTPLGSPEDMDLEELIQDISRLQRRSLRHSRQLEVPRPYIAARFSVLPPTFHPGDQKQYGGFDNRGLEPGHRYVLFVLAVLQKSEPTFAASPFSDPFQLDNPDPQPIVDGEEGLIWVIGPVLAVVFIICIVIAILLYKKKPHSKRKDSEPRTKCLLNNADLAPHHPKDPVEMRRINFQTPGMLSHPPIPIADMAEHTERLKANDSLKLSQEYESIDPGQQFTWEHSNLEVNKPKNRYANVIAYDHSRVILQPIEGIMGSDYINANYVDGYRCQNAYIATQGPLPETFGDFWRMVWEQRSATIVMMTRLEEKSRIKCDQYWPNRGTETYGFIQVTLLDTIELATFCVRTFSLHKNGSSEKREVRQFQFTAWPDHGVPEYPTPFLAFLRRVKTCNPPDAGPIVVHCSAGVGRTGCFIVIDAMLERIKPEKTVDVYGHVTLMRSQRNYMVQTEDQYSFIHEALLEAVGCGNTEVPARSLYAYIQKLAQVEPGEHVTGMELEFKRLANSKAHTSRFISANLPCNKFKNRLVNIMPYESTRVCLQPIRGVEGSDYINASFIDGYRQQKAYIATQGPLAETTEDFWRMLWENNSTIVVMLTKLREMGREKCHQYWPAERSARYQYFVVDPMAEYNMPQYILREFKVTDARDGQSRTVRQFQFTDWPEQGVPKSGEGFIDFIGQVHKTKEQFGQDGPISVHCSAGVGRTGVFITLSIVLERMRYEGVVDIFQTVKMLRTQRPAMVQTEDEYQFCYQAALEYLGSFDHYAT

SEQ ID NO: 11159 - protein, 1501 aa, Homo sapiens
MAPTWGPGMVSVVGPMGLLVVLLVGGCAAEEPPRFIKEPKDQIGVSGGVASFVCQATGDPKPRVTWNKKGKKVNSQRFETIEFDESAGAVLRIQPLRTPRDENVYECVAQNSVGEITVHAKLTVLREDQLPSGFPNIDMGPQLKVVERTRTATMLCAASGNPDPEITWFKDFLPVDPSASNGRIKQLRSGALQIESSEETDQGKYECVATNSAGVRYSSPANLYVRVRRVAPRFSILPMSHEIMPGGNVNITCVAVGSPMPYVKWMQGAEDLTPEDDMPVGRNVLELTDVKDSANYTCVAMSSLGVIEAVAQITVKSLPKAPGTPMVTENTATSITITWDSGNPDPVSYYVIEYKSKSQDGPYQIKEDITTTRYSIGGLSPNSEYEIWVSAVNSIGQGPPSESVVTRTGEQAPASAPRNVQARMLSATTMIVQWEEPVEPNGLIRGYRVYYTMEPEHPVGNWQKHNVDDSLLTTVGSLLEDETYTVRVLAFTSVGDGPLSDPIQVKTQQGVPGQPMNLRAEARSETSITLSWSPPRQESIIKYELLFREGDHGREVGRTFDPTTSYVVEDLKPNTEYAFRLAARSPQGLGAFTPVVRQRTLQSISPKNFKVKMIMKTSVLLSWEFPDNYNSPTPYKIQYNGLTLDVDGRTTKKLITHLKPHTFYNFVLTNRGSSLGGLQQTVTAWTAFNLLNGKPSVAPKPDADGFIMVYLPDGQSPVPVQSYFIVMVPLRKSRGGQFLTPLGSPEDMDLEELIQDISRLQRRSLRHSRQLEVPRPYIAARFSVLPPTFHPGDQKQYGGFDNRGLEPGHRYVLFVLAVLQKSEPTFAASPFSDPFQLDNPDPQPIVDGEEGLIWVIGPVLAVVFIICIVIAILLYKNKPDSKRKDSEPRTKCLLNNADLAPHHPKDPVEMRRINFQTPGMLSHPPIPIADMAEHTERLKANDSLKLSQEYESIDPGQQFTWEHSNLEVNKPKNRYANVIAYDHSRVILQPIEGIMGSDYINANYVDGYRCQNAYIATQGPLPETFGDFWRMVWEQRSATIVMMTRLEEKSRIKCDQYWPNRGTETYGFIQVTLLDTIELATFCVRTFSLHKNGSSEKREVRQFQFTAWPDHGVPEYPTPFLAFLRRVKTCNPPDAGPIVVHCSAGVGRTGCFIVIDAMLERIKPEKTVDVYGHVTLMRSQRNYMVQTEDQYSFIHEALLEAVGCGNTEVPARSLYAYIQKLAQVEPGEHVTGMELEFKRLANSKAHTSRFISANLPCNKFKNRLVNIMPYESTRVCLQPIRGVEGSDYINASFIDGYRQQKAYIATQGPLAETTEDFWRMLWENNSTIVVMLTKLREMGREKCHQYWPAERSARYQYFVVDPMAEYNMPQYILREFKVTDARDGQSRTVRQFQFTDWPEQGVPKSGEGFIDFIGQVHKTKEQFGQDGPISVHCSAGVGRTGVFITLSIVLERMRYEGVVDIFQTVKMLRTQRPAMVQTEDEYQFCYQAALEYLGSFDHYAT

SEQ ID NO: 11160 - protein, 1910 aa, Homo sapiens
MAPTWGPGMVSVVGPMGLLVVLLVGGCAAEEPPRFIKEPKDQIGVSGGVASFVCQATGDPKPRVTWNKKGKKVNSQRFETIEFDESAGAVLRIQPLRTPRDENVYECVAQNSVGEITVHAKLTVLREDQLPSGFPNIDMGPQLKVVERTRTATMLCAASGNPDPEITWFKDFLPVDPSASNGRIKQLRSGALQIESSEETDQGKYECVATNSAGVRYSSPANLYVRVRRVAPRFSILPMSHEIMPGGNVNITCVAVGSPMPYVKWMQGAEDLTPEDDMPVGRNVLELTDVKDSANYTCVAMSSLGVIEAVAQITVKSLPKAPGTPMVTENTATSITITWDSGNPDPVSYYVIEYKSKSQDGPYQIKEDITTTRYSIGGLSPNSEYEIWVSAVNSIGQGPPSESVVTRTGEQAPASAPRNVQARMLSATTMIVQWEEPVEPNGLIRGYRVYYTMEPEHPVGNWQKHNVDDSLLTTVGSLLEDETYTVRVLAFTSVGDGPLSDPIQVKTQQGVPGQPMNLRAEARSETSITLSWSPPRQESIIKYELLFREGDHGREVGRTFDPTTSYVVEDLKPNTEYAFRLAARSPQGLGAFTPVVRQRTLQSKPSAPPQDVKCVSVRSTAILVSWRPPPPETHNGALVGYSVRYRPLGSEDPEPKEVNGIPPTTTQILLEALEKWTQYRITTVAHTEVGPGPESSPVVVRTDEDVPSAPPRKVEAEALNATAIRVLWRSPAPGRQHGQIRGYQVHYVRMEGAEARGPPRIKDVMLADAQEMVITNLQPETAYSITVAAYTMKGDGARSKPKVVVTKGAVLGRPTLSVQQTPEGSLLARWEPPAGTAEDQVLGYRLQFGREDSTPLATLEFPPSEDRYTASGVHKGATYVFRLAARSRGGLGEEAAEVLSIPEDTPRGHPQILEAAGNASAGTVLLRWLPPVPAERNGAIVKYTVAVREAGALGPARETELPAAAEPGAENALTLQGLKPDTAYDLQVRAHTRRGPGPFSPPVRYRTFLRDQVSPKNFKVKMIMKTSVLLSWEFPDNYNSPTPYKIQYNGLTLDVDGRTTKKLITHLKPHTFYNFVLTNRGSSLGGLQQTVTAWTAFNLLNGKPSVAPKPDADGFIMVYLPDGQSPVPVQSYFIVMVPLRKSRGGQFLTPLGSPEDMDLEELIQDISRLQRRSLRHSRQLEVPRPYIAARFSVLPPTFHPGDQKQYGGFDNRGLEPGHRYVLFVLAVLQKSEPTFAASPFSDPFQLDNPDPQPIVDGEEGLIWVIGPVLAVVFIICIVIAILLYKNKPDSKRKDSEPRTKCLLNNADLAPHHPKDPVEMRRINFQTPGMLSHPPIPIADMAEHTERLKANDSLKLSQEYESIDPGQQFTWEHSNLEVNKPKNRYANVIAYDHSRVILQPIEGIMGSDYINANYVDGYRCQNAYIATQGPLPETFGDFWRMVWEQRSATIVMMTRLEEKSRIKCDQYWPNRGTETYGFIQVTLLDTIELATFCVRTFSLHKNGSSEKREVRQFQFTAWPDHGVPEYPTPFLAFLRRVKTCNPPDAGPIVVHCSAGVGRTGCFIVIDAMLERIKPEKTVDVYGHVTLMRSQRNYMVQTEDQYSFIHEALLEAVGCGNTEVPARSLYAYIQKLAQVEPGEHVTGMELEFKRLANSKAHTSRFISANLPCNKFKNRLVNIMPYESTRVCLQPIRGVEGSDYINASFIDGYRQQKAYIATQGPLAETTEDFWRMLWENNSTIVVMLTKLREMGREKCHQYWPAERSARYQYFVVDPMAEYNMPQYILREFKVTDARDGQSRTVRQFQFTDWPEQGVPKSGEGFIDFIGQVHKTKEQFGQDGPISVHCSAGVGRTGVFITLSIVLERMRYEGVVDIFQTVKMLRTQRPAMVQTEDEYQFCYQAALEYLGSFDHYAT

SEQ ID NO: 11161 - protein, 128 aa, Homo sapiens
MAPTWGPGMVSVVGPMGLLVVLLVGGCAAEEPPRFIKEPKDQIGVSGGVASFVCQATGDPKPRVTWNKKGKKVNSQRFETIEFDESAGAVLRIQPLRTPRDENVYECVAQNSVGEITVHAKLTVLRGP

SEQ ID NO: 11162 - protein, 142 aa, Homo sapiens
MAPGVARGPTPYWRLRLGGAALLLLLIPVAAAQEPPGAACSQNTNKTCEECLKNVSACLKKKTRMLDLKTTKALQHISPDASCEVHAPQPSPAGRPRGHCGLLTLASEPASLPGQAAGELPLKDSPLVLQTGDLLFPVHLCF

SEQ ID NO: 11163 - protein, 107 aa, Homo sapiens
MAPGVARGPTPYWRLRLGGAALLLLLIPVAAAQEPPGAACSQNTNKTCEECLKNVSCLWCNTNKACLDYPVTSVLPPASLCKLSSARWGVCWGLFKEENPYARFENN

SEQ ID NO: 11164 - protein, 180 aa, Homo sapiens
MAPGVARGPTPYWRLRLGGAALLLLLIPVAAAQEPPGAACSQNTNKTCEECLKNVSCLWCNTNKACLDYPVTSVLPPASLCKLSSARWGVCWVNFEALIITMSVVGGTLLLGIAICCCCCCRRKRSRKPDRSEEKAMREREERRIRQEERRAEMKTRHDEIRKKYGLFKEENPYARFENN

SEQ ID NO: 11165 - protein, 159 aa, Homo sapiens
MGQAVSCVLGRLQPVKCTGARRVGRRGLRKQTSQECLWCNTNKACLDYPVTSVLPPASLCKLSSARWGVCWVNFEALIITMSVVGGTLLLGIAICCCCCCRRKRSRKPDRSEEKAMREREERRIRQEERRAEMKTRHDEIRKKYGLFKEENPYARFENN

SEQ ID NO: 11166 - protein, 381 aa, Homo sapiens
MHLLAILFCALWSAVLAENSDDYDLMYVNLDNEIDNGLHPTEDPTPCACGQEHSEWDKLFIMLENSQMRERMLLQATDDVLRGELQRLREELGRLAESLARPCAPGAPAEARLTSALDELLQATRDAGRRLARMEGAEAQRPEEAGRALAAVLEELRQTRADLHAVQGWAARSWLPAGCETAILFPMRSKKIFGSVHPVRPMRLESFSACIWVKATDVLNKTILFSYGTKRNPYEIQLYLSYQSIVFVVGGEENKLVAEAMVSLGRWTHLCGTWNSEEGLTSLWVNGELAATTVEMATGHIVPEGGILQIGQEKNGCCVGGGFDETLAFSGRLTGFNIWDSVLSNEEIRETGGAESCHIRGNIVGWGVTEIQPHGGAQYVS

SEQ ID NO: 11167 - protein, 192 aa, Homo sapiens
MGCSWRKTLSFFLVFVPIYLHGASSQEAAPVGPRKPFFERLRRLEEQFRRFQEVTWTHLQNIASNYNVSYNVDVRFRSLAEESQAVAQAVNRSQASVQGELAQLKAWVRKLQRRGRKFAAWAPPSFSQTPPPGTWSSSALVSSLPCEPCPSAAGSARPPAAWAPSCPTPPRTMTTSWCCTAETPCCPDPSTS

SEQ ID NO: 11168 - protein, 478 aa, Homo sapiens
MGCSWRKTLSFFLVFVPIYLHGASSQEAAPVGPRKPFFERLRRLEEQFRRFQEVTWTHLQNIASNYNVSYNVDVRFRSLAEESQAVAQAVNRSQASVQGELAQLKAWVRKLQRRGRKVDTRLRALDLTLGERSQQRARERKAHKAQRDALQDSLARLEGLVHSQGARLAALEGRLPVAHPGTAALGPALVPTPTQPEELGPTSLKLQRDRQELRAASEHRGPPQDSSAPLQGRREPPASGSHRVLSGTAPKDPRQQAWSPQVPGEICGVGPTLVFPNASTRNVVFLSPGFVTALRALSFCSWVRTASGRLGTLLSYATEDNDNKLVLHGRDSLLPGSIHFVIGDPAFRELPLQLLLDGQWHHICVIWTSTQGRYWLHVDRRLVATGSRFREGYEIPPGGSLVLGQEQDSVGGGFDSSEAFVGSMSGLAIWDRALVPGEVANLAIGKEFPTGAILTLANAALAGGFVQGANCTCLERCP

SEQ ID NO: 11169 - protein, 473 aa, Homo sapiens
MGSGNWEVTGPPCGSRCERPPGLPRGVHGQFRSAVGLSGLRWFRRFQEVTWTHLQNIASNYNVSYNVDVRFRSLAEESQAVAQAVNRSQASVQGELAQLKAWVRKLQRRGRKVDTRLRALDLTLGERSQQRARERKAHKAQRDALQDSLARLEGLVHSQGARLAALEGRLPVAHPGTAALGPALVPTPTQPEELGPTSLKLQRDRQELRAASEHRGPPQDSSAPLQGRREPPASGSHRVLSGTAPKDPRQQAWSPQVPGEICGVGPTLVFPNASTRNVVFLSPGFVTALRALSFCSWVRTASGRLGTLLSYATEDNDNKLVLHGRDSLLPGSIHFVIGDPAFRELPLQLLLDGQWHHICVIWTSTQGRYWLHVDRRLVATGSRFREGYEIPPGGSLVLGQEQDSVGGGFDSSEAFVGSMSGLAIWDRALVPGEVANLAIGKEFPTGAILTLANAALAGGFVQGANCTCLERCP

SEQ ID NO: 11170 - protein, 44 aa, Homo sapiens
MARAMAAAWPLLLVALLVLSWPPPGTGAQHGGDACVTADLGAAW

SEQ ID NO: 11171 - protein, 364 aa, Homo sapiens
MARAMAAAWPLLLVALLVLSWPPPGTGDVVVQAPTQVPGFLGDSVTLPCYLQVPNMEVTHVSQLTWARHGESGSMAVFHQTQGPSYSESKRLEFVAARLGAELRNASLRMFGLRVEDEGNYTCLFVTFPQGSRSVDIWLRVLAKPQNTAEVQKVQLTGEPVPMARCVSTGGRPPAQITWHSDLGGMPNTSQVPGFLSGTVTVTSLWILVPSSQVDGKNVTCKVEHESFEKPQLLTVNLTVYYPPEVSISGYDNNWYLGQNEATLTCDARSNPEPTGYNWSTTMGPLPPFAVAQGAQLLIRPVDKPINTTLICNVTNALGARQAELTVQVKGTEHASASANGHVSYSAVSRENSSSQDPQTEGTR

SEQ ID NO: 11172 - protein, 372 aa, Homo sapiens
MARAMAAAWPLLLVALLVLSWPPPGTGDVVVQAPTQVPGFLGDSVTLPCYLQVPNMEVTHVSQLTWARHGESGSMAVFHQTQGPSYSESKRLEFVAARLGAELRNASLRMFGLRVEDEGNYTCLFVTFPQGSRSVDIWLRVLAKPQNTAEVQKVQLTGEPVPMARCVSTGGRPPAQITWHSDLGGMPNTSQVPGFLSGTVTVTSLWILVPSSQVDGKNVTCKVEHESFEKPQLLTVNLTVYYPPEVSISGYDNNWYLGQNEATLTCDARSNPEPTGYNWSTTMGPLPPFAVAQGAQLLIRPVDKPINTTLICNVTNALGARQAELTVQVKEGPPSEHSGTEHASASANGHVSYSAVSRENSSSQDPQTEGTR

SEQ ID NO: 11173 - protein, 392 aa, Homo sapiens
MARAMAAAWPLLLVALLVLSWPPPGTGDVVVQAPTQVPGFLGDSVTLPCYLQVPNMEVTHVSQLTWARHGESGSMAVFHQTQGPSYSESKRLEFVAARLGAELRNASLRMFGLRVEDEGNYTCLFVTFPQGSRSVDIWLRVLAKPQNTAEVQKVQLTGEPVPMARCVSTGGRPPAQITWHSDLGGMPNTSQVPGFLSGTVTVTSLWILVPSSQVDGKNVTCKVEHESFEKPQLLTVNLTVYYPPEVSISGYDNNWYLGQNEATLTCDARSNPEPTGYNWSTTMGPLPPFAVAQGAQLLIRPVDKPINTTLICNVTNALGARQAELTVQVKEGPPSEHSGMSRNAIIFLVLGILVFLILLGIGIYFYWSKCSREVLWHCHLCPSSEHHQSCRN

SEQ ID NO: 11174 - protein, 417 aa, Homo sapiens
MARAMAAAWPLLLVALLVLSWPPPGTGDVVVQAPTQVPGFLGDSVTLPCYLQVPNMEVTHVSQLTWARHGESGSMAVFHQTQGPSYSESKRLEFVAARLGAELRNASLRMFGLRVEDEGNYTCLFVTFPQGSRSVDIWLRVLAKPQNTAEVQKVQLTGEPVPMARCVSTGGRPPAQITWHSDLGGMPNTSQVPGFLSGTVTVTSLWILVPSSQVDGKNVTCKVEHESFEKPQLLTVNLTVYYPPEVSISGYDNNWYLGQNEATLTCDARSNPEPTGYNWSTTMGPLPPFAVAQGAQLLIRPVDKPINTTLICNVTNALGARQAELTVQVKEGPPSEHSGMSRNAIIFLVLGILVFLILLGIGIYFYWSKCSREVLWHCHLCPSSTEHASASANGHVSYSAVSRENSSSQDPQTEGTR

SEQ ID NO: 11175 - protein, 70 aa, Homo sapiens
  SITE 1: note = misc_feature - Xaa can be any naturally occurring amino acid
XCKVEHESFEKPQLLTVNLTVYYPPEVSISGYDNNWYLGQNEATLTCDARSNPEPTGYNWSTYRACQRLS

SEQ ID NO: 11176 - protein, 224 aa, Homo sapiens
MAKRSRGPGRRCLLALVLFCAWGTLAVVAQKPGAGCPSRCLCFRTTVRCMHLLLEAVPAVAPQTSILDLRFNRIREIQPGAFRRLRNLNTLLLNNNQIKRIPSGAFEDLENLKYLYLHFNQIETLDPDSFQHLPKLERLFLHNNRITHLVPGTFNHLESMKRLRLDSNTLHCDCEILWLADLLKTYAESGNAQAAAICEYPRRIQGRSVATITPEELNCERPRI

SEQ ID NO: 11177 - protein, 1479 aa, Homo sapiens
MAKRSRGPGRRCLLALVLFCAWGTLAVVAQKPGAGCPSRCLCFRTTVRCMHLLLEAVPAVAPQTSILDLRFNRIREIQPGAFRRLRNLNTLLLNNNQIKRIPSGAFEDLENLKYLYLYKNEIQSIDRQAFKGLASLEQLYLHFNQIETLDPDSFQHLPKLERLFLHNNRITHLVPGTFNHLESMKRLRLDSNTLHCDCEILWLADLLKTYAESGNAQAAAICEYPRRIQGRSVATITPEELNCERPRITSEPQDADVTSGNTVYFTCRAEGNPKPEIIWLRNNNELSMKTDSRLNLLDDGTLMIQNTQETDQGIYQCMAKNVAGEVKTQEVTLRYFGSPARPTFVIQPQNTEVLVGESVTLECSATGHPPPRISWTRGDRTPLPVDPRVNITPSGGLYIQNVVQGDSGEYACSATNNIDSVHATAFIIVQALPQFTVTPQDRVVIEGQTVDFQCEAKGNPPPVIAWTKGGSQLSVDRRHLVLSSGTLRISGVALHDQGQYECQAVNIIGSQKVVAHLTVQPRVTPVFASIPSDTTVEVGANVQLPCSSQGEPEPAITWNKDGVQVTESGKFHISPEGFLTINDVGPADAGRYECVARNTIGSASVSMVLSVNVPDVSRNGDPFVATSIVEAIATVDRAINSTRTHLFDSRPRSPNDLLALFRYPRDPYTVEQARAGEIFERTLQLIQEHVQHGLMVDLNGTSYHYNDLVSPQYLNLIANLSGCTAHRRVNNCSDMCFHQKYRTHDGTCNNLQHPMWGASLTAFERLLKSVYENGFNTPRGINPHRLYNGHALPMPRLVSTTLIGTETVTPDEQFTHMLMQWGQFLDHDLDSTVVALSQARFSDGQHCSNVCSNDPPCFSVMIPPNDSRARSGARCMFFVRSSPVCGSGMTSLLMNSVYPREQINQLTSYIDASNVYGSTEHEARSIRDLASHRGLLRQGIVQRSGKPLLPFATGPPTECMRDENESPIPCFLAGDHRANEQLGLTSMHTLWFREHNRIATELLKLNPHWDGDTIYYETRKIVGAEIQHITYQHWLPKILGEVGMRTLGEYHGYDPGINAGIFNAFATAAFRFGHTLVNPLLYRLDENFQPIAQDHLPLHKAFFSPFRIVNEGGIDPLLRGLFGVAGKMRVPSQLLNTELTERLFSMAHTVALDLAAINIQRGRDHGIPPYHDYRVYCNLSAAHTFEDLKNEIKNPEIREKLKRLYGSTLNIDLFPALVVEDLVPGSRLGPTLMCLLSTQFKRLRDGDRLWYENPGVFSPAQLTQIKQTSLARILCDNADNITRVQSDVFRVAEFPHGYGSCDEIPRVDLRVWQDCCEDCRTRGQFNAFSYHFRGRRSLEFSYQEDKPTKKTRPRKIPSVGRQGEHLSNSTSAFSTRSDASGTNDFREFVLEMQKTITDLRTQIKKLESRLSTTECVDAGGESHANNTKWKKDACTICECKDGQVTCFVEACPPATCAVPVNIPGACCPVCLQKRAEEKP

SEQ ID NO: 11178 - protein, 197 aa, Homo sapiens
  SITE 1: note = misc_feature - Xaa can be any naturally occurring amino acid
XGSWFPSAPGLSTTVLLNNNQIKRIPSGAFEDLENLKYLYLYKNEIQSIDRQAFKGLASLEQLYLHFNQIETLDPDSFQHLPKLERLFLHNNRITHLVPGTFNHLESMKRLRLDSNTLHCDCEILWLADLLKTYAESGNAQAAAICEYPRRIQGRSVATITPEELNCERPRITSEPQDADVTSGNTVYFTCRAEGNP

SEQ ID NO: 11179 - protein, 723 aa, Homo sapiens
  SITE 1: note = misc_feature - Xaa can be any naturally occurring amino acid
XRGPGRRCLLALVLFCAWGTLAVVAQKPGAGCPSRCLCFRTTVRCMHLLLEAVPAVAPQTSILDLRFNRIREIQPGAFRRLRNLNTLLLNNNQIKRIPSGAFEDLENLKYLYLYKNEIQSIDRQAFKGLASLEQLYLHFNQIETLDPDSFQHLPKLERLFLHNNRITHLVPGTFNHLESMKRLRLDSNTLHCDCEILWLADLLKTYAESGNAQAAAICEYPRRIQGRSVATITPEELNCERPRITSEPQDADVTSGNTVYFTCRAEGNPKPEIIWLRNNNELSMKTDSRLNLLDDGTLMIQNTQETDQGIYQCMAKNVAGEVKTQEVTLRYFGSPARPTFVIQPQNTEVLVGESVTLECSATGHPPPRISWTRGDRTPLPVDPRVNITPSGGLYIQNVVQGDSGEYACSATNNIDSVHATAFIIVQALPQFTVTPQDRVVIEGQTVDFQCEAKGNPPPVIAWTKGGSQLSVDRRHLVLSSGTLRISGVALHDQGQYECQAVNIIGSQKVVAHLTVQPRVTPVFASIPSDTTVEVGANVQLPCSSQGEPEPAITWNKDGVQVTESGKFHISPEGFLTINDVGPADAGRYECVARNTIGSASVSMVLSVNVPDVSRNGDPFVATSIVEAIATVDRAINSTRTHLFDSRPRSPNDLLALFRYPRDPYTVEQARAGEIFERTLQLIQEHVQHGLMVDLNGTSQCQSLFFLLHGLSNGVEHASVKSHS

SEQ ID NO: 11180 - protein, 76 aa, Homo sapiens
  SITE 1: note = misc_feature - Xaa can be any naturally occurring amino acid
XVQSDVFRVAEFPHGYGSCDEIPRVDLRVWQDCCEDCRTRGQFNAFSYHFRGRRSLEFSYQEDKPTKKTRPRKIPR

SEQ ID NO: 11181 - protein, 1463 aa, Homo sapiens
MEPRLFCWTTLFLLAGWCLPGLPCPSRCLCFKSTVRCMHLMLDHIPQVPQQTTVLDLRFNRIREIPGSAFKKLKNLNTLLLNNNHIRKISRNAFEGLENLLYLYLYKNEIHALDKQTFKGLISLEHLYIHFNQLEMLQPETFGDLLRLERLFLHNNKLSKIPAGSFSNLDSLKRLRLDSNALVCDCDLMWLGELLQGFAQHGHTQAAATCEYPRRLHGRAVASVTVEEFNCQSPRITFEPQDVEVPSGNTVYFTCRAEGNPKPEIIWIHNNHSLDLEDDTRLNVFDDGTLMIRNTRESDQGVYQCMARNSAGEAKTQSAMLRYSSLPAKPSFVIQPQDTEVLIGTSTTLECMATGHPHPLITWTRDNGLELDGSRHVATSSGLYLQNITQRDHGRFTCHANNSHGTVQAAANIIVQAPPQFTVTPKDQVVLEEHAVEWLCEADGNPPPVIVWTKTGGQLPVEGQHTVLSSGTLRIDRAAQHDQGQYECQAVSSLGVKKVSVQLTVKPKALAVFTQLPQDTSVEVGKNINISCHAQGEPQPIITWNKEGVQITESGKFHVDDEGTLTIYDAGFPDQGRYECVARNSFGLAVTNMFLTVTAIQGRQAGDDFVESSILDAVQRVDSAINSTRRHLFSQKPHTSSDLLAQFHYPRDPLIVEMARAGEIFEHTLQLIRERVKQGLTVDLEGKEFRYNDLVSPRSLSLIANLSGCTARRPLPNCSNRCFHAKYRAHDGTCNNLQQPTWGAALTAFARLLQPAYRDGIRAPRGLGLPVGSRQPLPPPRLVATVWARAAAVTPDHSYTRMLMHWGWFLEHDLDHTVPALSTARFSDGRPCSSVCTNDPPCFPMNTRHADPRGTHAPCMLFARSSPACASGRPSATVDSVYAREQINQQTAYIDGSNVYGSSERESQALRDPSVPRGLLKTGFPWPPSGKPLLPFSTGPPTECARQEQESPCFLAGDHRANEHLALAAMHTLWFREHNRMATELSALNPHWEGNTVYQEARKIVGAELQHITYSHWLPKVLGDPGTRMLRGYRGYNPNVNAGIINSFATAAFRFGHTLINPILYRLNATLGEISEGHLPFHKALFSPSRIIKEGGIDPVLRGLFGVAAKWRAPSYLLSPELTQRLFSAAYSAAVDSAATIIQRGRDHGIPPYVDFRVFCNLTSVKNFEDLQNEIKDSEIRQKLRKLYGSPGDIDLWPALMVEDLIPGTRVGPTLMCLFVTQFQRLRDGDRFWYENPGVFTPAQLTQLKQASLSRVLCDNGDSIQQVQADVFVKAEYPQDYLNCSEIPKVDLRVWQDCCADCRSRGQFRAVTQESQKKRSAQYSYPVDKDMELSHLRSRQQDKIYVGEDARNVTVLAKTKFSQDFSTFAAEIQETITALREQINKLEARLRQAGCTDVRGVPRKAEERWMKEDCTHCICESGQVTCVVEICPPAPCPSPELVKGTCCPVCRDRGMPSDSPEKR

SEQ ID NO: 11182 - protein, 582 aa, Homo sapiens
NNLQQPTWGAALTAFARLLQPAYRDGIRAPRGLGLPVGSRQPLPPPRLVATVWARAAAVTPDHSYTRMLMHWGWFLEHDLDHTVPALSTARFSDGRPCSSVCTNDPPCFPMNTRHADPRGTHAPCMLFARSSPACASGRPSATVDSVYAREQINQQTAYIDGSNVYGSSERESQALRDPSVPRGLLKTGFPWPPSGKPLLPFSTGPPTECARQEQESPCFLAGDHRANEHLALAAMHTLWFREHNRMATELSALNPHWEGNTVYQEARKIVGAELQHITYSHWLPKVLGDPGTRMLRGYRGYNPNVNAGIINSFATAAFRFGHTLINPILYRLNATLGEISEGHLPFHKALFSPSRIIKEGGIDPVLRGLFGVAAKWRAPSYLLSPELTQRLFSAAYSAAVDSAATIIQRGRDHGIPPYVDFRVFCNLTSVKNFEDLQNEIKDSEIRQKLRKLYGSPGDIDLWPALMVEDLIPGTRVGPTLMCLFVTQFQRLRDGDRFWYENPGVFTPAQLTQLKQASLSRVLCDNGDSIQQVQADVFVKAEYPQDYLNCSEIPKVDLRVWQDCCADKQAGGTPEAGRVYRC

SEQ ID NO: 11183 - protein, 537 aa, Homo sapiens
  SITE 1: note = misc_feature - Xaa can be any naturally occurring amino acid
XAREQINQQTAYIDGSNVYGSSERESQALRDPSVPRGLLKTGFPWPPSGKPLLPFSTGPPTECARQEQESPCFLAGDHRANEHLALAAMHTLWFREHNRMATELSALNPHWEGNTVYQEARKIVGAELQHITYSHWLPKVLGDPGTRMLRGYRGYNPNVNAGIINSFATAAFRFGHTLINPILYRLNATLGEISEGHLPFHKALFSPSRIIKEGGIDPVLRGLFGVAAKWRAPSYLLSPELTQRLFSAAYSAAVDSAATIIQRGRDHGIPPYVDFRVFCNLTSVKNFEDLQNEIKDSEIRQKLRKFWYENPGVFTPAQLTQLKQASLSRVLCDNGDSIQQVQADVFVKAEYPQDYLNCSEIPKVDLRVWQDCCADCRSRGQFRAVTQESQKKRSAQYSYPVDKDMELSHLRSRQQDKIYVGEDARNVTVLAKTKFSQDFSTFAAEIQETITALREQINKLEARLRQAGCTDVRGVPRKAEERWMKEDCTHCICESGQVTCVVEICPPAPCPSPELVKGTCCPVCRDRGMPSDSPEKR

SEQ ID NO: 11184 - protein, 463 aa, Homo sapiens
MDVLTALLLVHLIPVSTPKNGMSSKSRKRIMPDPVTEPPVTDPVYEALLYCNIPSVAERSMEGHAPHHFKLVSVHVFIRHGDRYPLYVIPKTKRPEIDCTLVANRKPYHPKLEAFISHMSKGSGASFESPLNSLPLYPNHPLCEMGELTQTGVVQHLQNGQLLRDIYLKKHKLLPNDWSADQLYLETTGKSRTLQSGLALLYGFLPDFDWKKIYFRHQPSALFCSGSCYCPVRNQYLEKEQRRQYLLRLKNSQLEKTYGEMAKIVDVPTKQLRAANPIDSMLCHFCHNVSFPCTRNGCVDMEHFKVIKTHQIEDERERREKKLYFGYSLLGAHPILNQTIGRMQRATEGRKEELFALYSAHDVTLSPVLSALGLSEARFPRFAARLIFELWQDREKPSEHSVRILYNGVDVTFHTSFCQDHHKRSPKPMCPLENLVRFVKRDMFVALGGSGTNYYDACHREGF

SEQ ID NO: 11185 - protein, 26 aa, Homo sapiens
MLFRNRFLLLLALAALLAFVSLSLQF

SEQ ID NO: 11186 - protein, 26 aa, Homo sapiens
MLFRNRFLLLLALAALLAFVSLSLQF

SEQ ID NO: 11187 - protein, 95 aa, Homo sapiens
MLFRNRFLLLLALAALLAFVSLSLQFFHLIPVSTPKNGMSSKSRKRIMPDPVTEPPVTDPVYEALLYCNIPSVAERSMEGHAPHHFKLVSVHVFI

SEQ ID NO: 11188 - protein, 145 aa, Homo sapiens
MLFRNRFLLLLALAALLAFVSLSLQFFHLIPVSTPKNGMSSKSRKRIMPDPVTEPPVTDPVYEALLYCNIPSVAERSMEGHAPHHFKLVSVHVFIRHGDRYPLYVIPKTKRPEIDCTLVANRKPYHPKLEAFISHMSKGSGASFE

SEQ ID NO: 11189 - protein, 480 aa, Homo sapiens
MLFRNRFLLLLALAALLAFVSLSLQFFHLIPVSTPKNGMSSKSRKRIMPDPVTEPPVTDPVYEALLYCNIPSVAERSMEGHAPHHFKLVSVHVFIRHGDRYPLYVIPKTKRPEIDCTLVANRKPYHPKLEAFISHMSKGSGASFESPLNSLPLYPNHPLCEMGELTQTGVVQHLQNGQLLRDIYLKKHKLLPNDWSADQLYLETTGKSRTLQSGLALLYGFLPDFDWKKIYFRHQPSALFCSGSCYCPVRNQYLEKEQRRQYLLRLKNSQLEKTYGEMAKIVDVPTKQLRAANPIDSMLCHFCHNVSFPCTRNGCVDMEHFKVIKTHQIEDERERREKKLYFGYSLLGAHPILNQTIGRMQRATEGRKEELFALYSAHDVTLSPVLSALGLSEARFPRFAARLIFELWQDREKPSEHSVRILYNGVDVTFHTSFCQDHHKRSPKPMCPLENLVRFVKRDMFVALGGSGTNYYDACHREGF

SEQ ID NO: 11190 - protein, 480 aa, Homo sapiens; identical to SEQ ID NO: 11189

SEQ ID NO: 11191 - protein, 179 aa, Homo sapiens
MLFRNRFLLLLALAALLAFVSLSLQFFHLIPVSTPKNGMSSKSRKRIMPDPVTEPPVTDPVYEALLYCNIPSVAERSMEGHAPHHFKLVSVHVFIRHGDRYPLYVIPKTKRPEIDCTLVANRKPYHPKLEAFISHMSKGSGASFESPLNSLPLYPNHPLCEMGELTQTVGLAVHLRGSC

SEQ ID NO: 11192 - protein, 182 aa, Homo sapiens
MLFRNRFLLLLALAALLAFVSLSLQFFHLIPVSTPKNGMSSKSRKRIMPDPVTEPPVTDPVYEALLYCNIPSVAERSMEGHAPHHFKLVSVHVFIRHGDRYPLYVIPKTKRPEIDCTLVANRKPYHPKLEAFISHMSKGSGASFESPLNSLPLYPNHPLCEMGELTQTVRRWLSASQEERPH

SEQ ID NO: 11193 - protein, 182 aa, Homo sapiens; identical to SEQ ID NO: 11192

SEQ ID NO: 11194 - protein, 471 aa, Homo sapiens
MRYFIKSMEHSVCPSSAVHLIPVSTPKNGMSSKSRKRIMPDPVTEPPVTDPVYEALLYCNIPSVAERSMEGHAPHHFKLVSVHVFIRHGDRYPLYVIPKTKRPEIDCTLVANRKPYHPKLEAFISHMSKGSGASFESPLNSLPLYPNHPLCEMGELTQTGVVQHLQNGQLLRDIYLKKHKLLPNDWSADQLYLETTGKSRTLQSGLALLYGFLPDFDWKKIYFRHQPSALFCSGSCYCPVRNQYLEKEQRRQYLLRLKNSQLEKTYGEMAKIVDVPTKQLRAANPIDSMLCHFCHNVSFPCTRNGCVDMEHFKVIKTHQIEDERERREKKLYFGYSLLGAHPILNQTIGRMQRATEGRKEELFALYSAHDVTLSPVLSALGLSEARFPRFAARLIFELWQDREKPSEHSVRILYNGVDVTFHTSFCQDHHKRSPKPMCPLENLVRFVKRDMFVALGGSGTNYYDACHREGF

SEQ ID NO: 11195 - protein, 131 aa, Homo sapiens
MSSKSRKRIMPDPVTEPPVTDPVYEALLYCNIPSVAERSMEGHAPHHFKLVSVHVFIRHGDRYPLYVIPKTKRPEIDCTLVANRKPYHPKLEAFISHMSKGSGASFESPLNSLPLYPNHPLCEMGELTQTG

SEQ ID NO: 11196 - protein, 442 aa, Homo sapiens
MSSKSRKRIMPDPVTEPPVTDPVYEALLYCNIPSVAERSMEGHAPHHFKLVSVHVFIRHGDRYPLYVIPKTKRPEIDCTLVANRKPYHPKLEAFISHMSKGSGASFESPLNSLPLYPNHPLCEMGELTQTGVVQHLQNGQLLRDIYLKKHKLLPNDWSADQLYLETTGKSRTLQSGLALLYGFLPDFDWKKIYFRHQPSALFCSGSCYCPVRNQYLEKEQRRQYLLRLKNSQLEKTYGEMAKIVDVPTKQLRAANPIDSMLCHFCHNVSFPCTRNGCVDMEHFKVIKTHQIEDERERREKKLYFGYSLLGAHPILNQTIGRMQRATEGRKEELFALYSAHDVTLSPVLSALGLSEARFPRFAARLIFELWQDREKPSEHSVRILYNGVDVTFHTSFCQDHHKRSPKPMCPLENLVRFVKRDMFVALGGSGTNYYDACHREGF

SEQ ID NO: 11197 - protein, 90 aa, Homo sapiens
MVFVRRPWPALTTVLLALLVCLGALVDAYPIKPEAPREDASPEELNRYYASLRHYLNLVTRQRYGKRDGPDTLLSKTFFPDGEDRPVRSR

SEQ ID NO: 11198 - protein, 97 aa, Homo sapiens
MVFVRRPWPALTTVLLALLVCLGALVDAYPIKPEAPREDASPEELNRYYASLRHYLNLVTRQRYGKRDGPDTLLSKTFFPDGEDRPVRSRSEGPDLW

SEQ ID NO: 11199 - protein, 144 aa, Homo sapiens
MRKDRLLHLCLVLLLILLSASDSNSTEPQYMVLVPSLLHTEAPKKGCVLLSHLNETVTVSASLESGRENRSLFTDLVAEKDLFHCVSFTLPRISASSEVAFLSIQIKGPTQDFRKRNTVLVLNTQSLVFVQTDKPMYKPGQTGK

SEQ ID NO: 11200 - protein, 1482 aa, Homo sapiens
MRKDRLLHLCLVLLLILLSASDSNSTEPQYMVLVPSLLHTEAPKKGCVLLSHLNETVTVSASLESGRENRSLFTDLVAEKDLFHCVSFTLPRISASSEVAFLSIQIKGPTQDFRKRNTVLVLNTQSLVFVQTDKPMYKPGQTVRFRVVSVDENFRPRNELIPLIYLENPRRNRIAQWQSLKLEAGINQLSFPLSSEPIQGSYRVVVQTESGGRIQHPFTVEEFVLPKFEVKVQVPKIISIMDEKVNITVCGEYTYGKPVPGLATVSLCRKLSRVLNCDKQEVCEEFSQQLNSNGCITQQVHTKMLQITNTGFEMKLRVEARIREEGTDLEVTANRISEITNIVSKLKFVKVDSHFRQGIPFFAQVLLVDGKGVPIPNKLFFISVNDANYYSNATTNEQGLAQFSINTTSISVNKLFVRVFTVHPNLCFHYSWVAEDHQGAQHTANRVFSLSGSYIHLEPVAGTLPCGHTETITAHYTLNRQAMGELSELSFHYLIMAKGVIVRSGTHTLPVESGDMKGSFALSFPVESDVAPIARMFIFAILPDGEVVGDSEKFEIENCLANKVDLSFSPAQSPPASHAHLQVAAAPQSLCALRAVDQSVLLMKPEAELSVSSVYNLLTVKDLTNFPDNVDQQEEEQGHCPRPFFIHNGAIYVPLSSNEADIYSFLKGMGLKVFTNSKIRKPKSCSVIPSVSAGAVGQGYYGAGLGVVERPYVPQLGTYNVIPLNNEQSSGPVPETVRSYFPETWIWELVAVNSSGVAEVGVTVPDTITEWKAGAFCLSEDAGLGISSTASLRAFQPFFVELTMPYSVIRGEVFTLKATVLNYLPKCIRVSVQLKASPAFLASQNTKGEESYCICGNERQTLSWTVTPKTLGNVNFSVSAEAMQSLELCGNEVVEVPEIKRKDTVIKTLLVEAEGIEQEKTFSSMTCASGANVSEQLSLKLPSNVVKESARASFSVLGDILGSAMQNIQNLLQMPYGCGEQNMVLFAPNIYVLNYLNETQQLTQEIKAKAVGYLITGYQRQLNYKHQDGSYSTFGERYGRNQGNTWLTAFVLKTFAQARSYIFIDEAHITQSLTWLSQMQKDNGCFRSSGSLLNNAIKGGVEDEATLSAYVTIALLEIPLPVTNPIVRNALFCLESAWNVAKEGTHGSHVYTKALLAYAFSLLGKQNQNREILNSLDKEAVKEDNLVHWERPQRPKAPVGHLYQTQAPSAEVEMTSYVLLAYLTAQPAPTSGDLTSATNIVKWIMKQQNAQGGFSSTQDTVVALHALSRYGAATFTRTEKTAQVTVQDSQTFSTNFQVDNNNLLLLQQISLPELPGEYVITVTGERCVYLQTSMKYNILPEKEDSPFALKVQTVPQTCDGHKAHTSFQISLTISYTGNRPASNMVIVDVKMVSGFIPLKPTVKMLERSSSVSRTEVSNNHVLIYVEQVTNQTLSFSFMVLQDIPVGDLKPAIVKVYDYYETDESVVAEYIAPCSTDTEHGNV

SEQ ID NO: 11201 - protein, 284 aa, Homo sapiens
MAGGRHRRVVGTLHLLLLVAALPWASRGVSPSASAWPEEKHIMQRIQRLQADWVLEIDTFLSQTPYGYRSFSNIISTLNPTAKRHLVLACHYDSKYFSHWNNRVFVGATDSAVPCAMMLELARALDKKLLSLKTVSDSKPDLSLQLIFFDGEEAFLHWSPQDSLYGSRHLAAKMASTPHPPGARGTSQLHGMDLLVLLDLIGAPNPTFPNFFPNSARWFERLQAIEHELHELGLLKDHSLEGRYFQNYSYGGVIQDDHIPFLRRGVPVLHLIPSPFPEVWHTMD

SEQ ID NO: 11202 - protein, 361 aa, Homo sapiens
MAGGRHRRVVGTLHLLLLVAALPWASRGVSPSASAWPEEKNYHQPAILNSSALRQIAEGTSISEMWQNDLQPLLIERYPGSPGSYAARQHIMQRIQRLQADWVLEIDTFLSQTPYGYRSFSNIISTLNPTAKRHLVLACHYDSKYFSHWNNRVFVGATDSAVPCAMMLELARALDKKLLSLKTVSDSKPDLSLQLIFFDGEEAFLHWSPQDSLYGSRHLAAKMASTPHPPGARGTSQLHGMDLLVLLDLIGAPNPTFPNFFPNSARWFERLQAIEHELHELGLLKDHSLEGRYFQNYSYGGVIQDDHIPFLRRGVPVLHLIPSPFPEVWHTMDDNEENLDESTIDNLNKILQVFVLEYLHL

SEQ ID NO: 11203 - protein, 118 aa, Homo sapiens [sequence omitted]

SEQ ID NO: 11204 - protein, 149 aa, Homo sapiens
MDAEGLALLLPPVTLAALVDSWLREDCPGLNYAALAVRAARQAADFTLKVEVECSSLQEAVQAAEAGADLVLLDNFKPEELHPTATVLKAQFPSVAVEASGGITLDNLPQFCGPHIDVISMGMLTQAAPALDFSLKLFAKEVAPVPKIH

SEQ ID NO: 11205 - protein, 297 aa, Homo sapiens
MDAEGLALLLPPVTLAALVDSWLREDCPGLNYAALVSGAGPSQAALWAKSPGVLAGQPFFDAIFTQLNCQVSWFLPEGSKLVPVARVAEVRGPAHCLLLGERVALNTLARCSGIASAAAAAVEAARGAGWTGHVAGTRKTTPGFRLVEKYGLLVGGAASHRYDLGGLVMVKDNHVVAAGGVEKAVRAARQAADFTLKVEVECSSLQEAVQAAEAGADLVLLDNFKPEELHPTATVLKAQFPSVAVEASGGITLDNLPQFCGPHIDVISMGMLTQAAPALDFSLKLFAKEVAPVPKIH

SEQ ID NO: 11206 - protein, 136 aa, Homo sapiens
MVRPYPLIYFLFLPLGACFPLLDRREPTDAMGGLGAGERWADLAMGPRPHSVWGSSRWLRASQPQALLVIARGLQTSGREHAGCRFRFGRQDEGSEATGFLPAAGEKTSGPLGNLAEELNGYSRKKGGFSFRFGRR

SEQ ID NO: 11207 - protein, 136 aa, Homo sapiens; identical to SEQ ID NO: 11206

SEQ ID NO: 11208 - protein, 155 aa, Homo sapiens
MRRCNSGSGPPPSLLLLLLWLLAVPGANAAPRSALYSPSDPLTLLQADTVRGAVLGSRSAWAVEFFASWCGHCIAFAPTWKALAEDVKAWRPALYLAALDCAEETNSAVCRDFNIPGFPTVRFFKAFTKNGSGAVFPGWRRLMDSLREITKSTWL

SEQ ID NO: 11209 - protein, 747 aa, Homo sapiens
MRRCNSGSGPPPSLLLLLLWLLAVPGANAAPRSALYSPSDPLTLLQADTVRGAVLGSRSAWAVEFFASWCGHCIAFAPTWKALAEDVKAWRPALYLAALDCAEETNSAVCRDFNIPGFPTVRFFKAFTKNGSGAVFPVAGADVQTLRERLIDALESHHDTWPPACPPLEPAKLEEIDGFFARNNEEYLALIFEKGGSYLGREVALDLSQHKGVAVRRVLNTEANVVRKFGVTDFPSCYLLFRNGSVSRVPVLMESRSFYTAYLQRLSGLTREAAQTTVAPTTANKIAPTVWKLADRSKIYMADLESALHYILRIEVGRFPVLEGQRLVALKKFVAVLAKYFPGRPLVQNFLHSVNEWLKRQKRNKIPYSFFKTALDDRKEGAVLAKKVNWIGCQGSEPHFRGFPCSLWVLFHFLTVQAARQNVDHSQEAAKAKEVLPAIRGYVHYFFGCRDCASHFEQMAAASMHRVGSPNAAVLWLWSSHNRVNARLAGAPSEDPQFPKVQWPPRELCSACHNERLDVPVWDVEATLNFLKAHFSPSNIILDFPAAGSAARRDVQNVAAAPELAMGALELESRNSTLDPGKPEMMKSPTNTTPHVPAEGPEASRPPKLHPGLRAAPGQEPPEHMAELQRNEQEQPLGQWHLSKRDTGAALLAESRAEKNRLWGPLEVRRVGRSSKQLVDIPEGQLEARAGRGRGQWLQVLGGGFSYLDISLCVGLYSLSFMGLLAMYTYFQAKIRALKGHAGHPAA

SEQ ID NO: 11210 - protein, 604 aa, Homo sapiens
MRRCNSGSGPPPSLLLLLLWLLAVPGANAAPRSALYSPSDPLTLLQADTVRGAVLGSRSAWAVEFFASWCGHCIAFAPTWKALAEDVKAWRPALYLAALDCAEETNSAVCRDFNIPGFPTVRFFKAFTKNGSGAVFPVAGADVQTLRERLIDALESHHDTWPPACPPLEPAKLEEIDGFFARNNEEYLALIFEKGGSYLGREVALDLSQHKGVAVRRVLNTEANVVRKFGVTDFPSCYLLFRNGSVSRVPVLMESRSFYTAYLQRLSGLTREAAQTTVAPTTANKIAPTVWKLADRSKIYMADLESALHYILRIEVGRFPVLEGQRLVALKKFVAVLAKYFPGRPLVQNFLHSVNEWLKRQKRNKIPYSFFKTALDDRKEGAVLAKKVNWIGCQGSEPHFRGFPCSLWVLFHFLTVQAARQNVDHSQEAAKAKEVLPAIRGYVHYFFGCRDCASHFEQMAAASMHRVGSPNAAVLWLWSSHNRVNARLAGAPSEDPQFPKVQWPPRELCSACHNERLDVPVWDVEATLNFLKAHFSPSNIILDFPAAGSAARRDVQNVAAAPELAMGALELESRNSTLDPGKPEMMKSPTNTTPHVPAEGPELI

SEQ ID NO: 11211 - protein, 72 aa, Homo sapiens
  SITE 1: note = misc_feature - Xaa can be any naturally occurring amino acid
XNEQEQPLGQWHLSKRDTGAALLAESRAEKNRLWGPLEVRRVGRSSKQLVDIPEGQLEARAGRGRGQWLQLI

SEQ ID NO: 11212 - protein, 253 aa, Homo sapiens
MPLLPSTVGLAGLLFWAGQAVNALIMPNATPAPAQPESTAMRLLSGLEVPRYRRKRHISVRDMNALLDYHNHIRASVYPPAANMEYMVWDKRLARAAEAWATQCIWAHGPSQLMRYVGQNLSIHSGQYRSVVDLMKSWSEEKWHYLFPAPRDCNPHCPWRCDGPTCSHYTQMVWASSNRLGCAIHTCSSISVWGNTWHRAAYLVCNYAIKGNWIGESPYKMGKPCSSCPPSYQGSCNSNMCFKGLKSNKFTWF

SEQ ID NO: 11213 - protein, 190 aa, Homo sapiens
MLVGDSGVGKTCLLVRFKDGAFLAGTFISTVGIDFRNKVLDVDGVKVKLQMWDTAGQERFRSVTHAYYRDAHALLLLYDVTNKASFDNIQAWLTEIHEYAQHDVALMLLGNKVDSAHERVVKREDGEKLAKEYGLPFMETSAKTGLNVDLAFTAIAKELKQRSMKAPSEPRFRLHDYVKREGRGASCCRP

SEQ ID NO: 11214 - protein, 64 aa, Homo sapiens
MLVGDSGVGKTCLLVRFKDGAFLAGTFISTVGIDFRQGLTLSPWLECSGDHGGLQPPTSGFKPS

SEQ ID NO: 11215 - protein, 256 aa, Homo sapiens
MSRKKTPKSKGASTPAASTLPTANGARPARSGTALSGPDAPPNGPLQPGRPSLGGGVDFYDVAFKVMLVGDSGVGKTCLLVRFKDGAFLAGTFISTVGIDFRNKVLDVDGVKVKLQMWDTAGQERFRSVTHAYYRDAHALLLLYDVTNKASFDNIQAWLTEIHEYAQHDVALMLLGNKVDSAHERVVKREDGEKLAKEYGLPFMETSAKTGLNVDLAFTAIAKELKQRSMKAPSEPRFRLHDYVKREGRGASCCRP

SEQ ID NO: 11216 - protein, 136 aa, Homo sapiens
  SITE 1: note = misc_feature - Xaa can be any naturally occurring amino acid
XKEYGLPFMETSAKTGLNVDLAFTAIANNSPNKQASESPWPHTGRHGKAVFCTGRGAASGQTLPRCSAAPSWARPGEGGLGLAPRTVPNPRKAMSSAAHAQAAKGGRLPTPGTEGFTANHIVHLCVLGAACSRPTL

SEQ ID NO: 11217 - protein, 311 aa, Homo sapiens
MVIAGASWMLGRAAASPTQTPPTTSTIRVARRSRVALVAMVIAAAGSGGPGRAEPQLSQPSLDCGRMRSSLTPLGPPVSRDRVIASFPKWYTPEACLQLREHFHGQVSAACQRRNTGTVGFCKNVFDRDYKATIGVDFEIERFEIAGIPYSLQIWDTAGQEKFKCIASAYYRGAQVIITAFDLTDVQTLEHTRQWLEDALRENEAGSCFIFLVGTKKDLLSGAACEQAEADAVHLAREMQAEYWSVSAKTGENVKAFFSRVAALAFEQSVLQDLERQSSARLQVGNGDLIQMEGSPPETQESKRPSSLGCC

SEQ ID NO: 11218 - protein, 333 aa, Homo sapiens
MVIAGASWMLGRAAASPTQTPPTTSTIRVARRSRVALVAMVIAAAGSGGPGRAEPQLSQPSLDCGRMRSSLTPLGPPVSRDRVIASFPKWYTPEACLQLREHFHGQVSAACQRRNTGTVGLKLSKVVVVGDLYVGKTSLIHRFCKNVFDRDYKATIGVDFEIERFEIAGIPYSLQIWDTAGQEKFKCIASAYYRGAQVIITAFDLTDVQTLEHTRQWLEDALRENEAGSCFIFLVGTKKDLLSGAACEQAEADAVHLAREMQAEYWSVSAKTGENVKAFFSRVAALAFEQSVLQDLERQSSARLQVGNGDLIQMEGSPPETQESKRPSSLGCC

SEQ ID NO: 11219 - protein, 132 aa, Homo sapiens
  SITE 1: note = misc_feature - Xaa can be any naturally occurring amino acid
XVSAACQRRNTGTVGLKLSKVVVVGDLYVGKTSLIHRFCKNVFDRDYKATIGVDFEIERFEIAGIPYSLQIWDTAGQEKFKCIASAYYRGAQGEQHATSGLNCMQQRGPCRAPQWESRVLCTGTSFLSSKTH

SEQ ID NO: 11220 - protein, 201 aa, Homo sapiens
MSGKSLLLKVILLGDGGVGKSSLMNRYVTNKFDSQAFHTIGVEFLNRDLEVDGRFVTLQIWDTAGQERFKSLRTPFYRGADCCLLTFSVDDRQSFENLGNWQKEFIYYADVKDPEHFPFVVLGNKVDKEDRQVTTEEAQTWCMENGDYPYLETSAKDDTNVTVAFEEAVRQVLAVEEQLEHCMLGHTIDLNSGSKAGSSCC

SEQ ID NO: 11221 - protein, 80 aa, Homo sapiens
MRRISLTSSPVRLLLFLLLLLIALEIMVGGHSLCFNFTIKSLSRPGQPWCEAQVFLNKNLFLQYNSDNNMVKPLGLLGKK

SEQ ID NO: 11222 - protein, 117 aa, Homo sapiens
MRRISLTSSPVRLLLFLLLLLIALEIMVGGHSLCFNFTIKSLSRPGQPWCEAQVFLNKNLFLQYNSDNNMVKPLGLLGKKILPLCKSRCFVNVKQNGALVHPGSSPPMERNPSSLTQ

SEQ ID NO: 11223 - protein, 209 aa, Homo sapiens
MRRISLTSSPVRLLLFLLLLLIALEIMVGGHSLCFNFTIKSLSRPGQPWCEAQVFLNKNLFLQYNSDNNMVKPLGLLGKKVYATSTWGELTQTLGEVGRDLRMLLCDIKPQIKTSDPSTLQVEMFCQREAERCTGASWQFATNGEKSLLFDAMNMTWTVINHEASKIKETWKKDRGLEKYFRKLSKGDCDHWLREFLGHWEAMPEPTGN

SEQ ID NO: 11224 - protein, 212 aa, Homo sapiens
MRRISLTSSPVRLLLFLLLLLIALEIMVGGHSLCFNFTIKSLSRPGQPWCEAQVFLNKNLFLQYNSDNNMVKPLGLLGKKVYATSTWGELTQTLGEVGRDLRMLLCDIKPQIKTSDPSTLQVEMFCQREAERCTGASWQFATNGEKSLLFDAMNMTWTVINHEASKIKETWKKDRGLEKYFRKLSKGDCDHWLREFLGHWEAMPEPTGRRST

SEQ ID NO: 11225 - protein, 263 aa, Homo sapiens
MRRISLTSSPVRLLLFLLLLLIALEIMVGGHSLCFNFTIKSLSRPGQPWCEAQVFLNKNLFLQYNSDNNMVKPLGLLGKKVYATSTWGELTQTLGEVGRDLRMLLCDIKPQIKTSDPSTLQVEMFCQREAERCTGASWQFATNGEKSLLFDAMNMTWTVINHEASKIKETWKKDRGLEKYFRKLSKGDCDHWLREFLGHWEAMPEPTVSPVNASDIHWSSSSLPDRWIILGAFILLVLMGIVLICVWWQNGEWQAGLWPLRTS

SEQ ID NO: 11226 - protein, 227 aa, Homo sapiens
MRRISLTSSPVRLLLFLLLLLIALEIMYNSDNNMVKPLGLLGKKVYATSTWGELTQTLGEVGRDLRMLLCDIKPQIKTSDPSTLQVEMFCQREAERCTGASWQFATNGEKSLLFDAMNMTWTVINHEASKIKETWKKDRGLEKYFRKLSKGDCDHWLREFLGHWEAMPEPTVSPVNASDIHWSSSSLPDRWIILGAFILLVLMGIVLICVWWQNGEWQAGLWPLRTS

SEQ ID NO: 11227 - protein, 334 aa, Homo sapiens
MAAAASPAFLLRLPLLLLLSSWCRTGLADPHSLCYDITVIPKFRPGPRWCAVQGQVDEKTFLHYDCGSKTVTPVSPLGKKLNVTTAWKAQNPVLREVVDILTEQLLDIQLENYIPKEPLTLQARMSCEQKAEGHGSGSWQLSFDGQIFLLFDSENRMWTTVHPGARKMKEKWENDKDMTMSFHYISMGDCTGWLEDFLMGMDSTLEPSAGAPPTMSSGTAQPRATATTLILCCLLIMCLLICSRHSLTQSHGHHPQSLQPPPHPPLLHPTWLLRRVLWSDSYQIAKRPLSGGHVTRVTLPIIGDDSHSLPCPLALYTINNGAARYSEPLQVSIS

SEQ ID NO: 11228 - protein, 221 aa, Homo sapiens
MAAAASPAFLLRLPLLLLLSSWCRTGLADPHSLCYDITVIPKFRPGPRWCAVQGQVDEKTFLHYDCGSKTVTPVSPLGKKLNVTTAWKAQNPVLREVVDILTEQLLDIQLENYIPKEPLTLQARMSCEQKAEGHGSGSWQLSFDGQIFLLFDSENRMWTTVHPGARKMKEKWENDKDMTMSFHYISMGDCTGWLEDFLMGMDSTLEPSAGGNRRKRNGDLQ

SEQ ID NO: 11229 - protein, 213 aa, Homo sapiens
MAAAASPAFLLRLPLLLLLSSWCRTGLADPHSLCYDITVIPKFRPGPRWCAVQGQVDEKTFLHYDCGSKTVTPVSPLGKKLNVTTAWKAQNPVLREVVDILTEQLLDIQLENYIPKEPLTLQARMSCEQKAEGHGSGSWQLSFDGQIFLLFDSENRMWTTVHPGARKMKEKWENDKDMTMSFHYISMGDCTGWLEDFLMGMDSTLEPSAGGTV

SEQ ID NO: 11230 - protein, 180 aa, Homo sapiens
MASLRVERAGGPRLPRTRVGRPAALRLLLLLGAVLNPHEALAQPLPTTGTPGSEASVPTGGTVKNYETAVQFCWNHYKDQMDPIEKDWCDWAMISRPYSTLRDCLEHFAELFDLGFPNPLAERIIFETHQIHFANCSLVQPTFSDPPEDVLLAMIIAPICLIPFLITLVVWRSKDSEAQA

SEQ ID NO: 11231 - protein, 175 aa, Homo sapiens
MASLRVERAGGPRLPRTRVGRPAALRLLLLLGAVLNPHEALAQPLPTTGTPGSEGGTVKNYETAVQFCWNHYKDQMDPIEKDWCDWAMISRPYSTLRDCLEHFAELFDLGFPNPLAERIIFETHQIHFANCSLVQPTFSDPPEDVLLAMIIAPICLIPFLITLVVWRSKDSEAQA

SEQ ID NO: 11232 - protein, 112 aa, Homo sapiens
MASLRVERAGGPRLPRTRVGRPAALRLLLLLGAVLNPHEALAQPLPTTGTPGSEGLIAPCEIAWSTLQSCLTWASPIPWQRGSSLRLTRSTLPTAPWCSPPSLTPQRMYSWP

SEQ ID NO: 11233 - protein, 49 aa, Homo sapiens
MDPIEKDWCDWAMISRPYSTLRDCLEHFAELFDLGFPNPLAERIIFETH

SEQ ID NO: 11234 - protein, 100 aa, Homo sapiens
MDPIEKDWCDWAMISRPYSTLRDCLEHFAELFDLGFPNPLAERIIFETHQIHFANCSLVQPTFSDPPEDVLLAMIIAPICLIPFLITLVVWRSKDSEAQA

SEQ ID NO: 11235 - protein, 730 aa, Homo sapiens
MAIGVWQLLLDMGIMLSVDQHLYFQDTYVFYQFSSDECSYLYCEFEREEEWQNGVKLLLQLVPLIPARGGICELSHQKIEDSEESSDEILVRLTSAVQRELAAVIALKARKSAIEQDEENNDKHVAVTEAESVPDSQAGVMCKLQERDEIGRIELVQKLAKENYQFLQTDKKEQEKSEHQDDEVTTVQVKEQDQSVLVLKKVQCCGPAPTAGSAESHWRYVVVSGTPEKILEHLLNDLHLEEVQDKETETLLDDFLLTYTVFMTTDDLCQALLRHYSAKKYQGKEENSDVPRRKRKVLHLVSQWIALYKDWLPEDEHSKMFLKTIYRNVLDDVYEYPILEKELKEFQKILGMHRRHTVDEYSPQKKNKALFHQFSLKENWLQHRGTVTETEEIFCHVYITEHSYVSVKAKVSSIAQEILKVVAEKIQYAEEDLALVAITFSGEKHELQPNDLVISKSLEASGRIYVYRKDLADTLNPFAENEESQQRSMRILGMNTWDLALELMNFDWSLFNSIHEQELIYFTFSRQGSGEHTANLSLLLQRCNEVQLWVATEILLCSQLGKRVQLVKKFIKIAAHCKAQRNLNSFFAIVMGLNTASVSRLSQTWEKIPGKFKKLFSELESLTDPSLNHKAYRDAFKKMKPPKIPFMPLLLKDVTFIHEGNKTFLDNLVNFEKLHMIADTVRTLRHCRTNQFGDLSPKEHQELKSYVNHLYVIDSQQALFELSHRIEPRV

SEQ ID NO: 11236 - protein, 580 aa, Homo sapiens
MGSSRLRVFDPHLERKDSAAALSDRELPLPTFDVPYFKYIDEEDEDDEWSSRSQSSTEDDSVDSLLSDRYVVVSGTPEKILEHLLNDLHLEEVQDKETETLLDDFLLTYTVFMTTDDLCQALLRHYSAKKYQGKEENSDVPRRKRKVLHLVSQWIALYKDWLPEDEHSKMFLKTIYRNVLDDVYEYPILEKELKEFQKILGMHRRHTVDEYSPQKKNKALFHQFSLKENWLQHRGTVTETEEIFCHVYITEHSYVSVKAKVSSIAQEILKVVAEKIQYAEEDLALVAITFSGEKHELQPNDLVISKSLEASGRIYVYRKDLADTLNPFAENEESQQRSMRILGMNTWDLALELMNFDWSLFNSIHEQELIYFTFSRQGSGEHTANLSLLLQRCNEVQLWVATEILLCSQLGKRVQLVKKFIKIAAHCKAQRNLNSFFAIVMGLNTASVSRLSQTWEKIPGKFKKLFSELESLTDPSLNHKAYRDAFKKMKPPKIPFMPLLLKDVTFIHEGNKTFLDNLVNFEKLHMIADTVRTLRHCRTNQFGDLSPKEHQELKSYVNHLYVIDSQQALFELSHRIEPRV

SEQ ID NO: 11237 - protein, 444 aa, Homo sapiens
MGSSRLRVFDPHLERKDSAAALSDRELPLPTFDVPYFKYIDEEDEDDEWSSRSQSSTEDDSVDSLLSDRYVVVSGTPEKILEHLLNDLHLEEVQDKETETLLDDFLLTYTVFMTTDDLCQALLRHYSAKKYQGKEENSDVPRRKRKVLHLVSQWIALYKDWLPEDEHSKMFLKTIYRNVLDDVYEYPILEKELKEFQKILGMHRRHTVDEYSPQKKNKALFHQFSLKENWLQHRGTVTETEEIFCHVYITEHSYVSVKAKVSSIAQEILLCSQLGKRVQLVKKFIKIAAHCKAQRNLNSFFAIVMGLNTASVSRLSQTWEKIPGKFKKLFSELESLTDPSLNHKAYRDAFKKMKPPKIPFMPLLLKDVTFIHEGNKTFLDNLVNFEKLHMIADTVRTLRHCRTNQFGDLSPKEHQELKSYVNHLYVIDSQQALFELSHRIEPRV

SEQ ID NO: 11238 - protein, 124 aa, Homo sapiens
MGSSRLRVFDPHLERKDSAAALSDRELPLPTFDVPYFKYIDEEDEDDEWSSRSQSSTEDDSVDSLLSDRYVVVSGTPEKILEHLLNDLHLEEVQDKETVIPTPGITCVTSAMCSQSQADQDFMA

SEQ ID NO: 11239 - protein, 400 aa, Homo sapiens
MRMAVGSVKMQPPCESPALAAAAAVVAADGPLRRSPSAREPEREQPPASLRPRLRDLPALLRSGLTLRRKRSAAGGRTLSRRISNPYLEHTPSQIYGENSSCAGRALRNIIIVQAADLIKDRVNLKGFYRRSCVGSELVDWLLEHCPFVQCRSMAIGVWQLLLDMGIMLSVDQHLYFQDTYVFYQFSSDECSYLYCEFEREEEWQNGVKLLLQLVPLIPARGGICELSHQKIEDSEESSDEILVRLTSAVQRELAAVIALKARKSAIEQDEENNDKHVAVTEAESVPDSQAGVMCKLQERDEIGRIELVQKLAKENYQFLQTDKKEQEKSEHQDDEVTTVQVKEQDQSVLVLKKVQCCGPAPTAGSAESHWSVLADCRALSSQMDSVPSERTGMARSFSI

SEQ ID NO: 11240 - protein, 155 aa, Homo sapiens
MSWDCGFKYIFAFSPTLKAGVMCKLQERDEIGRIELVQKLAKENYQFLQTDKKEQEKSEHQDDEVTTVQVKEQDQSVLVLKKVQCCGPAPTAGSAESHWRYVVVSGTPEKILEHLLNDLHLEEVQDKETETLLDDFLLTYTVFMTTDDLCQALLR

SEQ ID NO: 11241 - protein, 142 aa, Homo sapiens
MTTDDLCQALLRHYSAKKYQGKEENSDVPRRKRKVLHLVSQWIALYKDWLPEDEHSKMFLKTIYRNVLDDVYEYPILEKELKEFQKILGMHRRHTVDEYSPQKKNKALFHQFSLKENWLQHRGTVTETEEIFCHVYITEHSY

SEQ ID NO: 11242 - protein, 294 aa, Homo sapiens
MQPRRQRLPAPWSGPRGPRPTAPLLALLLLLAPVAAPAGSGDPDDPGQPQDAGVPRRLLQQAARAALHFFNFRSGSPSALRVLAEVQEGRAWINPKEGCKVHVVFSTERYNPESLLQEGEGRLGKCSARVFFKNQKPRPTINVTCTRLIEKKKRQQEDYLLYKQMKQLKNPLEIVSIPDNHGHIDPSLRLIWDLAFLGSSYVMWEMTTQVSHYYLAQLTSVRQWKTNDDTIDFDYTVLLHELSTQEIIPCRIHLVWYPGKPLKVKYHCQELQTPEEASGTEEGSAVVPTELSNF

SEQ ID NO: 11243 - protein, 228 aa, Homo sapiens
MQPRRQRLPAPWSGPRGPRPTAPLLALLLLLAPVAAPAGSGDPDDPGQPQDAGVPRRLLQQAARAALHFFNFRSGSPSALRVLAEVQEGRAWINPKEGCKVHVVFSTERYNPESLLQEGEGRLGKCSARVFFKNQKPRPTINVTCTRLIEKKKRQQEDYLLYKQMKQLKNPLEIVSIPDNHGHIDPSLRLIWDLAFLGSSYVMWEMTTQVSHYYLAQLTSVRQWVRKT

SEQ ID NO: 11244 - protein, 163 aa, Homo sapiens
MRRLLIPLALWLGAVGVGVAELTEAQRRGLQVALEEFHKHPPVQWAFQETSVESAVDTPFPAGIFVRLEFKLQQTSCRKRDWKKPECKVRPNGRKRKCLACIKLGSEDKVLGRLVHCPIETQVLREAEEHQETQCLRVQRAGEDPHSFYFPGQFAFSKALPRS

SEQ ID NO: 11245 - protein, 163 aa, Homo sapiens; identical to SEQ ID NO: 11244

SEQ ID NO: 11246 - protein, 163 aa, Homo sapiens; identical to SEQ ID NO: 11244

SEQ ID NO: 11247 - protein, 159 aa, Homo sapiens
MRRLLIPLALWLGAVGVGVAELTEAQRRGLQVALEEFHKHPPVQWAFQETSVESAVDTPFPAGIFVRLEFKLQQTSCRKRDWKKPECKVRPNGRKRKCLACIKLGSEDKVLGRLVHCPIETQVLRRCVVPPGPLRVVTSGRPQPPGRGTRSIPSHDNKA

SEQ ID NO: 11248 - protein, 47 aa, Homo sapiens
MAAAAPAAAAASSEAPAASATAEPEAGDQDSREVKQKIYCHILDPTK

SEQ ID NO: 11249 - protein, 849 aa, Homo sapiens
MAAAAPAAAAASSEAPAASATAEPEAGDQDSREVRVLQSLRGKICEAKNLLPYLGPHKMRDCFCTINLDQEEVYRTQVVEKSLSPFFSEEFYFEIPRTFQYLSFYVYDKNVLQRDLRIGKVAIKKEDLCNHSGKETWFSLQPVDSNSEVQGKVHLELKLNELITENGTVCQQLVVHIKACHGLPLINGQSCDPYATVSLVGPSRNDQKKTKVKKKTSNPQFNEIFYFEVTRSSSYTRKSQFQVEEEDIEKLEIRIDLWNNGNLVQDVFLGEIKVPVNVLRTDSSHQAWYLLQPRDNGNKSSKTDDLGSLRLNICYTEDYVLPSEYYGPLKTLLLKSPDVQPISASAAYILSEICRDKNDAVLPLVRLLLHHDKLVPFATAVAELDLKDTQDANTIFRGNSLATRCLDEMMKIVGGHYLKVTLKPILDEICDSSKSCEIDPIKLKEGDNVENNKENLRYYVDKLFNTIVKSSMSCPTVMCDIFYSLRQMATQRFPNDPHVQYSAVSSFVFLRFFAVAVVSPHTFHLRPHHPDAQTIRTLTLISKTIQTLGSWGSLSKSKSSFKETFMCEFFKMFQEEGYIIAVKKFLDEISSTETKESSGTSEPVHLKEGEMYKRAQGRTRIGKKNFKKRWFCLTSRELTYHKQPGKDAIYTIPVKNILAVEKLEESSFNKKNMFQVIHTEKPLYVQANNCVEANEWIDVLCRVSRCNQNRLSFYHPSVYLNGNWLCCQETGENTLGCKPCTAGVPADIQIDIDEDRETERIYSLFTLSLLKLQKMEEACGTIAVYQGPQKEPDDYSNFVIEDSVTTFKTIQQIKSIIEKLDEPHEKYRKKRSSSAKYGSKENPIVGKAS

SEQ ID NO: 11250 - protein, 853 aa, Homo sapiens [sequence omitted]

SEQ ID NO: 11251 - protein, 155 aa, Homo sapiens
MAPRTWCPAGIFGLFCPLTLACSSLTIALTDCQPIILVSPTLSLWMVVRSVWIMQASLLGEPEEVALGPMGVVAATLEVVGTRAMGVAGIMTVDLEGMDMDMDVPETIMAETRVVMTATQEEITETIMTTEMRHAHNIGETWISALSEPVCHTLS

SEQ ID NO: 11252 - protein, 157 aa, Homo sapiens
MSSEEGKLFVGGLNFNTDEQALEDHFSSFGPISEVVVVKDRETQRSRGFGFITFTNPEHASVAMRAMNGESLDGRQIRVDHAGKSARGTRGGGFGAHGRGRSYSRGGGDQGYGSGRYYDSRPGGYGYGYGRSRDYNGRNQGGYDRYSGGNYRDNYDN

SEQ ID NO: 11253 - protein, 157 aa, Homo sapiens; identical to SEQ ID NO: 11252

SEQ ID NO: 11254 - protein, 1247 aa, Homo sapiens
MMREWVLLMSVLLCGLAGPTHLFQPSLVLDMAKVLLDNYCFPENLLGMQEAIQQAIKSHEILSISDPQTLASVLTAGVQSSLNDPRLVISYEPSTPEPPPQVPALTSLSEEELLAWLQRGLRHEVLEGNVGYLRVDSVPGQEVLSMMGEFLVAHVWGNLMGTSALVLDLRHCTGGQVSGIPYIISYLHPGNTILHVDTIYNRPSNTTTEIWTLPQVLGERYGADKDVVVLTSSQTRGVAEDIAHILKQMRRAIVVGERTGGGALDLRKLRIGESDFFFTVPVSRSLGPLGGGSQTWEGSGVLPCVGTPAEQALEKALAILTLRSALPGVVHCLQEVLKDYYTLVDRVPTLLQHLASMDFSTVVSEEDLVTKLNAGLQAASEDPRLLVRAIGPTETPSWPAPDAAAEDSPGVAPELPEDEAIRQALVDSVFQVSVLPGNVGYLRFDSFADASVLGVLAPYVLRQVWEPLQDTEHLIMDLRHNPGGPSSAVPLLLSYFQGPEAGPVHLFTTYDRRTNITQEHFSHMELPGPRYSTQRGVYLLTSHRTATAAEEFAFLMQSLGWATLVGEITAGNLLHTRTVPLLDTPEGSLALTVPVLTFIDNHGEAWLGGGVVPDAIVLAEEALDKAQEVLEFHQSLGALVEGTGHLLEAHYARPEVVGQTSALLRAKLAQGAYRTAVDLESLASQLTADLQEVSGDHRLLVFHSPGELVVEEAPPPPPAVPSPEELTYLIEALFKTEVLPGQLGYLRFDAMAELETVKAVGPQLVRLVWQQLVDTAALVIDLRYNPGSYSTAIPLLCSYFFEAEPRQHLYSVFDRATSKVTEVWTLPQVAGQRYGSHKDLYILMSHTSGSAAEAFAHTMQDLQRATVIGEPTAGGALSVGIYQVGSSPLYASMPTQMAMSATTGKAWDLAGVEPDITVPMSEALSIAQDIVALRAKVPTVLQTAGKLVADNYASAELGAKMATKLSGLQSRYSRVTSEVALAEILGADLQMLSGDPHLKAAHIPENAKDRIPGIVPMQIPSPEVFEELIKFSFHTNVLEDNIGYLRFDMFGDGELLTQVSRLLVEHIWKKIMHTDAMIIDMRFNIGGPTSSIPILCSYFFDEGPPVLLDKIYSRPDDSVSELWTHAQVVGERYGSKKSMVILTSSVTAGTAEEFTYIMKRLGRALVIGEVTSGGCQPPQTYHVDDTNLYLTIPTARSVGASDGSSWEGVGVTPHVVVPAEEALARAKEMLQHNQLRVKRSPGLQDHL

SEQ ID NO: 11255 - protein, 201 aa, Homo sapiens
MKWVWALLLLAALGSGRAERDCRVSSFRVKENFDKARFSGTWYAMAKKDPEGLFLQDNIVAEFSVDETGQMSATAKGRVRLLNNWDVCADMVGTFTDTEDPAKFKMKYWGVASFLQKGNDDHWIVDTDYDTYAVQYSCRLLNLDGTCADSYSFVFSRDPNGLPPEAQKIVRQRQEELCLARQYRLIVHNGYCDGRSERNLL

SEQ ID NO: 11256 - protein, 201 aa, Homo sapiens; identical to SEQ ID NO: 11255

SEQ ID NO: 11257 - protein, 199 aa, Homo sapiens
MNYSKIPAQVDLRRQTERDCRVSSFRVKENFDKARFSGTWYAMAKKDPEGLFLQDNIVAEFSVDETGQMSATAKGRVRLLNNWDVCADMVGTFTDTEDPAKFKMKYWGVASFLQKGNDDHWIVDTDYDTYAVQYSCRLLNLDGTCADSYSFVFSRDPNGLPPEAQKIVRQRQEELCLARQYRLIVHNGYCDGRSERNLL

SEQ ID NO: 11258 - protein, 199 aa, Homo sapiens; identical to SEQ ID NO: 11257

SEQ ID NO: 11259 - protein, 28 aa, Homo sapiens
EILENWNMFVGSQATNYGEDLTKNHDEL

SEQ ID NO: 11260 - protein, 331 aa, Homo sapiens
MARGGRGRRLGLALGLLLALVLAPRVLRAKPTVRKERVVRPDSELGERPPEDNQSFQYDHEAFLGKEDSKTFDQLTPDESKERLGKIVDRIDNDGDGFVTTEELKTWIKRVQKRYIFDNVAKVWKDYDRDKDDKISWEEYKQATYGYYLGNPAEFHDSSDHHTFKKMLPRDERRFKAADLNGDLTATREEFTAFLHPEEFEHMKEIVVLETLEDIDKNGDGFVDQDEYIADMFSHEENGPEPDWVLSEREQFNEFRDLNKDGKLDKDEIRHWILPQDYDHAQAEARHLVYESDKNKDEKLTKEEILENWNMFVGSQATNYGEDLTKNHDEL

SEQ ID NO: 11261 - protein, 20 aa, Homo sapiens
MLPRDERRFKAADLNGDLTA

SEQ ID NO: 11262 - protein, 57 aa, Homo sapiens
  SITE 1: note = misc_feature - Xaa can be any naturally occurring amino acid
XETLEDIDKNGDGFVDQDEYIDKETSGSVTELSQKPGFIFWLLNSVLSTPPHGLHHE

SEQ ID NO: 11263 - protein, 335 aa, Homo sapiens
MRLGPRTAALGLLLLCAAAAGAGKAEELHYPLGERRSDYDREALLGVQEDVDEYVKLGHEEQQKRLQAIIKKIDLDSDGFLTESELSSWIQMSFKHYAMQEAKQQFVEYDKNSDDTVTWDEYNIQMYDRVIDFDENTALDDAEEESFRKEFAICKKQSFCFWLLRFNLHLKDKKRFEKANQDSGPGLSLEEFIAFEHPEEVDYMTEFVIQEALEEHDKNGDGFVSLEEFLGDYRWDPTANEDPEWILVEKDRFVNDYDKDNDGRLDPQELLPWVVPNNQGIAQEEALHLIDEMDLNGDKKLSEEEILENPDLFLTSEATDYGRQLHDDYFYHDEL

SEQ ID NO: 11264 - protein, 317 aa, Homo sapiens
MRLGPRTAALGLLLLCAAAAGAGKAEELHYPLGERRSDYDREALLGVQEDVDEYVKLGHEEQQKRLQAIIKKIDLDSDGFLTESELSSWIQMSFKHYAMQEAKQQFVEYDKNSDDTVTWDEYNIQMYDRVIDFDENTALDDAEEESFRKLHLKDKKRFEKANQDSGPGLSLEEFIAFEHPEEVDYMTEFVIQEALEEHDKNGDGFVSLEEFLGDYRWDPTANEDPEWILVEKDRFVNDYDKDNDGRLDPQELLPWVVPNNQGIAQEEALHLIDEMDLNGDKKLSEEEILENPDLFLTSEATDYGRQLHDDYFYHDEL

SEQ ID NO: 11265 - protein, 216 aa, Homo sapiens
MRLGPRTAALGLLLLCAAAAGAGKAEELHYPLGERRSDYDREALLGVQLHLKDKKRFEKANQDSGPGLSLEEFIAFEHPEEVDYMTEFVIQEALEEHDKNGDGFVSLEEFLGDYRWDPTANEDPEWILVEKDRFVNDYDKDNDGRLDPQELLPWVVPNNQGIAQEEALHLIDEMDLNGDKKLSEEEILENPDLFLTSEATDYGRQLHDDYFYHDEL

SEQ ID NO: 11266 - protein, 155 aa, Homo sapiens
  SITE 1: note = misc_feature - Xaa can be any naturally occurring amino acid
XGLLLLCAAAAGAGKAEELHYPLGERRSDYDREALLGVQEDVDEYVKLGHEEQQKRLQAIIKKIDLDSDGFLTESELSSWIQMSFKHYAMQEAKQQFVEYDKNSDDTVTWDEYNIQMYDRVIDFDENTALDDAEEESFRKHQCGGLGLHPQSQSA

SEQ ID NO: 11267 - protein, 169 aa, Homo sapiens
FQYDHEAFLGREVAKEFDQLTPEESQARLGRIVDRMDRAGDGDGWVSLAELRAWIAHTQQRHIRDSVSAAWDTYDTDRDGRVGWEELRNATYGHYAPGEEFHDVEDAETYKKMLARDERRFRVADQDGDSMATREELTAFLHPEEFPHMRDIVIALFFSRIYLLTFLLL

SEQ ID NO: 11268 - protein, 150 aa, Homo sapiens
MMWRPSVLLLLLLLRHGAQGKPSPDAGPHGQGRVHQAAPLSDAPHDDAHGNFQYDHEAFLGREVAKEFDQLTPEESQARLGRIVDRMDRAGDGDGWVSLAELRAWIAHTQQRHIRDSVKNFMTWRMQRPTKRCWLGTSGVSGWPTRMGTR

SEQ ID NO: 11269 - protein, 328 aa, Homo sapiens
MMWRPSVLLLLLLLRHGAQGKPSPDAGPHGQGRVHQAAPLSDAPHDDAHGNFQYDHEAFLGREVAKEFDQLTPEESQARLGRIVDRMDRAGDGDGWVSLAELRAWIAHTQQRHIRDSVSAAWDTYDTDRDGRVGWEELRNATYGHYAPGEEFHDVEDAETYKKMLARDERRFRVADQDGDSMATREELTAFLHPEEFPHMRDIVIAETLEDLDRNKDGYVQVEEYIADLYSAEPGEEEPAWVQTERQQFRDFRDLNKDGHLDGSEVGHWVLPPAQDQPLVEANHLLHESDTDKDGRLSKAEILGNWNMFVGSQATNYGEDLTRHHDEL

SEQ ID NO: 11270 - protein, 58 aa, Homo sapiens
  SITE 1: note = misc_feature - Xaa can be any naturally occurring amino acid
XTERQQFRDFRDLNKDGHLDGSEDGRLSKAEILGNWNMFVGSQATNYGEDLTRHHDEL

SEQ ID NO: 11271 - protein, 485 aa, Homo sapiens
MPAMVEKGPEVSGKRRGRNNAAASASAAAASAAASAACASPAATAASGAAASSASAAAASAAAAPNNGQNKSLAAAAPNGNSSSNSWEEGSSGSSSDEEHGGGGMRVGPQYQAVVPDFDPAKLARRSQERDNLGMLVWSPNQNLSEAKLDEYIAIAKEKHGYNMEQALGMLFWHKHNIEKSLADLPNFTPFPDEWTVEDKVLFEQAFSFHGKTFHRIQQMLPDKSIASLVKFYYSWKKTRTKTSVMDRHARKQKREREESEDELEEANGNNPIDIEVDQNKESKKEVPPTETVPQVKKEKHSTQAKNRAKRKPPKGMFLSQEDVEAVSANATAATTVLRQLDMELVSVKRQIQNIKQTNSALKEKLDGGIEPYRLPEVIQKCNARWTTEEQLLAVQAIRKYGRDFQAISDVIGNKSVVQVKNFFVNYRRRFNIDEVLQEWEAEHGKEETNGPSNQKPVKSPDNSIKMPEEEDEAPVLDVRYASAS

SEQ ID NO: 11272 - protein, 35 aa, Homo sapiens
QTNSALKEKLDGGIEPYRLPEPSGNMAEIFRQSQT

SEQ ID NO: 11273 - protein, 305 aa, Homo sapiens
MVELMFPLLLLLLPFLLYMAAPQIRKMLSSGVCTSTVQLPGKVVVVTGANTGARVYLACRDVEKGELVAKEIQTTTGNQQVLVRKLDLSDTKSIRAFAKGFLAEEKHLHVLINNAGVMMCPYSKTADGFEMHIGVNHLGHFLLTHLLLEKLKESAPSRIVNVSSLAHHLGRIHFHNLQGEKFYNAGLAYCHSKLANILFTQELARRLKGSGVTTYSVHPGTVQSELVRHSSFMRWMWWLFSFFIKTPQQGAQTSLHCALTEGLEILSGNHFSDCHVAWVSAQARNETIARRLWDVSCDLLGLPID

SEQ ID NO: 11274 - protein, 187 aa, Homo sapiens [sequence omitted]

SEQ ID NO: 11275 - protein, 318 aa, Homo sapiens
MVELMFPLLLLLLPFLLYMAAPQIRKMLSSGVCTSTVQLPGKVVVVTGANTGIGKETAKELAQRGARVYLACRDVEKGELVAKEIQTTTGNQQVLVRKLDLSDTKSIRAFAKGFLAEEKHLHVLINNAGVMMCPYSKTADGFEMHIGVNHLGHFLLTHLLLEKLKESAPSRIVNVSSLAHHLGRIHFHNLQGEKFYNAGLAYCHSKLANILFTQELARRLKGSGVTTYSVHPGTVQSELVRHSSFMRWMWWLFSFFIKTPQQGAQTSLHCALTEGLEILSGNHFSDCHVAWVSAQARNETIARRLWDVSCDLLGLPID

SEQ ID NO: 11276 - protein, 248 aa, Homo sapiens
MVELMFPLLLLLLPFLLYMAAPQIRKMLSSGVCTSTVQLPGKVVVVTGANTGIGKETAKELAQRGARVYLACRDVEKGELVAKEIQTTTGNQQVLVRKLDLSDTKSIRAFAKGFLAEEKHLHVLINNAGVMMCPYSKTADGFEMHIGVNHLGSGVTTYSVHPGTVQSELVRHSSFMRWMWWLFSFFIKTPQQGAQTSLHCALTEGLEILSGNHFSDCHVAWVSAQARNETIARRLWDVSCDLLGLPID

SEQ ID NO: 11277 - protein, 178 aa, Homo sapiens
MVELMFPLLLLLLPFLLYMAAPQIRKMLSSGVCTSTVQLPGKVVVVTGANTGIGKETAKELAQRGHFLLTHLLLEKLKESAPSRIVNVSSLAHHLGRIHFHNLQGEKFYNAGLAYCHSKLANILFTQELARRLKGSGVTTYSVHPGTVQSELVRHSSFMRWMWWLFSFFIKTPQQGAQ

SEQ ID NO: 11278 - protein, 61 aa, Homo sapiens
MVELMFPLLLLLLPFLLYMAAPQIRSLPPNPSAARETKGISPIKDSKCVFPRTSPGKDPLP

SEQ ID NO: 11279 - protein, 62 aa, Homo sapiens
MVELMFPLLLLLLPFLLYMAAPQIRSSSIFSLPGCGKGGIGGQRDPDHDREPAGVGAETGPV

SEQ ID NO: 11280 - protein, 204 aa, Homo sapiens
SDTKSIRAFAKGFLAEEKHLHVLINNAGVMMCPYSKTADGFEMHIGVNHLGHFLLTHLLLEKLKESAPSRIVNVSSLAHHLGRIHFHNLQGEKFYNAGLAYCHSKLANILFTQELARRLKVQSELVRHSSFMRWMWWLFSFFIKTPQQGAQTSLHCALTEGLEILSGNHFSDCHVAWVSAQARNETIARRLWDVSCDLLGLPID

SEQ ID NO: 11281 - protein, 316 aa, Homo sapiens
MLVTLGLLTSFFSFLYMVAPSIRKFFAGGVCRTNVQLPGKVVVITGANTGIGKETARELASRGARVYIACRDVLKGESAASEIRVDTKNSQVLVRKLDLSDTKSIRAFAEGFLAEEKQLHILINNAGVMMCPYSKTADGFETHLGVNHLGHFLLTYLLLERLKVSAPARVVNVSSVAHHIGKIPFHDLQSEKRYSRGFAYCHSKLANVLFTRELAKRLQGTGVTTYAVHPGVVRSELVRHSSLLCLLWRLFSPFVKTAREGAQTSLHCALAEGLEPLSGKYFSDCKRTWVSPRARNNKTAERLWNVSCELLGIRWE

SEQ ID NO: 11282 - protein, 316 aa, Homo sapiens; identical to SEQ ID NO: 11281

SEQ ID NO: 11283 - protein, 42 aa, Homo sapiens
MEKCEAAAKDIRGETLNHHVNARHLDLASLKSIREFAAKIIE

SEQ ID NO: 11284 - protein, 260 aa, Homo sapiens
MEKCEAAAKDIRGETLNHHVNARHLDLASLKSIREFAAKIIEEEERVDILINNAGVMRCPHWTTEDGFEMQFGVNHLGHFLLTNLLLDKLKASAPSRIINLSSLAHVAGHIDFDDLNWQTRKYNTKAAYCQSKLAIVLFTKELSRRLQGSGVTVNALHPGVARTELGRHTGIHGSTFSSTTLGPIFWLLVKSPELAAQPSTYLAVAEELADVSGKYFDGLKQKAPAPEAEDEEVARRLWAESARLVGLEAPSVREQPLPR

SEQ ID NO: 11285 - protein, 260 aa, Homo sapiens; identical to SEQ ID NO: 11284

SEQ ID NO: 11286 - protein, 29 aa, Homo sapiens
MSRYLLPLSALGTVAGAAVLLKDYVTGGA

SEQ ID NO: 11287 - protein, 220 aa, Homo sapiens
MSRYLLPLSALGTVAGAAVLLKDYVTGGACPSKATIPGKTVIVTGANTGIGKQTALELARRGGNIILACRDMEKCEAAAKDIRGETLNHHVNARHLDLASLKSIREFAAKIIEEEERVDILINNAGVMRCPHWTTEDGFEMQFGVNHLGHFLLTNLLLDKLKASAPSRIINLSSLAHVAGHIDFDDLNWQTRKYNTKAAYCQSKLAIVLFTKELSRRLQG

SEQ ID NO: 11288 - protein, 220 aa, Homo sapiens; identical to SEQ ID NO: 11287

SEQ ID NO: 11289 - protein, 331 aa, Homo sapiens
MSRYLLPLSALGTVAGAAVLLKDYVTGGACPSKATIPGKTVIVTGANTGIGKQTALELARRGGNIILACRDMEKCEAAAKDIRGETLNHHVNARHLDLASLKSIREFAAKIIEEEERVDILINNAGVMRCPHWTTEDGFEMQFGVNHLGHFLLTNLLLDKLKASAPSRIINLSSLAHVAGHIDFDDLNWQTRKYNTKAAYCQSKLAIVLFTKELSRRLQGSGVTVNALHPGVARTELGRHTGIHGSTFSSTTLGPIFWLLVKSPELAAQPSTYLAVAEELADVSGKYFDGLKQKAPAPEAEDEEVARRLWAESARLVGLEAPSVREQPLPR

SEQ ID NO: 11290 - protein, 35 aa, Homo sapiens
MSRYLLPLSALGTVAGAAVLLKRQHHPGLPRHGEV

SEQ ID NO: 11291 - protein, 35 aa, Homo sapiens; identical to SEQ ID NO: 11290

SEQ ID NO: 11292 - protein, 55 aa, Homo sapiens
MHVKEAGLFGLVNNAGVAGIIGPTPWLTRDDFQRVLNVNTMGPIGVTLALLPLLQ

SEQ ID NO: 11293 - protein, 221 aa, Homo sapiens
MHVKEAGLFGLVNNAGVAGIIGPTPWLTRDDFQRVLNVNTMGPIGVTLALLPLLQQARGRVINITSVLGRLAANGGGYCVSKFGLEAFSDSLRRDVAHFGIRVSIVEPGFFRTPVTNLESLEKTLQACWARLPPATQAHYGGAFLTKYLKMQQRIMNLICDPDLTKVSRCLEHALTARHPRTRYSPGWDAKLLWLPASYLPASLVDAVLTWVLPKPAQAVY

SEQ ID NO: 11294 - protein, 318 aa, Homo sapiens
MWLPLLLGALLWAVLWLLRDRQSLPASNAFVFITGCDSGFGRLLALQLDQRGFRVLASCLTPSGAEDLQRVASSRLHTTLLDITDPQSVQQAAKWVEMHVKEAGLFGLVNNAGVAGIIGPTPWLTRDDFQRVLNVNTMGPIGVTLALLPLLQQARGRVINITSVLGRLAANGGGYCVSKFGLEAFSDSLRRDVAHFGIRVSIVEPGFFRTPVTNLESLEKTLQACWARLPPATQAHYGGAFLTKYLKMQQRIMNLICDPDLTKVSRCLEHALTARHPRTRYSPGWDAKLLWLPASYLPASLVDAVLTWVLPKPAQAVY

SEQ ID NO: 11295 - protein, 318 aa, Homo sapiens; identical to SEQ ID NO: 11294

SEQ ID NO: 11296 - protein, 103 aa, Homo sapiens
  SITE 1: note = misc_feature - Xaa can be any naturally occurring amino acid
XLLLGALLWAVLWLLRDRQSLPASNAFVFITGCDSGFGRLLALQLDQRGFRVLASCLTPSGAEDLQRVASSRLHTTLLDITDPQSVQQAAKWVEMHVKEAGGM

SEQ ID NO: 11297 - protein, 331 aa, Homo sapiens
MNGQSQVLPGGGHESREGINMAAAPRTVLISGCSSGIGLELAVQLAHDPKKRYQVVATMRDLGKKETLEAAAGEALGQTLTVAQLDVCSDESVAQCLSCIQGEVDVLVNNAGMGLVGPLEGLSLAAMQNVFDTNFFGAVRLVKAVLPGMKRRRQGHIVVISSVMGLQGVIFNDVYAASKFALEGFFESLAIQLLQFNIFISLVEPGPVVTEFEGKLLAQVSMAEFPGTDPETLHYFRDLYLPASRKLFCSVGQNPQDVVQAIVNVISSTRPPLRRQTNIRYSPLTTLKTVDSSGSLYVRTTHRLLFRCPRLLNLGLQCLSCGCLPTRVRPR

SEQ ID NO: 11298 - protein, 79 aa, Homo sapiens
  SITE 1: note = misc_feature - Xaa can be any naturally occurring amino acid
XFESLAIQLLQFNILFLWLSSQALTLRPCTTSGTSISQPPGSCFAPWDRTHRTWFRPLSTSSARLDHPCADRPTSATRR

SEQ ID NO: 11299 - protein, 166 aa, Homo sapiens
MAQTSSYFMLISCLMFLSQSQGQEAQTELPQARISCPEGTNAYRSYCYYFNEDRETWVDADLYCQNMNSGNLVSVLTQAEGAFVASLIKESGTDDFNVWIGLHDPKKNRRWHWSSGSLVSYKSWGIGAPSSVNPGYCVSLTSSTGFQKWKDVPCEDKFSFVCKFKN

SEQ ID NO: 11300 - protein, 149 aa, Homo sapiens
FNEDPETWVDADLYCQNMNSGNLVSVLTQAEGAFVASLIKESSTDDSNVWIGLHDPKKNRRWHWSSGSLVSYKSWDTGSPSSANAGYCASLTSCSGERQTIYPPVAISFPLISGDEHGDWDRGKDSRNGRMNLVRRSSPLFASSKTRGS

SEQ ID NO: 11301 - protein, 166 aa, Homo sapiens
MAQTNSFFMLISSLMFLSLSQGQESQTELPNPRISCPEGTNAYRSYCYYFNEDPETWVDADLYCQNMNSGNLVSVLTQAEGAFVASLIKESSTDDSNVWIGLHDPKKNRRWHWSSGSLVSYKSWDTGSPSSANAGYCASLTSCSGFKKWKDESCEKKFSFVCKFKN

SEQ ID NO: 11302 - protein, 175 aa, Homo sapiens
MLPPMALPSVSWMLLSCLMLLSQVQGEEPQRELPSARIRCPKGSKAYGSHCYALFLSPKSWTDADLACQKRPSGNLVSVLSGAEGSFVSSLVKSIGNSYSYVWIGLHDPTQGTEPNGEGWEWSSSDVMNYFAWERNPSTISSPGHCASLSRSTAFLRWKDYNCNVRLPYVCKFTD

SEQ ID NO: 11303 - protein, 175 aa, Homo sapiens; identical to SEQ ID NO: 11302

SEQ ID NO: 11304 - protein, 175 aa, Homo sapiens; identical to SEQ ID NO: 11302

SEQ ID NO: 11305 - protein, 129 aa, Homo sapiens
MLPPMALPSVSWMLLSCLILLCQVQGEETQKELPSPRISCPKGSKAYGSPCYALFLSPKSWMDADGSEPDGDGWEWSSTDVMNYFAWEKNPSTILNPGHCGSLSRSTGFLKWKDYNCDAKLPYVCKFKD

SEQ ID NO: 11306 - protein, 175 aa, Homo sapiens
MLPPMALPSVSWMLLSCLILLCQVQGEETQKELPSPRISCPKGSKAYGSPCYALFLSPKSWMDADLACQKRPSGKLVSVLSGAEGSFVSSLVRSISNSYSYIWIGLHDPTQGSEPDGDGWEWSSTDVMNYFAWEKNPSTILNPGHCGSLSRSTGFLKWKDYNCDAKLPYVCKFKD

SEQ ID NO: 11307 - protein, 175 aa, Homo sapiens; identical to SEQ ID NO: 11306

SEQ ID NO: 11308 - protein, 158 aa, Homo sapiens
MASRSMRLLLLLSCLAKTGVLGDIIMRPSCAPGWFYHKSNCYGYFRKLRNWSDAELECQSYGNGAHLASILSLKEASTIAEYISGYQRSQPIWIGLHDPQKRQQWQWIDGAMYLYRSWSGKSMGGNKHCAEMSSNNNFLTWSSNECNKRQHFLCKYRP

SEQ ID NO: 11309 - protein, 158 aa, Homo sapiens; identical to SEQ ID NO: 11308

SEQ ID NO: 11310 - protein, 103 aa, Homo sapiens
MASRSMRLLLLLSCLAKTGVLGDIIMRPSCAPGWFYHKSNCYGYFRKLRNWSDAELECQSYGNGAHLASILSLKEASTIAEYISGYQRSQPIWIGLHDPQKTF

SEQ ID NO: 11311 - protein, 134 aa, Homo sapiens
MASRSMRLLLLLSCLAKTGVLGDIIMRPSCAPGWFYHKSNCYGYFRKLRNWSDAEVRNLLPAWPGLSRAKDQPEPQISFDSGSSVLPGHYEEKPLWLVKWREEGCVFNSFNSVSIAEAGAVCQTLDGLQAHTDT

SEQ ID NO: 11312 - protein, 3458 aa, Homo sapiens
MERSGWARQTFLLALLLGATLRARAAAGYYPRFSPFFFLCTHHGELEGDGEQGEVLISLHIAGNPTYYVPGQEYHVTISTSTFFDGLLVTGLYTSTSVQASQSIGGSSAFGFGIMSDHQFGNQFMCSVVASHVSHLPTTNLSFIWIAPPAGTGCVNFMATATHRGQVIFKDALAQQLCEQGAPTDVTVHPHLAEIHSDSIILRDDFDSYHQLQLNPNIWVECNNCETGEQCGAIMHGNAVTFCEPYGPRELITTGLNTTTASVLQFSIGSGSCRFSYSDPSIIVLYAKNNSADWIQLEKIRAPSNVSTIIHILYLPEDAKGENVQFQWKQENLRVGEVYEACWALDNILIINSAHRQVVLEDSLDPVDTGNWLFFPGATVKHSCQSDGNSIYFHGNEGSEFNFATTRDVDLSTEDIQEQWSEEFESQPTGWDVLGAVIGTECGTIESGLSMVFLKDGERKLCTPSMDTTGYGNLRFYFVMGGICDPGNSHENDIILYAKIEGRKEHITLDTLSYSSYKVPSLVSVVINPELQTPATKFCLRQKNHQGHNRNVWAVDFFHVLPVLPSTMSHMIQFSINLGCGTHQPGNSVSLEFSTNHGRSWSLLHTECLPEICAGPHLPHSTVYSSENYSGWNRITIPLPNAALTRNTRIRWRQTGPILGNMWAIDNVYIGPSCLKFCSGRGQCTRHGCKCDPGFSGPACEMASQTFPMFISESFGSSRLSSYHNFYSIRGAEVSFGCGVLASGKALVFNKDGRRQLITSFLDSSQSRFLQFTLRLGSKSVLSTCRAPDQPGEGVLLHYSYDNGITWKLLEHYSYLSYHEPRIISVELPGDAKQFGIQFRWWQPYHSSQREDVWAIDEIIMTSVLFNSISLDFTNLVEVTQSLGFYLGNVQPYCGHDWTLCFTGDSKLASSMRYVETQSMQIGASYMIQFSLVMGCGQKYTPHMDNQVKLEYSTNHGLTWHLVQEECLPSMPSCQEFTSASIYHASEFTQWRRVIVLLPQKTWSSATRFRWSQSYYTAQDEWALDSIYIGQQCPNMCSGHGSCDHGICRCDQGYQGTECHPEAALPSTIMSDFENQNGWESDWQEVIGGEIVKPEQGCGVISSGSSLYFSKAGKRQLVSWDLDTSWVDFVQFYIQIGGESASCNKPDSREEGVLLQYSNNGGIQWHLLAEMYFSDFSKPRFVYLELPAAAKTPCTRFRWWQPVFSGEDYDQWAVDDIIILSEKQKQIIPVINPTLPQNFYEKPAFDYPMNQMSVWLMLANEGMVKNETFCAATPSAMIFGKSDGDRFAVTRDLTLKPGYVLQFKLNIGCANQFSSTAPVLLQYSHDAGMSWFLVKEGCYPASAGKGCEGNSRELSEPTMYHTGDFEEWTRITIVIPRSLASSKTRFRWIQESSSQKNVPPFGLDGVYISEPCPSYCSGHGDCISGVCFCDLGYTAAQGTCVSNVPNHNEMFDRFEGKLSPLWYKITGAQVGTGCGTLNDGKSLYFNGPGKREARTVPLDTRNIRLVQFYIQIGSKTSGITCIKPRTRNEGLIVQYSNDNGILWHLLRELDFMSFLEPQIISIDLPQDAKTPATAFRWWQPQHGKHSAQWALDDVLIGMNDSSQTGFQDKFDGSIDLQANWYRIQGGQVDIDCLSMDTALIFTENIGKPRYAETWDFHVSASTFLQFEMSMGCSKPFSNSHSVQLQYSLNNGKDWHLVTEECVPPTIGCLHYTESSIYTSERFQNWKRITVYLPLSTISPRTRFRWIQANYTVGADSWAIDNVVLASGCPWMCSGRGICDAGRCVCDRGFGGPYCVPVVPLPSILKDDFNGNLHPDLWPEVYGAERGNLNGETIKSGTSLIFKGEGLRMLISRDLDCTNTMYVQFSLRFIAKSTPERSHSILLQFSISGGITWHLMDEFYFPQTTNILFINVPLPYTAQTNATRFRLWQPYNNGKKEEIWIVDDFIIDGNNVNNPVMLLDTFDFGPREDNWFFYPGGNIGLYCPYSSKGAPEEDSAMVFVSNEVGEHSITTRDLNVNENTIIQFEINVGCSTDSSSADPVRLEFSRDFGATWHLLLPLCYHSSSHVSSLCSTEHHPSSTYYAGTMQGWRREVVHFGKLHLCGSVRFRWYQGFYPAGSQPVTWAIDNVYIGPQCEEMCNGQGSCINGTKCICDPGYSGPTCKISTKNPDFLKDDFEGQLESDRFLLMSGGKPSRKCGILSSGNNLFFNEDGLRMLMTRDLDLSHARFVQFFMRLGCGKGVPDPRSQPVLLQYSLNGGLSWSLLQEFLFSNSSNVGRYIALEIPLKARSGSTRLRWWQPSENGHFYSPWVIDQILIGGNISGNTVLEDDFTTLDSRKWLLHPGGTKMPVCGSTGDALVFIEKASTRYVVSTDVAVNEDSFLQIDFAASCSVTDSCYAIELEYSVDLGLSWHPLVRDCLPTNVECSRYHLQRILVSDTFNKWTRITLPLPPYTRSQATRFRWHQPAPFDKQQTWAIDNVYIGDGCIDMCSGHGRCIQGNCVCDEQWGGLYCDDPETSLPTQLKDNFNRAPSSQNWLTVNGGKLSTVCGAVASGMALHFSGGCSRLLVTVDLNLTNAEFIQFYFMYGCLITPNNRNQGVLLEYSVNGGITWNLLMEIFYDQYSKPGFVNILLPPDAKEIATRFRWWQPRHDGLDQNDWAIDNVLISGSADQRTVMLDTFSSAPVPQHERSPADAGPVGRIAFDMFMEDKTSVNEHWLFHDDCTVERFCDSPDGVMLCGSHDGREVYAVTHDLTPTEGWIMQFKISVGCKVSEKIAQNQIHVQYSTDFGVSWNYLVPQCLPADPKCSGSVSQPSVFFPTKGWKRITYPLPESLVGNPVRFRFYQKYSDMQWAIDNFYLGPGCLDNCRGHGDCLREQCICDPGYSGPNCYLTHTLKTFLKERFDSEEIKPDLWMSLEGGSTCTECGILAEDTALYFGGSTVRQAVTQDLDLRGAKFLQYWGRIGSENNMTSCHRPICRKEGVLLDYSTDGGITWTLLHEMDYQKYISVRHDYILLPEDALTNTTRLRWWQPFVISNGIVVSGVERAQWALDNILIGGAEINPSQLVDTFDDEGTSHEENWSFYPNAVRTAGFCGNPSFHLYWPNKKKDKTHNALSSRELIIQPGYMMQFKIVVGCEATSCGDLHSVMLEYTKDARSDSWQLVQTQCLPSSSNSIGCSPFQFHEATIYNSVNSSSWKRITIQLPDHVSSSATQFRWIQKGEETEKQSWAIDHVYIGEACPKLCSGHGYCTTGAICICDESFQGDDCSVFSHDLPSYIKDNFESARVTEANWETIQGGVIGSGCGQLAPYAHGDSLYFNGCQIRQAATKPLDLTRASKIMFVLQIGSMSQTDSCNSDLSGPHAVDKAVLLQYSVNNGITWHVIAQHQPKDFTQAQRVSYNVPLEARMKGVLLRWWQPRHNGTGHDQWALDHVEVVLTRKQNYMMNFSRQHGLRHFYNRRRRSLRRYP

SEQ ID NO: 11313 - protein, 3460 aa, Homo sapiens [sequence omitted]

SEQ ID NO: 11314 - protein, 3460 aa, Homo sapiens
MERSGWARQTFLLALLLGATLRARAAAGYYPRFSPFFFLCTHHGELEGDGEQGEVLISLHIAGNPTYYVPGQEYHVTISTSTFFDGLLVTGLYTSTSVQASQSIGGSSAFGFGIMSDHQFGNQFMCSVVASHVSHLPTTNLSFIWIAPPAGTGCVNFMATATHRGQVIFKDALAQQLCEQGAPTDVTVHPHLAEIHSDSIILRDDFDSYHQLQLNPNIWVECNNCETGEQCGAIMHGNAVTFCEPYGPRELITTGLNTTTASVLQFSIGSGSCRFSYSDPSIIVLYAKNNSADWIQLEKIRAPSNVSTIIHILYLPEDAKGENVQFQWKQENLRVGEVYEACWALDNILIINSAHRQVVLEDSLDPVDTGNWLFFPGATVKHSCQSDGNSIYFHGNEGSEFNFATTRDVDLSTEDIQEQWSEEFESQPTGWDVLGAVIGTECGTIESGLSMVFLKDGERKLCTPSMDTTGYGNLRFYFVMGGICDPGNSHENDIILYAKIEGRKEHITLDTLSYSSYKVPSLVSVVINPELQTPATKFCLRQKNHQGHNRNVWAVDFFHVLPVLPSTMSHMIQFSINLGCGTHQPGNSVSLEFSTNHGRSWSLLHTECLPEICAGPHLPHSTVYSSENYSGWNRITIPLPNAALTRNTRIRWRQTGPILGNMWAIDNVYIGPSCLKFCSGRGQCTRHGCKCDPGFSGPACEMASQTFPMFISESFGSSRLSSYHNFYSIRGAEVSFGCGVLASGKALVFNKDGRRQLITSFLDSSQSRFLQFTLRLGSKSVLSTCRAPDQPGEGVLLHYSYDNGITWKLLEHYSYLSYHEPRIISVELPGDAKQFGIQFRWWQPYHSSQREDVWAIDEIIMTSVLFNSISLDFTNLVEVTQSLGFYLGNVQPYCGHDWTLCFTGDSKLASSMRYVETQSMQIGASYMIQFSLVMGCGQKYTPHMDNQVKLEYSTNHGLTWHLVQEECLPSMPSCQEFTSASIYHASEFTQWRRVIVLLPQKTWSSATRFRWSQSYYTAQDEWALDSIYIGQQCPNMCSGHGSCDHGICRCDQGYQGTECHPEAALPSTIMSDFENQNGWESDWQEVIGGEIVKPEQGCGVISSGSSLYFSKAGKRQLVSWDLDTSWVDFVQFYIQIGGESASCNKPDSREEGVLLQYSNNGGIQWHLLAEMYFSDFSKPRFVYLELPAAAKTPCTRFRWWQPVFSGEDYDQWAVDDIIILSEKQKQIIPVINPTLPQNFYEKPAFDYPMNQMSVWLMLANEGMVKNETFCAATPSAMIFGKSDGDRFAVTRDLTLKPGYVLQFKLNIGCANQFSSTAPVLLQYSHDAGMSWFLVKEGCYPASAGKGCEGNSRELSEPTMYHTGDFEEWTRITIVIPRSLASSKTRFRWIQESSSQKNVPPFGLDGVYISEPCPSYCSGHGDCISGVCFCDLGYTAAQGTCVSNVPNHNEMFDRFEGKLSPLWYKITGAQVGTGCGTLNDGKSLYFNGPGKREARTVPLDTRNIRLVQFYIQIGSKTSGITCIKPRTRNEGLIVQYSNDNGILWHLLRELDFMSFLEPQIISIDLPQDAKTPATAFRWWQPQHGKHSAQWALDDVLIGMNDSSQTGFQDKFDGSIDLQANWYRIQGGQVDIDCLSMDTALIFTENIGKPRYAETWDFHVSASTFLQFEMSMGCSKPFSNSHSVQLQYSLNNGKDWHLVTEECVPPTIGCLHYTESSIYTSERFQNWKRITVYLPLSTISPRTRFRWIQANYTVGADSWAIDNVVLASGCPWMCSGRGICDAGRCVCDRGFGGPYCVPVVPLPSILKDDFNGNLHPDLWPEVYGAERGNLNGETIKSGTSLIFKGEGLRMLISRDLDCTNTMYVQFSLRFIAKSTPERSHSILLQFSISGGITWHLMDEFYFPQTTNILFINVPLPYTAQTNATRFRLWQPYNNGKKEEIWIVDDFIIDGNNVNNPVMLLDTFDFGPREDNWFFYPGGNIGLYCPYSSKGAPEEDSAMVFVSNEVGEHSITTRDLNVNENTIIQFEINVGCSTDSSSADPVRLEFSRDFGATWHLLLPLCYHSSSHVSSLCSTEHHPSSTYYAGTMQGWRREVVHFGKLHLCGSVRFRWYQGFYPAGSQPVTWAIDNVYIGPQCEEMCNGQGSCINGTKCICDPGYSGPTCKISTKNPDFLKDDFEGQLESDRFLLMSGGKPSRKCGILSSGNNLFFNEDGLRMLMTRDLDLSHARFVQFFMRLGCGKGVPDPRSQPVLLQYSLNGGLSWSLLQEFLFSNSSNVGRYIALEIPLKARSGSTRLRWWQPSENGHFYSPWVIDQILIGGNISGNTVLEDDFTTLDSRKWLLHPGGTKMPVCGSTGDALVFIEKASTRYVVSTDVAVNEDSFLQIDFAASCSVTDSCYAIELEYSVDLGLSWHPLVRDCLPTNVECSRYHLQRILVSDTFNKWTRITLPLPPYTRSQATRFRWHQPAPFDKQQTWAIDNVYIGDGCIDMCSGHGRCIQGNCVCDEQWGGLYCDDPETSLPTQLKDNFNRAPSSQNWLTVNGGKLSTVCGAVASGMALHFSGGCSRLLVTVDLNLTNAEFIQFYFMYGCLITPNNRNQGVLLEYSVNGGITWNLLMEIFYDQYSKPGFVNILLPPDAKEIATRFRWWQPRHDGLDQNDWAIDNVLISGSADQRTVMLDTFSSAPVPQHERSPADAGPVGRIAFDMFMEDKTSVNEHWLFHDDCTVERFCDSPDGVMLCGSHDGREVYAVTHDLTPTEGWIMQFKISVGCKVSEKIAQNQIHVQYSTDFGVSWNYLVPQCLPADPKCSGSVSQPSVFFPTKGWKRITYPLPESLVGNPVRFRFYQKYSDMQWAIDNFYLGPGCLDNCRGHGDCLREQCICDPGYSGPNCYLTHTLKTFLKERFDSEEIKPDLWMSLEGGSTCTECGILAEDTALYFGGSTVRQAVTQDLDLRGAKFLQYWGRIGSENNMTSCHRPICRKEGVLLDYSTDGGITWTLLHEMDYQKYISVRHDYILLPEDALTNTTRLRWWQPFVISNGIVVSGVERAQWALDNILIGGAEINPSQLVDTFDDEGTSHEENWSFYPNAVRTAGFCGNPSFHLYWPNKKKDKTHNALSSRELIIQPGYMMQFKIVVGCEATSCGDLHSVMLEYTKDARSDSWQLVQTQCLPSSSNSIGCSPFQFHEATIYNSVNSSSWKRITIQLPDHVSSSATQFRWIQKGEETEKQSWAIDHVYIGEACPKLCSGHGYCTTGAICICDESFQGDDCSVFSHDLPSYIKDNFESARVTEANWETIQGGVIGSGCGQLAPYAHGDSLYFNGCQIRQAATKPLDLTRASKIMFVLQIGSMSQTDSCNSDLSGPHAVDKAVLLQYSVNNGITWHVIAQHQPKDFTQAQRVSYNVPLEARMKGVLLRWWQPRHNGTGHDQWALDHVEVVLVSTRKQNYMMNFSRQHGLRHFYNRRRRSLRRYP

SEQ ID NO: 11315 - protein, 68 aa, Homo sapiens
  SITE 1: note = misc_feature - Xaa can be any naturally occurring amino acid
XLRWWQPRHNGTGHDQWALDHVEVVLDEKSYIASKPDQTFMTNHSAACIERHFLTCVIFHYLLSLVFH

SEQ ID NO: 11316 - protein, 103 aa, Homo sapiens
MKPSLLCRPLSCFLMLLPWPLATLTSTTLWQCPPGEEPDLDPGQGTLCRPCPPGTFSAAWGSSPCQPHARCSLWRRLEAQVGMATRDTLCGDCWPGNQPCLPD

SEQ ID NO: 11317 - protein, 101 aa, Homo sapiens
MKPSLLCRPLSCFLMLLPWPLATLTSTTLWQCPPGEEPDLDPGQGTLCRPCPPGTFSAAWGSSPCQPHARCSLWRRLEAQVGMATRDTLCGDCWPGWFGPW

SEQ ID NO: 11318 - protein, 430 aa, Homo sapiens
MKPSLLCRPLSCFLMLLPWPLATLTSTTLWQCPPGEEPDLDPGQGTLCRPCPPGTFSAAWGSSPCQPHARCSLWRRLEAQVGMATRDTLCGDCWPGWFGPWGVPRVPCQPCSWAPLGTHGCDEWGRRARRGVEVAAGASSGGETRQPGNGTRAGGPEETAAQYAVIAIVPVFCLMGLLGILVCNLLKRKGYHCTAHKEVGPGPGGGGSGINPAYRTEDANEDTIGVLVRLITEKKENAAALEELLKEYHSKQLVQTSHRPVSKLPPAPPNVPHICPHRHHLHTVQGLASLSGPCCSRCSQKKWPEVLLSPEAVAATTPVPSLLPNPTRVPKAGAKAGRQGEITILSVGRFRVARIPEQRTSSMVSEVKTITEAGPSWGDLPDSPQPGLPPEQQALLGSGGSRTKWLKPPAENKAEENRYVVRLSESNLVI

SEQ ID NO: 11319 - protein, 430 aa, Homo sapiens; identical to SEQ ID NO: 11318

SEQ ID NO: 11320 - protein, 406 aa, Homo sapiens
MDGWRRMPRWGLLLLLWGSCTFGLPTDTTTFKRIFLKRMPSIRESLKERGVDMARLGPEWSQPMKRLTLGNTTSSVILTNYMDTQYYGEIGIGTPPQTFKVVFDTGSSNVWVPSSKCSRLYTACVYHKLFDASDSSSYKHNGTELTLRYSTGTVSGFLSQDIITVGGITVTQMFGEVTEMPALPFMLAEFDGVVGMGFIEQAIGRVTPIFDNIISQGVLKEDVFSFYYNRDSENSQSLGGQIVLGGSDPQHYEGNFHYINLIKTGVWQIQMKGVSVGSSTLLCEDGCLALVDTGASYISGSTSSIEKLMEALGAKKRLFDYVVKCNEGPTLPDISFHLGGKEYTLTSADYVFQESYSSKKLCTLAIHAMDIPPPTGPTWALGATFIRKFYTEFDRRNNRIGFALAR

SEQ ID NO: 11321 - protein, 368 aa, Homo sapiens
MPSIRESLKERGVDMARLGPEWSQPMKRLTLGNTTSSVILTNYMDTQYYGEIGIGTPPQTFKVVFDTGSSNVWVPSSKCSRLYTACVYHKLFDASDSSSYKHNGTELTLRYSTGTVSGFLSQDIITVGGITVTQMFGEVTEMPALPFMLAEFDGVVGMGFIEQAIGRVTPIFDNIISQGVLKEDVFSFYYNRDSENSQSLGGQIVLGGSDPQHYEGNFHYINLIKTGVWQIQMKGVSVGSSTLLCEDGCLALVDTGASYISGSTSSIEKLMEALGAKKRLFDYVVKCNEGPTLPDISFHLGGKEYTLTSADYVFQESYSSKKLCTLAIHAMDIPPPTGPTWALGATFIRKFYTEFDRRNNRIGFALAR

SEQ ID NO: 11322 - protein, 394 aa, Homo sapiens
MDGRRVPAQPAAEFSLTPGGYRSVGRSRRCSRGSIPRNIPKRSWKKPHPQLCSLQAEEEPMLERRCRGPLAMGLAQPRLLSGPSQESPQTLGKESRGLRQQGTSVAQSGAQAPGRAHRCAHCRRHFPGWVALWLHTRRCQARLPLPCPECGRRFRHAPFLALHRQVHAAATPDLGFACHLCGQSFRGWVALVLHLRAHSAAKRPIACPKCERRFWRRKQLRAHLRRCHPPAPEARPFICGNCGRSFAQWDQLVAHKRVHVAEALEEAAAKALGPRPRGRPAVTAPRPGGDAVDRPFQCACCGKRFRHKPNLIAHRRVHTGERPHQCPECGKRFTNKPYLTSHRRIHTGEKPYPCKECGRRFRHKPNLLSHSKIHKRSEGSAQAAPGPGSPQLPA

SEQ ID NO: 11323 - protein, 366 aa, Homo sapiens
MDGRRVPAQPAAEFSLTPGGYRSVGRSRRCSRGSIPRNIPKRSWKKPHPQLCSLQEEEPMLERRCRGPLAMGLAQPRLLSGPSQESPQTLGKESRGLRQQGTSVAQSGAQAPGRAHRCAHCRRHFPGWVALWLHTRRCQARLPLPCPECGRRFRHAPFLALHRQVHAAATPDLGFACHLCGQSFRGWVALVLHLRAHSAAKRPIACPKCERRFWRRKQLRAHLRRCHPPAPEARPFICGNCGRSFAQWDQLVAHKRVHVAEALEEAAAKALGPRPRGRPAVTAPRPGGDAVDRPFQCACCGKRFRHKPNLIAHRRVHTGERPHQCPECGKRFTNKPYLTSHRRIHTGEKPYPCKECGRRFRHKPNL

SEQ ID NO: 11324 - protein, 55 aa, Homo sapiens
MDGRRVPAQPAAEQRKNRCWNVVAGAPWPWAWPSPDSFLGPPRSHPRPWGRSPAG

SEQ ID NO: 11325 - protein, 47 aa, Homo sapiens
MDGRRVPAQPAAEVRPGQGRGATAGPRGAAPPAGRVTVRLASLQSEV

SEQ ID NO: 11326 - protein, 47 aa, Homo sapiens; identical to SEQ ID NO: 11325

SEQ ID NO: 11327 - protein, 136 aa, Homo sapiens
MDGRRVPAQPAAEVRPGQGRGATAGPRGAAPPAGRVTVSVRDRVRGRTDAGTSLQGPPGHGPGPAPTPFWALPGVTPDPGEGVPRAEATRHVSGPVWCPSPRQGPSLCPLSKALPWLGGSVASHPPVPGPAALALP

SEQ ID NO: 11328 - protein, 624 aa, Homo sapiens
MGIGVSLLLQFSLTPGGYRSVGRSRRCSRGSIPRNIPKRSWKKPHPQLCSLQAEEEPMLERRCRGPLAMGLAQPRLLSGPSQESPQTLGKESRGLRQQGTSVAQSGAQAPGRAHRCAHCRRHFPGWVALWLHTRRCQARLPLPCPECGRRFRHAPFLALHRQVHAAATPDLGFACHLCGQSFRGWVALVLHLRAHSAAKRPIACPKCERRFWRRKQLRAHLRRCHPPAPEARPFICGNCGRSFAQWDQLVAHKRVHVAEALEEAAAKALGPRPRGRPAVTAPRPGGDAVDRPFQCACCGKRFRHKPNLIAHRRVHTGERPHQCPECGKRFTNKPYLTSHRRIHTGEKPYPCKECGRRFRHKPNLLSHSKIHKRSEGSAQAAPGPGSPQLPAGPQESAAEPTPAVPLKPAQEPPPGAPPEHPQDPIEAPPSLYSCDDCGRSFRLERFLRAHQRQHTGERPFTCAECGKNFGKKTHLVAHSRVHSGERPFACEECGRRFSQGSHLAAHRRDHAPDRPFVCPDCGKAFRHKPYLAAHRRIHTGEKPYVCPDCGKAFSQKSNLVSHRRIHTGERPYACPDCDRSFSQKSNLITHRKSHIRDGAFCCAICGQTFDDEERLLAHQKKHDV

SEQ ID NO: 11329 - protein, 87 aa, Homo sapiens
MGIGVSLLLQFSLTPGGYRSVGRSRRCSRGSIPRNIPKRSWKKPHPQLCSLQGLVIFDVSQLLHLLNRELSVCLSSFSELLCSSDVA

SEQ ID NO: 11330 - protein, 136 aa, Homo sapiens
MGIGVSLLLQFSLTPGGYRSVGRSRRCSRGSIPRNIPKRSWKKPHPQLCSLQGSSVSVCPASQSCCAARMWHRKQQTQGEGSIRHCREQWPHFLQRKNRCWNVVAGAPWPWAWPSPDSFLGPPRSHPRPWGRSPAG

SEQ ID NO: 11331 - protein, 136 aa, Homo sapiens; identical to SEQ ID NO: 11330

SEQ ID NO: 11332 - protein, 146 aa, Homo sapiens
MLERRCRGPLAMGLAQPRLLSGPSQESPQTLGKESRGLRQQGTSVAQSGAQAPGRAHRCAHCRRHFPGWVALWLHTRRCQARLPLPCPECGRRFRHAPFLALHRQVHAAATPDLGFACHLCGQSFRGWVALVLHLRAHSAAKRPIA

SEQ ID NO: 11333 - protein, 567 aa, Homo sapiens
MLERRCRGPLAMGLAQPRLLSGPSQESPQTLGKESRGLRQQGTSVAQSGAQAPGRAHRCAHCRRHFPGWVALWLHTRRCQARLPLPCPECGRRFRHAPFLALHRQVHAAATPDLGFACHLCGQSFRGWVALVLHLRAHSAAKRPIACPKCERRFWRRKQLRAHLRRCHPPAPEARPFICGNCGRSFAQWDQLVAHKRVHVAEALEEAAAKALGPRPRGRPAVTAPRPGGDAVDRPFQCACCGKRFRHKPNLIAHRRVHTGERPHQCPECGKRFTNKPYLTSHRRIHTGEKPYPCKECGRRFRHKPNLLSHSKIHKRSEGSAQAAPGPGSPQLPAGPQESAAEPTPAVPLKPAQEPPPGAPPEHPQDPIEAPPSLYSCDDCGRSFRLERFLRAHQRQHTGERPFTCAECGKNFGKKTHLVAHSRVHSGERPFACEECGRRFSQGSHLAAHRRDHAPDRPFVCPDCGKAFRHKPYLAAHRRIHTGEKPYVCPDCGKAFSQKSNLVSHRRIHTGERPYACPDCDRSFSQKSNLITHRKSHIRDGAFCCAICGQTFDDEERLLAHQKKHDV

SEQ ID NO: 11334 - protein, 567 aa, Homo sapiens; identical to SEQ ID NO: 11333

SEQ ID NO: 11335 - protein, 567 aa, Homo sapiens; identical to SEQ ID NO: 11333

SEQ ID NO: 11336 - protein, 659 aa, Homo sapiens
MEAAAAAAAAAAAAAAAGGGCGSGPPPLLLSEGEQQCYSELFARCAGAAGGGPGSGPPEAARVAPGTATAAAGPVADLFRASQLPAETLHQITELCGAKRVGYFGPTQFYIALKLIAAAQSGLPVRIESIKCELPLPRFMMSKNDGEIRFGNPAELHGTKVQIPYLTTEKNSFKRMDDEDKQETQSPTMSPLASPPSSPPHYQRVPLSHGYSKLRSSAEQMHPAPYEARQPLVQPEGSSSGGPGTKPLRHQASLIRSFSVERELQDNSSYPDEPWRITEEQREYYVNQFRSLQPDPSSFISGSVAKNFFTKSKLSIPELSYIWELSDADCDGALTLPEFCAAFHLIVARKNGYPLPEGLPPTLQPEYLQAAFPKPKWDCQLFDSYSESLPANQQPRDLNRMEKTSVKDMADLPVPNQDVTSDDKQALKSTINEALPKDVSEDPATPKDSNSLKARPRSRSYSSTSIEEAMKRGEDPPTPPPRPQKTHSRASSLDLNKVFQPSVPATKSGLLPPPPALPPRPCPSQSEQVSEAELLPQLSRAPSQAAESSPAKKDVLYSQPPSKPIRRKFRPENQATENQEPSTAASGPASAATMKPHPTVQKQSSKQKKAIQTAIRKNKEANAVLARLNSELQQQLKEVHQERIALENQLEQLRPVTVL

SEQ ID NO: 11337 - protein, 660 aa, Homo sapiens
MEAAAAAAAAAAAAAAAGGGCGSGPPPLLLSEGEQQCYSELFARCAGAAGGGPGSGPPEAARVAPGTATAAAGPVADLFRASQLPAETLHQITELCGAKRVGYFGPTQFYIALKLIAAAQSGLPVRIESIKCELPLPRFMMSKNDGEIRFGNPAELHGTKVQIPYLTTEKNSFKRMDDEDKQQETQSPTMSPLASPPSSPPHYQRVPLSHGYSKLRSSAEQMHPAPYEARQPLVQPEGSSSGGPGTKPLRHQASLIRSFSVERELQDNSSYPDEPWRITEEQREYYVNQFRSLQPDPSSFISGSVAKNFFTKSKLSIPELSYIWELSDADCDGALTLPEFCAAFHLIVARKNGYPLPEGLPPTLQPEYLQAAFPKPKWDCQLFDSYSESLPANQQPRDLNRMEKTSVKDMADLPVPNQDVTSDDKQALKSTINEALPKDVSEDPATPKDSNSLKARPRSRSYSSTSIEEAMKRGEDPPTPPPRPQKTHSRASSLDLNKVFQPSVPATKSGLLPPPPALPPRPCPSQSEQVSEAELLPQLSRAPSQAAESSPAKKDVLYSQPPSKPIRRKFRPENQATENQEPSTAASGPASAATMKPHPTVQKQSSKQKKAIQTAIRKNKEANAVLARLNSELQQQLKEVHQERIALENQLEQLRPVTVL

SEQ ID NO: 11338 - protein, 181 aa, Homo sapiens
MAKATSGAAGLRLLLLLLLPLLGKDVAEEAGCPLSCAVSKRRLECEECGGLGSPTGRCEWRQGDGKGITRNFSTCSPSTKTCPDGHCDVVETQDINICPQDCLRGSIVGGHEPGEPRGIKAGYGTCNCFPEEEKCFCEPEDIQDPLCDELCRTVIAAAVLFSFIVSVLLSAFCIHCYHKFA

SEQ ID NO: 11339 - protein, 1114 aa, Homo sapiens
MAKATSGAAGLRLLLLLLLPLLGKVALGLYFSRDAYWEKLYVDQAAGTPLLYVHALRDAPEEVPSFRLGQHLYGTYRTRLHENNWICIQEDTGLLYLNRSLDHSSWEKLSVRNRGFPLLTVYLKVFLSPTSLREGECQWPGCARVYFSFFNTSFPACSSLKPRELCFPETRPSFRIRENRPPGTFHQFRLLPVQFLCPNISVAYRLLEGEGLPFRCAPDSLEVSTRWALDREQREKYELVAVCTVHAGAREEVVMVPFPVTVYDEDDSAPTFPAGVDTASAVVEFKRKEDTVVATLRVFDADVVPASGELVRRYTSTLLPGDTWAQQTFRVEHWPNETSVQANGSFVRATVHDYRLVLNRNLSISENRTMQLAVLVNDSDFQGPGAGVLLLHFNVSVLPVSLHLPSTYSLSVSRRARRFAQIGKVCVENCQAFSGINVQYKLHSSGANCSTLGVVTSAEDTSGILFVNDTKALRRPKCAELHYMVVATDQQTSRQAQAQLLVTVEGSYVAEEAGCPLSCAVSKRRLECEECGGLGSPTGRCEWRQGDGKGITRNFSTCSPSTKTCPDGHCDVVETQDINICPQDCLRGSIVGGHEPGEPRGIKAGYGTCNCFPEEEKCFCEPEDIQDPLCDELCRTVIAAAVLFSFIVSVLLSAFCIHCYHKFAHKPPISSAEMTFRRPAQAFPVSYSSSGARRPSLDSMENQVSVDAFKILEDPKWEFPRKNLVLGKTLGEGEFGKVVKATAFHLKGRAGYTTVAVKMLKENASPSELRDLLSEFNVLKQVNHPHVIKLYGACSQDGPLLLIVEYAKYGSLRGFLRESRKVGPGYLGSGGSRNSSSLDHPDERALTMGDLISFAWQISQGMQYLAEMKLVHRDLAARNILVAEGRKMKISDFGLSRDVYEEDSYVKRSQGRIPVKWMAIESLFDHIYTTQSDVWSFGVLLWEIVTLGGNPYPGIPPERLFNLLKTGHRMERPDNCSEEMYRLMLQCWKQEPDKRPVFADISKDLEKMMVKRRDYLDLAASTPSDSLIYDDGLSEEETPLVDCNNAPLPRALPSTWIENKLYGMSDPNWPGESPVPLTRADGTNTGFPRYPNDSVYANWMLSPSAAKLMDTFDS

SEQ ID NO: 11340 - protein, 1072 aa, Homo sapiens
MAKATSGAAGLRLLLLLLLPLLGKVALGLYFSRDAYWEKLYVDQAAGTPLLYVHALRDAPEEVPSFRLGQHLYGTYRTRLHENNWICIQEDTGLLYLNRSLDHSSWEKLSVRNRGFPLLTVYLKVFLSPTSLREGECQWPGCARVYFSFFNTSFPACSSLKPRELCFPETRPSFRIRENRPPGTFHQFRLLPVQFLCPNISVAYRLLEGEGLPFRCAPDSLEVSTRWALDREQREKYELVAVCTVHAGAREEVVMVPFPVTVYDEDDSAPTFPAGVDTASAVVEFKRKEDTVVATLRVFDADVVPASGELVRRYTSTLLPGDTWAQQTFRVEHWPNETSVQANGSFVRATVHDYRLVLNRNLSISENRTMQLAVLVNDSDFQGPGAGVLLLHFNVSVLPVSLHLPSTYSLSVSRRARRFAQIGKVCVENCQAFSGINVQYKLHSSGANCSTLGVVTSAEDTSGILFVNDTKALRRPKCAELHYMVVATDQQTSRQAQAQLLVTVEGSYVAEEAGCPLSCAVSKRRLECEECGGLGSPTGRCEWRQGDGKGITRNFSTCSPSTKTCPDGHCDVVETQDINICPQDCLRGSIVGGHEPGEPRGIKAGYGTCNCFPEEEKCFCEPEDIQDPLCDELCRTVIAAAVLFSFIVSVLLSAFCIHCYHKFAHKPPISSAEMTFRRPAQAFPVSYSSSGARRPSLDSMENQVSVDAFKILEDPKWEFPRKNLVLGKTLGEGEFGKVVKATAFHLKGRAGYTTVAVKMLKENASPSELRDLLSEFNVLKQVNHPHVIKLYGACSQDGPLLLIVEYAKYGSLRGFLRESRKVGPGYLGSGGSRNSSSLDHPDERALTMGDLISFAWQISQGMQYLAEMKLVHRDLAARNILVAEGRKMKISDFGLSRDVYEEDSYVKRSQGRIPVKWMAIESLFDHIYTTQSDVWSFGVLLWEIVTLGGNPYPGIPPERLFNLLKTGHRMERPDNCSEEMYRLMLQCWKQEPDKRPVFADISKDLEKMMVKRRDYLDLAASTPSDSLIYDDGLSEEETPLVDCNNAPLPRALPSTWIENKLYGRISHAFTRF

SEQ ID NO: 11341 - protein, 458 aa, Homo sapiens
MAKATSGAAGLRLLLLLLLPLLGKVALGLYFSRDAYWEKLYVDQAAGTPLLYVHALRDAPEEVPSFRLGQHLYGTYRTRLHENNWICIQEDTGLLYLNRSLDHSSWEKLSVRNRGFPLLTVYLKVFLSPTSLREGECQWPGCARVYFSFFNTSFPACSSLKPRELCFPETRPSFRIRENRPPGTFHQFRLLPVQFLCPNISVAYRLLEGEGLPFRCAPDSLEVSTRWALDREQREKYELVAVCTVHAGAREEVVMVPFPVTVYDEDDSAPTFPAGVDTASAVVEFKRKEDTVVATLRVFDADVVPASGELVRRYTSTLLPGDTWAQQTFRVEHWPNETSVQANGSFVRATVHDYRLVLNRNLSISENRTMQLAVLVNDSDFQGPGAGVLLLHFNVSVLPVSLHLPSTYSLSVSRRARRFAQIGKVCVENCLADLTGDAVSGRDEARSSGLGSQKHPGS

SEQ ID NO: 11342 - protein, 114 aa, Homo sapiens
  SITE 1: note = misc_feature - Xaa can be any naturally occurring amino acid
XDAYWEKLYVDQAAGTPLLYVHALRDAPEEVPSFRLGQHLYGTYRTRLHENNWICIQEDTGLLYLNRSLDHSSWEKLSVRNVADAPTDLTSLCRPRLSPAHRLPQGLPVTHIPS

SEQ ID NO: 11343 - protein, 191 aa, Homo sapiens
  SITE 1: note = misc_feature - Xaa can be any naturally occurring amino acid
XDAYWEKLYVDQAAGTPLLYVHALRDAPEEVPSFRLGQHLYGTYRTRLHENNWICIQEDTGLLYLNRSLDHSSWEKLSVRTCSSLKPRELCFPETRPSFRIRENRPPGTFHQFRLLPVQFLCPNISVAYRLLEGECRPCGAAPQCLLLLVLLCEPLTQAIWFILHLHAISSFNIPEVPLACLPGARYCSRS

SEQ ID NO: 11344 - protein, 108 aa, Homo sapiens
MKALCLLLLPVLGLLVSSKTLCSMEEAINERIQEVAGSLIFRAISSIGLECQSVTSRGDLATCPRGFAVTGCTCGSACGSWDVRAETTCHCQCAGMDWTGARCCRVQP

SEQ ID NO: 11345 - protein, 82 aa, Homo sapiens
MKALCLLLLPVLGLLVSSKTLCSMEEAINERIQEVAGSLSFAVTGCTCGSACGSWDVRAETTCHCQCAGMDWTGARCCRVQP

SEQ ID NO: 11346 - protein, 82 aa, Homo sapiens; identical to SEQ ID NO: 11345

SEQ ID NO: 11347 - protein, 111 aa, Homo sapiens
MGPSSCLLLILIPLLQLINPGSTQCSLDSVMDKKIKDVLNSLEYSPSPISKKLSCASVKSQGRPSSCPAGMAVTGCACGYGCGSWDVQLETTCHCQCSVVDWTTARCCHLT

SEQ ID NO: 11348 - protein, 610 aa, Homo sapiens
MWLPLVLLLAVLLLAVLCKVYLGLFSGSSPNPFSEDVKRPPAPLVTDKEARKKVLKQAFSANQVPEKLDVVVIGSGFGGLAAAAILAKAGKRVLVLEQHTKAGGCCHTFGKNGLEFDTGIHYIGRMEEGSIGRFILDQITEGQLDWAPLSSPFDIMVLEGPNGRKEYPMYSGEKAYIQGLKEKFPQEEAIIDKYIKLVKVVSSGAPHAILLKFLPLPVVQLLDRCGLLTRFSPFLQASTQSLAEVLQQLGASSELQAVLSYIFPTYGVTPNHSAFSMHALLVNHYMKGGFYPRGGSSEIAFHTIPVIQRAGGAVLTKATVQSVLLDSAGKACGVSVKKGHELVNIYCPIVVSNAGLFNTYEHLLPGNARCLPGVKQQLGTVRPGLGMTSVFICLRGTKEDLHLPSTNYYVYYDTDMDQAMERYVSMPREEAAEHIPLLFFAFPSAKDPTWEDRFPGRSTMIMLIPTAYEWFEEWQAELKGKRGSDYETFKNSFVEASMSVVLKLFPQLEGKVESVTAGSPLTNQFYLAAPRGACYGADHDLGRLHPCVMASLRAQSPIPNLYLTGQDIFTCGLVGALQGALLCSSAILKRNLYSDLKNLDSRIRAQKKKN

SEQ ID NO: 11349 - protein, 140 aa, Homo sapiens
  SITE 1: note = misc_feature - Xaa can be any naturally occurring amino acid
XFHTIPVIQRAGGAVLTKATVQSVLLDSAGKACGVSVKKGHELVNIYCPIVVSNAGLFNTYEHLLPGNARCLPGKRRVCTAPLAGSPMCPLLEPTCSVWVMLLLFLAGPLIVLKQQGENATSNIILTLAFNVGETEAHTD

SEQ ID NO: 11350 - protein, 320 aa, Homo sapiens
  SITE 1: note = misc_feature - Xaa can be any naturally occurring amino acid
XGRKEYPMYSGEKAYIQGLKEKFPQEEAIIDKYIKLVKVVSSGAPHAILLKFLPLPVVQLLDRCGLLTRFSPFLQASTQSLAEVLQQLGASSELQAVLSYIFPTYGVTPNHSAFSMHALLVNHYMKGGFYPRGGSSEIAFHTIPVIQRAGGAVLTKATVQSVLLDSAGKACGVSVKKGHELVNIYCPIVVSNAGLFNTYEHLLPGNARCLPGVKQQLGTVRPGLGMTSVFICLRGTKEDLHLPSTNYYVYYDTDMDQAMERYVSMPREEAAEHIPLLFFAFPSAKDPTWEDRFPGGECDCRIPTHQPVLSGCSPRCLLRG

SEQ ID NO: 11351 - protein, 399 aa, Homo sapiens
  SITE 1: note = misc_feature - Xaa can be any naturally occurring amino acid
XPLVLLLAVLLLAVLCKVYLGLFSGSSPNPFSEDVKRPPAPLVTDKEARKKVLKQGVTPNHSAFSMHALLVNHYMKGGFYPRGGSSEIAFHTIPVIQRAGGAVLTKATVQSVLLDSAGKACGVSVKKGHELVNIYCPIVVSNAGLFNTYEHLLPGNARCLPGVKQQLGTVRPGLGMTSVFICLRGTKEDLHLPSTNYYVYYDTDMDQAMERYVSMPREEAAEHIPLLFFAFPSAKDPTWEDRFPGRSTMIMLIPTAYEWFEEWQAELKGKRGSDYETFKNSFVEASMSVVLKLFPQLEGKVESVTAGSPLTNQFYLAAPRGACYGADHDLGRLHPCVMASLRAQSPIPNLYLTGQDIFTCGLVGALQGALLCSSAILKRNLYSDLKNLDSRIRAQKKKN

SEQ ID NO: 11352 - protein, 255 aa, Homo sapiens
  SITE 1: note = misc_feature - Xaa can be any naturally occurring amino acid
XWLPLVLLLAVLLLAVLCKVYLGLFSGSSPNPFSEDVKRPPAPLVTDKEARKKVLKQGIHYIGRMEEGSIGRFILDQITEGQLDWAPLSSPFDIMVLEGPNGRKEYPMYSGEKAYIQGLKEKFPQEEAIIDKYIKLVKVVSSGAPHAILLKFLPLPVVQLLDRCGLLTRFSPFLQASTQSLAEVLQQLGASSELQAVLSYIFPTYGVTPNHSAFSMHALLVNHYMKGGFYPRGGSSEIAFHTIPVIQRAGGAVLT

SEQ ID NO: 11353 - protein, 331 aa, Homo sapiens
MSRARGALCRACLALAAALAALLLLPLPLPRAPAPARTPAPAPRAPPSRPAAPSLRPDDVFIAVKTTRKNHGPRLRLLLRTWISRARQQTFIFTDGDDPELELQGGDRVINTNCSAVRTRQALCCKMSVEYDKFIESGRKWFCHVDDDNYVNARSLLHLLSSFSPSQDVYLGRPSLDHPIEATERVQGGRTVTTVKFWFATGGAGFCLSRGLALKMSPWASLGSFMSTAEQVRLPDDCTVGYIVEGLLGARLLHSPLFHSHLENLQRLPPDTLLQQVTLSHGGPENPHNVVNVAGGFSLHQDPTRFKSIHCLLYPDTDWCPRQKQGAPTSR

SEQ ID NO: 11354 - protein, 60 aa, Homo sapiens
MSVEYDKFIESGRKWFCHVDDDNYVNARSLLHLLSSFSPSQDVYLGRPSLDHPIEATERV

SEQ ID NO: 11355 - protein, 205 aa, Homo sapiens
MSVEYDKFIESGRKWFCHVDDDNYVNARSLLHLLSSFSPSQDVYLGRPSLDHPIEATERVQGGRTVTTVKFWFATGGAGFCLSRGLALKMSPWASLGSFMSTAEQVRLPDDCTVGYIVEGLLGARLLHSPLFHSHLENLQRLPPDTLLQQVTLSHGGPENPHNVVNVAGGFSLHQDPTRFKSIHCLLYPDTDWCPRQKQGAPTSR

SEQ ID NO: 11356 - protein, 137 aa, Homo sapiens
MKPPAAQGSPAAAAAAAPALDSAAAEDLSDALCEFDAVLADFASPFHERHFHYEEHLERMKRRSSASVSDSSGFSDSESADSLYRNSFSFSDEKLNSPTDSTPALLSATVTPQKAKLGDTKELEAFIADLDKTLASM

SEQ ID NO: 11357 - protein, 337 aa, Homo sapiens
MPALEPAPPLLADLGPALEPESPAALGPPGYLHSAPGPAPAPGEGPPPGTVLEPQSAPESSCPCRGSVKNQPSEELPDMTTFPPRLLAEQLTLMDAELFKKVVLHECLGCIWGQGHLKGNEHMAPTVRATIAHFNRLTNCITTSCLGDHSMRARDRARVVEHWIKVARECLSLNNFSSVHVIVSALCSNPIGQLHKTWAGVSSKSMKELKELCKKDTAVKRDLLIKAGSFKVATQERNPQRVQMRLRRQKKGVVPFLGDFLTELQRLDSAIPDDLDGNTNKRSKEVRVLQEMQLLQVAAMNYRLRPLEKFVTYFTRMEQLSDKESYKLSCQLEPENP

SEQ ID NO: 11358 - protein, 356 aa, Homo sapiens
MPALEPAPPLLADLGPALEPESPAALGPPGYLHSAPGPAPAPGEGPPPGTVLEPQSAPESSCPCRGSVKNQPSEELPDMTTFPPRLLAEQLTLMDAELFKKVVLHECLGCIWGQGHLKGNEHMAPTVRATIAHFNRLTNCITTSCLGDHSMRARDRARVVEHWIKVARECLSLNNFSSVHVIVSALCSNPIGQLHKTWAGVSSKSMKELKELCKKDTAVKRDLLIKAGSFKVATQERNPQRVQMRLRRQKKGVVPFLGDFLTELQRLDSAIPDDLDGNTNKRSKEVRVLQEMQLLQVAAMNYRLRPLEKFVTYFTRMEQLSDKERWGFTMMSRIVSNSWPQAIHPPQPPKVLTLQV

SEQ ID NO: 11359 - protein, 410 aa, Homo sapiens
MPALEPAPPLLADLGPALEPESPAALGPPGYLHSAPGPAPAPGEGPPPGTVLEPQSAPESSCPCRGSVKNQPSEELPDMTTFPPRLLAEQLTLMDAELFKKVVLHECLGCIWGQGHLKGNEHMAPTVRATIAHFNRLTNCITTSCLGDHSMRARDRARVVEHWIKVARECLSLNNFSSVHVIVSALCSNPIGQLHKTWAGVSSKSMKELKELCKKDTAVKRDLLIKAGSFKVATQERNPQRVQMRLRRQKKGVVPFLGDFLTELQRLDSAIPDDLDGNTNKRSKEVRVLQEMQLLQVAAMNYRLRPLEKFVTYFTRMEQLSDKERLHCSVTISVHCNVCLLGSSPSSASQAAGTTAVHHHVRLFCCCCSATSCPASWSPKTRRLATSCSGWEPTGMLARTPALHHPSPRP

SEQ ID NO: 11360 - protein, 473 aa, Homo sapiens
MRKLLTNLPAAAVLSAQVYSAVLQGLWEENVCGTPGRTRVCTALLYGQVCPFQDSTDGLRTITSILFNWPPENTSVYYQPPQRSSFRIKLAFRNLSWPGLGLEDHQEIVLGQLVLPEPNEAKPDDPAPRPGQHALTMPALEPAPPLLADLGPALEPESPAALGPPGYLHSAPGPAPAPGEGPPPGTVLEPQSAPESSCPCRGSVKNQPSEELPDMTTFPPRLLAEQLTLMDAELFKKVVLHECLGCIWGQGHLKGNEHMAPTVRATIAHFNRLTNCITTSCLGDHSMRARDRARVVEHWIKVARECLSLNNFSSVHVIVSALCSNPIGQLHKTWAGVSSKSMKELKELCKKDTAVKRDLLIKAGSFKVATQERNPQRVQMRLRRQKKGVVPFLGDFLTELQRLDSAIPDDLDGNTNKRSKEVRVLQEMQLLQVAAMNYRLRPLEKFVTYFTRMEQLSDKESYKLSCQLEPENP

SEQ ID NO: 11361 - protein, 536 aa, Homo sapiens
MRKLLTNLPAAAVLSAQVYSAVLQGLWEENVCGTPGRTRVCTALLYGQVCPFQDSTDGLRTITSILFNWPPENTSVYYQPPQRSSFRIKLAFRNLSWPGLGLEDHQEIVLGQLVLPEPNEAKPDDPAPRPGQHALTMPALEPAPPLLADLGPALEPESPAALGPPGYLHSAPGPAPAPGEGPPPGTVLEPQSAPESSCPCRGSVKNQPSEELPDMTTFPPRLLAEQLTLMDAELFKKVVLHECLGCIWGQGHLKGNEHMAPTVRATIAHFNRLTNCITTSCLGDHSMRARDRARVVEHWIKVARECLSLNNFSSVHVIVSALCSNPIGQLHKTWAGVSSKSMKELKELCKKDTAVKRDLLIKAGSFKVATQERNPQRVQMRLRRQKKGVVPFLGDFLTELQRLDSAIPDDLDGNTNKRSKEVRVLQEMQLLQVAAMNYRLRPLEKFVTYFTRMEQLSDKERWGFTMMSRIVSNSWPQAIHPPQPPKVLTLQLQAVLPAGARKPVGWQHPAVAGNPPGCWPEHRLCTIPHPDRRHQG

SEQ ID NO: 11362 - protein, 435 aa, Homo sapiens
MRKLLTNLPAAAVLSAQVYSAVLQGLWEENVCGTPGRTRVCTALLYGQVCPFQDSTDGLRTITSILFNWPPENTSVYYQPPQRSSFRIKLAFRNLSWPGLGLEDHQEIVLGQLVLPEPNEAKPDDPAPRPGQHALTMPALEPAPPLLADLGPALEPESPAALGPPGYLHSAPGPAPAPGEGPPPGTVLEPQSAPESSCPCRGSVKNQPSEELPDMTTFPPRLLAEQLTLMDAELFKKVVLHECLGCIWGQGHLKGNEHMAPTVRATIAHFNRLTNCITTSCLGDHSMRARDRARVVEHWIKVARECLSLNNFSSVHVIVSALCSNPIGQLHKTWAGVSSKSMKELKELCKKDTAVKRDLLIKRDDGENNGNSYRKLSPQRPCEVAVVCITLYRRGNSLREARLQDWVTHTGSVDLGQWRGALRWPPRRGTPRESR

SEQ ID NO: 11363 - protein, 155 aa, Homo sapiens
  SITE 1: note = misc_feature - Xaa can be any naturally occurring amino acid
XWASGMSTVPGGSRHSLGIQVRGGWGVTGGEEESLTVPVADTWQAGSFKVATQERNPQRVQMRLRRQKKGVVPFLGDFLTELQRLDSAIPDDLDGNTNKRSKEVRVLQEMQLLQVAAMNYRLRPLEKFVTYFTRMEQLSDKESYKLSCQLEPENP

SEQ ID NO: 11364 - protein, 458 aa, Homo sapiens
MGGLGPRRAGTSRERLVVTGRAGWMGMGRGAGRSALGFWPTLAFLLCSFPAATSPCKILKCNSEFWSATSGSHAPASDDTPEFCAALRSYALCTRRTARTCRGDLAYHSAVHGIEDLMSQHNCSKDGPTSQPRLRTLPPAGDSQERSDSPEICHYEKSFHKHSATPNYTHCGLFGDPHLRTFTDRFQTCKVQGAWPLIDNNYLNVQVTNTPVLPGSAATATSKLTIIFKNFQECVDQKVYQAEMDELPAAFVDGSKNGGDKHGANSLKITEKVSGQHVEIQAKYIGTTIVVRQVGRYLTFAVRMPEEVVNAVEDWDSQGLYLCLRGCPLNQQIDFQAFHTNAEGTGARRLAAASPAPTAPETFPYETAVAKCKEKLPVEDLYYQACVFDLLTTGDVNFTLAAYYALEDVKMLHSNKDKLHLYERTRDLPGRAAAGLPLAPRPLLGALVPLLALLPVFC

SEQ ID NO: 11365 - protein, 10 aa, Homo sapiens
MGMGRGAGRS

SEQ ID NO: 11366 - protein, 46 aa, Homo sapiens
MGMGRGAGRSALGFWPTLAFLLCSFPAAHHHLQELPGVCGPEGVPG

SEQ ID NO: 11367 - protein, 61 aa, Homo sapiens
MGMGRGAGRSALGFWPTLAFLLCSFPAAIKRSPGSFCAALEMRRLWNLMSWKERRVQKPLM

SEQ ID NO: 11368 - protein, 90 aa, Homo sapiens
MGMGRGAGRSALGFWPTLAFLLCSFPAATSPCKILKCNSEFWSATSGSHAPASDDTPEFCAALRSYALCTRRTARTCRGDLAYHSAVHGI

SEQ ID NO: 11369 - protein, 434 aa, Homo sapiens
MGMGRGAGRSALGFWPTLAFLLCSFPAATSPCKILKCNSEFWSATSGSHAPASDDTPEFCAALRSYALCTRRTARTCRGDLAYHSAVHGIEDLMSQHNCSKDGPTSQPRLRTLPPAGDSQERSDSPEICHYEKSFHKHSATPNYTHCGLFGDPHLRTFTDRFQTCKVQGAWPLIDNNYLNVQVTNTPVLPGSAATATSKLTIIFKNFQECVDQKVYQAEMDELPAAFVDGSKNGGDKHGANSLKITEKVSGQHVEIQAKYIGTTIVVRQVGRYLTFAVRMPEEVVNAVEDWDSQGLYLCLRGCPLNQQIDFQAFHTNAEGTGARRLAAASPAPTAPETFPYETAVAKCKEKLPVEDLYYQACVFDLLTTGDVNFTLAAYYALEDVKMLHSNKDKLHLYERTRDLPGRAAAGLPLAPRPLLGALVPLLALLPVFC

SEQ ID NO: 11370 - protein, 434 aa, Homo sapiens; identical to SEQ ID NO: 11369

SEQ ID NO: 11371 - protein, 434 aa, Homo sapiens; identical to SEQ ID NO: 11369

SEQ ID NO: 11372 - protein, 450 aa, Homo sapiens
MQPPRERLVVTGRAGWMGMGRGAGRSALGFWPTLAFLLCSFPAATSPCKILKCNSEFWSATSGSHAPASDDTPEFCAALRSYALCTRRTARTCRGDLAYHSAVHGIEDLMSQHNCSKDGPTSQPRLRTLPPAGDSQERSDSPEICHYEKSFHKHSATPNYTHCGLFGDPHLRTFTDRFQTCKVQGAWPLIDNNYLNVQVTNTPVLPGSAATATSKLTIIFKNFQECVDQKVYQAEMDELPAAFVDGSKNGGDKHGANSLKITEKVSGQHVEIQAKYIGTTIVVRQVGRYLTFAVRMPEEVVNAVEDWDSQGLYLCLRGCPLNQQIDFQAFHTNAEGTGARRLAAASPAPTAPETFPYETAVAKCKEKLPVEDLYYQACVFDLLTTGDVNFTLAAYYALEDVKMLHSNKDKLHLYERTRDLPGRAAAGLPLAPRPLLGALVPLLALLPVFC

SEQ ID NO: 11373 - protein, 341 aa, Homo sapiens
MSQHNCSKDGPTSQPRLRTLPPAGDSQERSDSPEICHYEKSFHKHSATPNYTHCGLFGDPHLRTFTDRFQTCKVQGAWPLIDNNYLNVQVTNTPVLPGSAATATSKLTIIFKNFQECVDQKVYQAEMDELPAAFVDGSKNGGDKHGANSLKITEKVSGQHVEIQAKYIGTTIVVRQVGRYLTFAVRMPEEVVNAVEDWDSQGLYLCLRGCPLNQQIDFQAFHTNAEGTGARRLAAASPAPTAPETFPYETAVAKCKEKLPVEDLYYQACVFDLLTTGDVNFTLAAYYALEDVKMLHSNKDKLHLYERTRDLPGRAAAGLPLAPRPLLGALVPLLALLPVFC

SEQ ID NO: 11374 - protein, 437 aa, Homo sapiens
MGLRAAPSSAAAAAAEVEQRRSPGLCPPPLELLLLLLFSLGLLHAGDCQQPAQCRIQKCTTDFVSLTSHLNSAVDGFDSEFCKALRAYAGCTQRTSKACRGNLVYHSAVLGISDLMSQRNCSKDGPTSSTNPEVTHDPCNYHSHAGAREHRRGDQNPPSYLFCGLFGDPHLRTFKDNFQTCKVEGAWPLIDNNYLSVQVTNVPVVPGSSATATNKITIIFKAHHECTDQKVYQAVTDDLPAAFVDGTTSGGDSDAKSLRIVERESGHYVEMHARYIGTTVFVRQVGRYLTLAIRMPEDLAMSYEESQDLQLCVNGCPLSERIDDGQGQVSAILGHSLPRTSLVQAWPGYTLETANTQCHEKMPVKDIYFQSCVFDLLTTGDANFTAAAHSALEDVEALHPRKERWHIFPSSGNGTPRGGSDLSVSLGLTCLILIVFL

SEQ ID NO: 11375 - protein, 478 aa, Homo sapiens
MIRKKRKRSAPPGPCRSHGPRPATAPAPPPSPEPTRPAWTGMGLRAAPSSAAAAAAEVEQRRSPGLCPPPLELLLLLLFSLGLLHAGDCQQPAQCRIQKCTTDFVSLTSHLNSAVDGFDSEFCKALRAYAGCTQRTSKACRGNLVYHSAVLGISDLMSQRNCSKDGPTSSTNPEVTHDPCNYHSHAGAREHRRGDQNPPSYLFCGLFGDPHLRTFKDNFQTCKVEGAWPLIDNNYLSVQVTNVPVVPGSSATATNKITIIFKAHHECTDQKVYQAVTDDLPAAFVDGTTSGGDSDAKSLRIVERESGHYVEMHARYIGTTVFVRQVGRYLTLAIRMPEDLAMSYEESQDLQLCVNGCPLSERIDDGQGQVSAILGHSLPRTSLVQAWPGYTLETANTQCHEKMPVKDIYFQSCVFDLLTTGDANFTAAAHSALEDVEALHPRKERWHIFPSSGNGTPRGGSDLSVSLGLTCLILIVFL

SEQ ID NO: 11376 - protein, 50 aa, Homo sapiens
MAHGPGALMLKCVVVGDGAVGKTCLLMSYANDAFPEEYVPTVFDHYAGRL

SEQ ID NO: 11377 - protein, 205 aa, Homo sapiens
MAHGPGALMLKCVVVGDGAVGKTCLLMSYANDAFPEEYVPTVFDHYAVSVTVGGKQYLLGLYDTAGQEDYDRLRPLSYPMTDVFLICFSVVNPASFQNVKEEWVPELKEYAPNVPFLLIGTQIDLRDDPKTLARLNDMKEKPICVEQGQKLAKEIGACCYVECSALTQKGLKTVFDEAIIAILTPKKHTVKKRIGSRCINCCLIT

SEQ ID NO: 11378 - protein, 75 aa, Homo sapiens
MTDVFLICFSVVNPASFQNVKEEWVPELKEYAPNVPFLLIGTQIDLRDDPKTLARLNDMKEKPICVEQGQKLAKE

SEQ ID NO: 11379 - protein, 91 aa, Homo sapiens
PEEYVPTVFDHYAVSVTVGGKQYLLGLYDTAGQALQQSELDFWEEISVSSGSWGHVITFSFHTRAWVSSGQDLLCPLAPASAVLLLDRGRL

SEQ ID NO: 11380 - protein, 34 aa, Homo sapiens
  SITE 1: note = misc_feature - Xaa can be any naturally occurring amino acid
XGGKQYLLGLYDTAGQEDTGELAVRSCDFDKSIF

SEQ ID NO: 11381 - protein, 45 aa, Homo sapiens
MAYSTVQRVALASGLVLALSLLLPKAFLSRGKRQEPPPTPEEHRL

SEQ ID NO: 11382 - protein, 43 aa, Homo sapiens
MAYSTVQRVALASGLVLALSLLLPKAFLSRGKRQEPPPTPEEN

SEQ ID NO: 11383 - protein, 288 aa, Homo sapiens
MAYSTVQRVALASGLVLALSLLLPKAFLSRGKRQEPPPTPEGKLGRFPPMMHHHQAPSDGQTPGARFQRSHLAEAFAKAKGSGGGAGGGGSGRGLMGQIIPIYGFGIFLYILYILFKLSKGKTTAEDGKCYTAMPGNTHRKISYPEETYPIYDLSDCIKRRQETILVDYPDPKELSAEEIAERMGMIEEEESDHLGWESLPTDPRAQEDNSVTSCDPKPETCSCCFHEDEDPAVLAENAGFSADSYPEQEETTKEEWSQDFKDEGLGISTDKAYTGSMLRKRNPQGLE

SEQ ID NO: 11384 - protein, 368 aa, Homo sapiens
MAYSTVQRVALASGLVLALSLLLPKAFLSRGKRQEPPPTPEGKLGRFPPMMHHHQAPSDGQTPGARFQRSHLAEAFAKAKGSGGGAGGGGSGRGLMGQIIPIYGFGIFLYILYILFKLSKGKTTAEDGKCYTAMPGNTHRKITSFELAQLQEKLKETEAAMEKLINRVGPNGERAQTVTSDQEKRLLHQLREITRVMKEGKFIDRFSPEKEAEEAPYMEDWEGYPEETYPIYDLSDCIKRRQETILVDYPDPKELSAEEIAERMGMIEEEESDHLGWESLPTDPRAQEDNSVTSCDPKPETCSCCFHEDEDPAVLAENAGFSADSYPEQEETTKEEWSQDFKDEGLGISTDKAYTGSMLRKRNPQGLE

SEQ ID NO: 11385 - protein, 369 aa, Homo sapiens
MAYSTVQRVALASGLVLALSLLLPKAFLSRGKRQEPPPTPEGKLGRFPPMMHHHQAPSDGQTPGARFQRSHLAEAFAKAKGSGGGAGGGGSGRGLMGQIIPIYGFGIFLYILYILFKLSKGKTTAEDGKCYTAMPGNTHRKITSFELAQLQEKLKETEAAMEKLINRVGPNGESRAQTVTSDQEKRLLHQLREITRVMKEGKFIDRFSPEKEAEEAPYMEDWEGYPEETYPIYDLSDCIKRRQETILVDYPDPKELSAEEIAERMGMIEEEESDHLGWESLPTDPRAQEDNSVTSCDPKPETCSCCFHEDEDPAVLAENAGFSADSYPEQEETTKEEWSQDFKDEGLGISTDKAYTGSMLRKRNPQGLE

SEQ ID NO: 11386 - protein, 328 aa, Homo sapiens
MAYSTVQRVALASGLVLALSLLLPKAFLSRGKRQEPPPTPEGKLGRFPPMMHHHQAPSDGQTPGARFQRSHLAEAFAKAKGSGGGAGGGGSGRGLMGQIIPIYGFGIFLYILYILFKLSKGKTTAEDGKCYTAMPGNTHRKITSFELAQLQEKLKETEAAMEKLINRVGPNGESTQTDHSDVYVHCLGVFTTKWLDCLIFLSRAQTVTSDQEKRLLHQLREITRVMKEGKFIDRFSPEKEAEEAPYMEDWEGYPEETYPIYDLSDCIKRRQETILVDYPDPKELSAEEIAERMGMIEEEESDHLGWESLPTDPRAQEDNSVTSCDPKP

SEQ ID NO: 11387 - protein, 128 aa, Homo sapiens
MAYSTVQRVALASGLVLALSLLLPKAFLSRGKRQEPPPTPEGKLGRFPPMMHHHQAPSDGQTPGARFQRSHLAEAFAKAKGSGGGAGGGGSGRGLMGQIIPIYGFGIFLYILYILFKVSRIILIILHQ

SEQ ID NO: 11388 - protein, 187 aa, Homo sapiens
MAYSTVQRVALASGLVLALSLLLPKAFLSRGKRQEPPPTPEGYPEETYPIYDLSDCIKRRQETILVDYPDPKELSAEEIAERMGMIEEEESDHLGWESLPTDPRAQEDNSVTSCDPKPETCSCCFHEDEDPAVLAENAGFSADSYPEQEETTKEEWSQDFKDEGLGISTDKAYTGSMLRKRNPQGLE

SEQ ID NO: 11389 - protein, 42 aa, Homo sapiens
MSSLIRRVISTAKAPGAIGPYRTDRHGPFKWTACVRRGSRRS

SEQ ID NO: 11390 - protein, 137 aa, Homo sapiens
MSSLIRRVISTAKAPGAIGPYSQAVLVDRTIYISGQIGMDPSSGQLVSGGVAEEAKQALKNMGEILKAAGCDFTNVVKTTVLLADINDFNTVNEIYKQYFKSNFPARAAYQVAALPKGSRIEIEAVAIQGPLTTASL

SEQ ID NO: 11391 - protein, 148 aa, Homo sapiens
  SITE 1: note = misc_feature - Xaa can be any naturally occurring amino acid
XGRLSHVVLDQKGDQHRESPRGHWTLQLSVYCSQAVLVDRTIYISGQIGMDPSSGQLVSGGVAEEAKQALKNMGEILKAAGCDFTNVVKTTVLLADINDFNTVNEIYKQYFKSNFPARAAYQVAALPKGSRIEIEAVAIQGPLTTASL

SEQ ID NO: 11392 - protein, 127 aa, Homo sapiens
  SITE 1: note = misc_feature - Xaa can be any naturally occurring amino acid
XSSKKPAGLVLGLLLLKGLQEGRLSHVVLDQKGDQHRESPRGHWTLQALKNMGEILKAAGCDFTNVVKTTVLLADINDFNTVNEIYKQYFKSNFPARAAYQVAALPKGSRIEIEAVAIQGPLTTASL

SEQ ID NO: 11393 - protein, 219 aa, Homo sapiens
MAAEMRKMVRQPSRESTDGSINSYSSEGNLIFPGVRLGADSQFSDFLDGLGPAQLVGRQTLATPAMGDIQIGMEDKKGQLEVEVIRARSLTQKPGSKSTPAPYVKVYLLENGACIAKKKTRIARKTLDPLYQQSLVFDESPQGKVLQVIVWGDYGRMDHKCFMGVAQILLEELDLSSMVIGWYKLFPPSSLVDPTLTPLTRRASQSSLESSTGPPCIRS

SEQ ID NO: 11394 - protein, 1012 aa, Homo sapiens
MCAPGIHVSSEGWEEVRSVDSEEGTIEARRAVAGDLDYYWLDPATWHSRETSPISSHPVTWQPSKEGDRLIGRVILNKRTTMPKDSGALLGLKVVGGKMTDLGRLGAFITKVKKGSLADVVGHLRAGDEVLEWNGKPLPGATNEEVYNIILESKSEPQVEIIVSRPIGDIPRIPESSHPPLESSSSSFESQKMERPSISVISPTSPGALKDAPQVLPGQLSVKLWYDKVGHQLIVNVLQATDLPARVDGRPRNPYVKMYFLPDRSDKSKRRTKTVKKILEPKWNQTFVYSHVHRRDFRERMLEITVWDQPRVQEEESEFLGEILIELETALLDDEPHWYKLQTHDESSLPLPQPSPFMPRRHIHGESSSKKLQRSQRISDSDISDYEVDDGIGVVPPGYRSSARESKSTTLTVPEQQRTTHHRSRSVSPHRGNDQGKPRSRLPNVPLQRSLDEIHPTRRSRSPTRHHDASRSPVDHRTRDVDSQYLSEQDSELLMLPRAKRGRSAECLHTTSELQPFLDRARSASTNCLRPDTSLHSPERERHSRKSERSSIQKQTRKGTASDAERMHRQRSPTQSPPADTSFSSRRGRQLPQVPVRSGSIEQASLVVEERTRQMKMKVHRFKQTTGSGSSQELDREQYSKYNIHKDQYRSCDNVSAKSSDSDVSDVSAISRTSSASRLSSTSFMSEQSERPRGRISSFTPKMQGRRMGTSGRSIMKSTSVSGEMYTLEHNDGSQSDTAVGTVGAGGKKRRSSLSAKVVAIVSRRSRSTSQLSQTESGHKKLKSTIQRSTETGMAAEMRKMVRQPSRESTDGSINSYSSEGNLIFPGVRLGADSQFSDFLDGLGPAQLVGRQTLATPAMGDIQIGMEDKKGQLEVEVIRARSLTQKPGSKSTPAPYVKVYLLENGACIAKKKTRIARKTLDPLYQQSLVFDESPQGKVLQVIVWGDYGRMDHKCFMGVAQILLEELDLSSMVIGWYKLFPPSSLVDPTLTPLTRRASQSSLESSTGPPCIRS

SEQ ID NO: 11395 - protein, 817 aa, Homo sapiens
MCAPGIHVSSEGWEEVRSVDSEEGTIEARRAVAGDLDYYWLDPATWHSRETSPISSHPVTWQPSKEGDRLIGRVILNKRTTMPKDSGALLGLKVVGGKMTDLGRLGAFITKVKKGSLADVVGHLRAGDEVLEWNGKPLPGATNEEVYNIILESKSEPQVEIIVSRPIGDIPRIPESSHPPLESSSSSFESQKMERPSISVISPTSPGALKDAPQVLPGQLSVKLWYDKVGHQLIVNVLQATDLPARVDGRPRNPYVKMYFLPDRSDKSKRRTKTVKKILEPKWNQTFVYSHVHRRDFRERMLEITVWDQPRVQEEESEFLGEILIELETALLDDEPHWYKLQTHDESSLPLPQPSPFMPRRHIHGESSSKKLQRSQRISDSDISDYEVDDGIGVVPPVGYRSSARESKSTTLTVPEQQRTTHHRSRSVSPHRGNDQGKPRSRLPNVPLQRSLDEIHPTRRSRSPTRHHDASRSPVDHRTRDVDSQYLSEQDSELLMLPRAKRGRSAECLHTTSELQPFLDRARSASTNCLRPDTSLHSPERERMHRQRSPTQSPPADTSFSSRRGRQLPQVPVRSGSIEQESGHKKLKSTIQRSTETGMAAEMRKMVRQPSRESTDGSINSYSSEGNLIFPGVRLGADSQFSDFLDGLGPAQLVGRQTLATPAMGDIQIGMEDKKGQLEVEVIRARSLTQKPGSKSTPAPYVKVYLLENGACIAKKKTRIARKTLDPLYQQSLVFDESPQGKVLQVIVWGDYGRMDHKCFMGVAQILLEELDLSSMVIGWYKLFPPSSLVDPTLTPLTRRASQSSLESSTGPPCIRS

SEQ ID NO: 11396 - protein, 826 aa, Homo sapiens
MFAGFLQFLLLHTLHSGTGDLDYYWLDPATWHSRETSPISSHPVTWQPSKEGDRLIGRVILNKRTTMPKDSGALLGLKVVGGKMTDLGRLGAFITKVKKGSLADVVGHLRAGDEVLEWNGKPLPGATNEEVYNIILESKSEPQVEIIVSRPIGDIPRIPESSHPPLESSSSSFESQKMERPSISVISPTSPGALKDAPQVLPGQLSVKLWYDKVGHQLIVNVLQATDLPARVDGRPRNPYVKMYFLPDRSDKSKRRTKTVKKILEPKWNQTFVYSHVHRRDFRERMLEITVWDQPRVQEEESEFLGEILIELETALLDDEPHWYKLQTHDESSLPLPQPSPFMPRRHIHGESSSKKLQRSQRISDSDISDYEVDDGIGVVPPVGYRSSARESKSTTLTVPEQQRTTHHRSRSVSPHRGNDQGKPRSRLPNVPLQRSLDEIHPTRRSRSPTRHHDASRSPVDHRTRDVDSQYLSEQDSELLMLPRAKRGRSAECLHTTSELQPFLDRARSASTNCLRPDTSLHSPERERHSRKSERSSIQKQTRKGTASDAERMHRQRSPTQSPPADTSFSSRRGRQLPQVPVRSGSIEQESGHKKLKSTIQRSTETGMAAEMRKMVRQPSRESTDGSINSYSSEGNLIFPGVRLGADSQFSDFLDGLGPAQLVGRQTLATPAMGDIQIGMEDKKGQLEVEVIRARSLTQKPGSKSTPAPYVKVYLLENGACIAKKKTRIARKTLDPLYQQSLVFDESPQGKVLQVIVWGDYGRMDHKCFMGVAQILLEELDLSSMVIGWYKLFPPSSLVDPTLTPLTRRASQSSLESSTGPPCIRS

SEQ ID NO: 11397 - protein, 753 aa, Homo sapiens
MPKDSGALLGLKVVGGKMTDLGRLGAFITKVKKGSLADVVGHLRAGDEVLEWNGKPLPGATNEEVYNIILESKSEPQVEIIVSRPIGDIPRIPESSHPPLESSSSSFESQKMERPSISVISPTSPGALKDAPQVLPGQLSVKLWYDKVGHQLIVNVLQATDLPARVDGRPRNPYVKMYFLPDRSDKSKRRTKTVKKILEPKWNQTFVYSHVHRRDFRERMLEITVWDQPRVQEEESEFLGEILIELETALLDDEPHWYKLQTHDESSLPLPQPSPFMPRRHIHGESSSKKLQRSQRISDSDISDYEVDDGIGVVPPVGYRSSARESKSTTLTVPEQQRTTHHRSRSVSPHRGNDQGKPRSRLPNVPLQRSLDEIHPTRRSRSPTRHHDASRSPVDHRTRDVDSQYLSEQDRMHRQRSPTQSPPADTSFSSRRGRQLPQVPVRSGSIEQASLVVEERTRQMKMKVHRFKQTTGSGSSQELDREQYSKYNIHKDQYRSCDNVSAKSSDSDVSDVSAISRTSSASRLSSTSFMSEQSERPRGRISSFTPKMQGRRMGTSGRSIMKSTSVSGEMYTLEHNDGSQSDTAVGTVGAGGKKRRSSLSAKVVAIVSRRSRSTSQLSQTESGHKKLKSTIQRSTETGMAAEMRKMVRQPSRESTDGSINSYSSEGNLIFPGVRLGADSQFSDFLDGLGPAQLVGRQTLATPAMGDIQIGMEDKKGQLEVEVIRARSLTQKPGSKSTPAPYVKVYLLENGACI

SEQ ID NO: 11398 - protein, 760 aa, Homo sapiens
MPKDSGALLGLKVVGGKMTDLGRLGAFITKVKKGSLADVVGHLRAGDEVLEWNGKPLPGATNEEVYNIILESKSEPQVEIIVSRPIGDIPRIPESSHPPLESSSSSFESQKMERPSISVISPTSPGALKDAPQVLPGQLSVKLWYDKVGHQLIVNVLQATDLPARVDGRPRNPYVKMYFLPDRSDKSKRRTKTVKKILEPKWNQTFVYSHVHRRDFRERMLEITVWDQPRVQEEESEFLGEILIELETALLDDEPHWYKLQTHDESSLPLPQPSPFMPRRHIHGESSSKKLQRSQRISDSDISDYEVDDGIGVVPPVGYRSSARESKSTTLTVPEQQRTTHHRSRSVSPHRGNDQGKPRSRLPNVPLQRSLDEIHPTRRSRSPTRHHDASRSPVDHRTRDVDSQYLSEQDSELLMLPRAKRGRSAECLHTTSELQPFLDRARSASTNCLRPDTSLHSPERERHSRKSERSSIQKQTRKGTASDAERMHRQRSPTQSPPADTSFSSRRGRQLPQVPVRSGSIEQESGHKKLKSTIQRSTETGMAAEMRKMVRQPSRESTDGSINSYSSEGNLIFPGVRLGADSQFSDFLDGLGPAQLVGRQTLATPAMGDIQIGMEDKKGQLEVEVIRARSLTQKPGSKSTPAPYVKVYLLENGACIAKKKTRIARKTLDPLYQQSLVFDESPQGKVLQVIVWGDYGRMDHKCFMGVAQILLEELDLSSMVIGWYKLFPPSSLVDPTLTPLTRRASQSSLESSTGPPCIRS

SEQ ID NO: 11399 - protein, 1541 aa, Homo sapiens
MSSAVGPRGPRPPTVPPPMQELPDLSHLTEEERNIIMAVMDRQKEEEEKEEAMLKCVVRDMAKPAACKTPRNAENQPHQPSPRLHQQFESYKEQVRKIGEEARRYQGEHKDDAPTCGICHKTKFADGCGHLCSYCRTKFCARCGGRVSLRSNNEDKVVMWVCNLCRKQQEILTKSGAWFFGSGPQQTSQDGTLSDTATGAGSEVPREKKARLQERSRSQTPLSTAAASSQDAAPPSAPPDRSKGAEPSQQALGPEQKQASSRSRSEPPRERKKTPGLSEQNGKGALKSERKRVPKTSAQPVEGAVEERERKERRESRRLEKGRSQDYPDTPEKRDEGKAADEEKQRKEEDYQTRYRSDPNLARYPVKPPPEEQQMRMHARVSRARHERRHSDVALPRTEAGAALPEGKAGKRAPAAARASPPDSPRAYSAERTAETRAPGAKQLTNHSPPAPRHGPVPAEAPELKAQEPLRKQSRLDPSSAVLMRKAKREKVETMLRNDSLSSDQSESVRPSPPKPHRSKRGGKKRQMSVSSSEEEGVSTPEYTSCEDVELESESVSEKGDLDYYWLDPATWHSRETSPISSHPVTWQPSKEGDRLIGRVILNKRTTMPKDSGALLGLKVVGGKMTDLGRLGAFITKVKKGSLADVVGHLRAGDEVLEWNGKPLPGATNEEVYNIILESKSEPQVEIIVSRPIGDIPRIPESSHPPLESSSSSFESQKMERPSISVISPTSPGALKDAPQVLPGQLSVKLWYDKVGHQLIVNVLQATDLPARVDGRPRNPYVKMYFLPDRSDKSKRRTKTVKKILEPKWNQTFVYSHVHRRDFRERMLEITVWDQPRVQEEESEFLGEILIELETALLDDEPHWYKLQTHDESSLPLPQPSPFMPRRHIHGESSSKKLQRSQRISDSDISDYEVDDGIGVVPPVGYRSSARESKSTTLTVPEQQRTTHHRSRSVSPHRGNDQGKPRSRLPNVPLQRSLDEIHPTRRSRSPTRHHDASRSPVDHRTRDVDSQYLSEQDSELLMLPRAKRGRSAECLHTTRHLVRHYKTLPPKMPLLQSSSHWNIYSELQPFLDRARSASTNCLRPDTSLHSPERERMHRQRSPTQSPPADTSFSSRRGRQLPQVPVRSGSIEQASLVVEERTRQMKMKVHRFKQTTGSGSSQELDREQYSKYNIHKDQYRSCDNVSAKSSDSDVSDVSAISRTSSASRLSSTSFMSEQSERPRGRISSFTPKMQGRRMGTSGRSIMKSTSVSGEMYTLEHNDGSQSDTAVGTVGAGGKKRRSSLSAKVVAIVSRRSRSTSQLSQTESGHKKLKSTIQRSTETGMAAEMRKMVRQPSRESTDGSINSYSSEGNLIFPGVRLGADSQFSDFLDGLGPAQLVGRQTLATPAMGDIQIGMEDKKGQLEVEVIRARSLTQKPGSKSTPAPYVKVYLLENGACIAKKKTRIARKTLDPLYQQSLVFDESPQGKVLQVIVWGDYGRMDHKCFMGVAQILLEELDLSSMVIGWYKLFPPSSLVDPTLTPLTRRASQSSLESSTGPPCIRS

SEQ ID NO: 11400 - protein, 1291 aa, Homo sapiens
MSSAVGPRGPRPPTVPPPMQELPDLSHLTEEERNIIMAVMDRQKEEEEKEEAMLKCVVRDMAKPAACKTPRNAENQPHQPSPRLHQQFESYKEQVRKIGEEARRYQGEHKDDAPTCGICHKTKFADGCGHLCSYCRTKFCARCGGRVSLRSNNEDKVVMWVCNLCRKQQEILTKSGAWFFGSGPQQTSQDGTLSDTATGAGSEVPREKKARLQERSRSQTPLSTAAASSQDAAPPSAPPDRSKGAEPSQQALGPEQKQASSRSRSEPPRERKKTPGLSEQNGKGALKSERKRVPKTSAQPVEGAVEERERKERRESRRLEKGRSQDYPDTPEKRDEGKAADEEKQRKEEDYQTRYRSDPNLARYPVKPPPEEQQMRMHARVSRARHERRHSDVALPRTEAGAALPEGKAGKRAPAAARASPPDSPRAYSAERTAETRAPGAKQLTNHSPPAPRHGPVPAEAPELKAQEPLRKQSRLDPSSAVLMRKAKREKVETMLRNDSLSSDQSESVRPSPPKPHRSKRGGKKRQMSVSSSEEEGVSTPEYTSCEDVELESESVSEKGDLDYYWLDPATWHSRETSPISSHPVTWQPSKEGDRLIGRVILNKRTTMPKDSGALLGLKVVGGKMTDLGRLGAFITKVKKGSLADVVGHLRAGDEVLEWNGKPLPGATNEEVYNIILESKSEPQVEIIVSRPIGDIPRIPESSHPPLESSSSSFESQKMERPSISVISPTSPGALKDAPQVLPGQLSVKLWYDKVGHQLIVNVLQATDLPARVDGRPRNPYVKMYFLPDRSDKSKRRTKTVKKILEPKWNQTFVYSHVHRRDFRERMLEITVWDQPRVQEEESEFLGEILIELETALLDDEPHWYKLQTHDESSLPLPQPSPFMPRRHIHGESSSKKLQRSQRISDSDISDYEVDDGIGVVPPGYRSSARESKSTTLTVPEQQRTTHHRSRSVSPHRGNDQGKPRSRLPNVPLQRSLDEIHPTRRSRSPTRHHDASRSPVDHRTRDVDSQYLSEQDRMHRQRSPTQSPPADTSFSSRRGRQLPQVPVRSGSIEQESGHKKLKSTIQRSTETGMAAEMRKMVRQPSRESTDGSINSYSSEGNLIFPGVRLGADSQFSDFLDGLGPAQLVGRQTLATPAMGDIQIGMEDKKGQLEVEVIRARSLTQKPGSKSTPAPYVKVYLLENGACIAKKKTRIARKTLDPLYQQSLVFDESPQGKVLQVIVWGDYGRMDHKCFMGVAQILLEELDLSSMVIGWYKLFPPSSLVDPTLTPLTRRASQSSLESSTGPPCIRS

SEQ ID NO: 11401 - protein, 1342 aa, Homo sapiens
MSSAVGPRGPRPPTVPPPMQELPDLSHLTEEERNIIMAVMDRQKEEEEKEEAMLKCVVRDMAKPAACKTPRNAENQPHQPSPRLHQQFESYKEQVRKIGEEARRYQGEHKDDAPTCGICHKTKFADGCGHLCSYCRTKFCARCGGRVSLRSNNEDKVVMWVCNLCRKQQEILTKSGAWFFGSGPQQTSQDGTLSDTATGAGSEVPREKKARLQERSRSQTPLSTAAASSQDAAPPSAPPDRSKGAEPSQQALGPEQKQASSRSRSEPPRERKKTPGLSEQNGKGALKSERKRVPKTSAQPVEGAVEERERKERRESRRLEKGRSQDYPDTPEKRDEGKAADEEKQRKEEDYQTRYRSDPNLARYPVKPPPEEQQMRMHARVSRARHERRHSDVALPRTEAGAALPEGKAGKRAPAAARASPPDSPRAYSAERTAETRAPGAKQLTNHSPPAPRHGPVPAEAPELKAQEPLRKQSRLDPSSAVLMRKAKREKVETMLRNDSLSSDQSESVRPSPPKPHRSKRGGKKRQMSVSSSEEEGVSTPEYTSCEDVELESESVSEKGDLDYYWLDPATWHSRETSPISSHPVTWQPSKEGDRLIGRVILNKRTTMPKDSGALLGLKVVGGKMTDLGRLGAFITKVKKGSLADVVGHLRAGDEVLEWNGKPLPGATNEEVYNIILESKSEPQVEIIVSRPIGDIPRIPESSHPPLESSSSSFESQKMERPSISVISPTSPGALKDAPQVLPGQLSVKLWYDKVGHQLIVNVLQATDLPARVDGRPRNPYVKMYFLPDRSDKSKRRTKTVKKILEPKWNQTFVYSHVHRRDFRERMLEITVWDQPRVQEEESEFLGEILIELETALLDDEPHWYKLQTHDESSLPLPQPSPFMPRRHIHGESSSKKLQRSQRISDSDISDYEVDDGIGVVPPGYRSSARESKSTTLTVPEQQRTTHHRSRSVSPHRGNDQGKPRSRLPNVPLQRSLDEIHPTRRSRSPTRHHDASRSPVDHRTRDVDSQYLSEQDSELLMLPRAKRGRSAECLHTTSELQPFLDRARSASTNCLRPDTSLHSPERERMHRQRSPTQSPPADTSFSSRRGRQLPQVPVRSGSIEQESGHKKLKSTIQRSTETGMAAEMRKMVRQPSRESTDGSINSYSSEGNLIFPGVRLGADSQFSDFLDGLGPAQLVGRQTLATPAMGDIQIGMEDKKGQLEVEVIRARSLTQKPGSKSTPAPYVKVYLLENGACIAKKKTRIARKTLDPLYQQSLVFDESPQGKVLQVIVWGDYGRMDHKCFMGVAQILLEELDLSSMVIGWYKLFPPSSLVDPTLTPLTRRASQSSLESSTGPPCIRS

SEQ ID NO: 11402 - protein, 1371 aa, Homo sapiens
MSSAVGPRGPRPPTVPPPMQELPDLSHLTEEERNIIMAVMDRQKEEEEKEEAMLKCVVRDMAKPAACKTPRNAENQPHQPSPRLHQQFESYKEQVRKIGEEARRYQGEHKDDAPTCGICHKTKFADGCGHLCSYCRTKFCARCGGRVSLRSNNEDKVVMWVCNLCRKQQEILTKSGAWFFGSGPQQTSQDGTLSDTATGAGSEVPREKKARLQERSRSQTPLSTAAASSQDAAPPSAPPDRSKGAEPSQQALGPEQKQASSRSRSEPPRERKKTPGLSEQNGKGALKSERKRVPKTSAQPVEGAVEERERKERRESRRLEKGRSQDYPDTPEKRDEGKAADEEKQRKEEDYQTRYRSDPNLARYPVKPPPEEQQMRMHARVSRARHERRHSDVALPRTEAGAALPEGKAGKRAPAAARASPPDSPRAYSAERTAETRAPGAKQLTNHSPPAPRHGPVPAEAPELKAQEPLRKQSRLDPSSAVLMRKAKREKVETMLRNDSLSSDQSESVRPSPPKPHRSKRGGKKRQMSVSSSEEEGVSTPEYTSCEDVELESESVSEKGDLDYYWLDPATWHSRETSPISSHPVTWQPSKEGDRLIGRVILNKRTTMPKDSGALLGLKVVGGKMTDLGRLGAFITKVKKGSLADVVGHLRAGDEVLEWNGKPLPGATNEEVYNIILESKSEPQVEIIVSRPIGDIPRIPESSHPPLESSSSSFESQKMERPSISVISPTSPGALKDAPQVLPGQLSVKLWYDKVGHQLIVNVLQATDLPARVDGRPRNPYVKMYFLPDRSDKSKRRTKTVKKILEPKWNQTFVYSHVHRRDFRERMLEITVWDQPRVQEEESEFLGEILIELETALLDDEPHWYKLQTHDESSLPLPQPSPFMPRRHIHGESSSKKLQRSQRISDSDISDYEVDDGIGVVPPVGYRSSARESKSTTLTVPEQQRTTHHRSRSVSPHRGNDQGKPRSRLPNVPLQRSLDEIHPTRRSRSPTRHHDASRSPVDHRTRDVDSQYLSEQDSELLMLPRAKRGRSAECLHTTSELQPFLDRARSASTNCLRPDTSLHSPERERGRWSPSLDRRRPPSPRIQIQHASPENDRMHRQRSPTQSPPADTSFSSRRGRQLPQVPVRSGSIEQESGHKKLKSTIQRSTETGMAAEMRKMVRQPSRESTDGSINSYSSEGNLIFPGVRLGADSQFSDFLDGLGPAQLVGRQTLATPAMGDIQIGMEDKKGQLEVEVIRARSLTQKPGSKSTPAPYVKVYLLENGACIAKKKTRIARKTLDPLYQQSLVFDESPQGKVLQVIVWGDYGRMDHKCFMGVAQILLEELDLSSMVIGWYKLFPPSSLVDPTLTPLTRRASQSSLESSTGPPCIRS

SEQ ID NO: 11403 - protein, 1692 aa, Homo sapiens
MSSAVGPRGPRPPTVPPPMQELPDLSHLTEEERNIIMAVMDRQKEEEEKEEAMLKCVVRDMAKPAACKTPRNAENQPHQPSPRLHQQFESYKEQVRKIGEEARRYQGEHKDDAPTCGICHKTKFADGCGHLCSYCRTKFCARCGGRVSLRSNNEDKVVMWVCNLCRKQQEILTKSGAWFFGSGPQQTSQDGTLSDTATGAGSEVPREKKARLQERSRSQTPLSTAAASSQDAAPPSAPPDRSKGAEPSQQALGPEQKQASSRSRSEPPRERKKTPGLSEQNGKGALKSERKRVPKTSAQPVEGAVEERERKERRESRRLEKGRSQDYPDTPEKRDEGKAADEEKQRKEEDYQTRYRSDPNLARYPVKPPPEEQQMRMHARVSRARHERRHSDVALPRTEAGAALPEGKAGKRAPAAARASPPDSPRAYSAERTAETRAPGAKQLTNHSPPAPRHGPVPAEAPELKAQEPLRKQSRLDPSSAVLMRKAKREKVETMLRNDSLSSDQSESVRPSPPKPHRSKRGGKKRQMSVSSSEEEGVSTPEYTSCEDVELESESVSEKGDLDYYWLDPATWHSRETSPISSHPVTWQPSKEGDRLIGRVILNKRTTMPKDSGALLGLKVVGGKMTDLGRLGAFITKVKKGSLADVVGHLRAGDEVLEWNGKPLPGATNEEVYNIILESKSEPQVEIIVSRPIGDIPRIPESSHPPLESSSSSFESQKMERPSISVISPTSPGALKDAPQVLPGQLSVKLWYDKVGHQLIVNVLQATDLPARVDGRPRNPYVKMYFLPDRSDKSKRRTKTVKKILEPKWNQTFVYSHVHRRDFRERMLEITVWDQPRVQEEESEFLGEILIELETALLDDEPHWYKLQTHDESSLPLPQPSPFMPRRHIHGESSSKKLQRSQRISDSDISDYEVDDGIGVVPPVGYRSSARESKSTTLTVPEQQRTTHHRSRSVSPHRGNDQGKPRSRLPNVPLQRSLDEIHPTRRSRSPTRHHDASRSPVDHRTRDVDSQYLSEQDSELLMLPRAKRGRSAECLHTTRHLVRHYKTLPPKMPLLQSSSHWNIYSSILPAHTKTKSVTRQDISLHHECFNSTVLRFTDEILVSELQPFLDRARSASTNCLRPDTSLHSPERERGRWSPSLDRRRPPSPRIQIQHASPENDRHSRKSERSSIQKQTRKGTASDAERVLPTCLSRRGHAAPRATDQPVIRGKHPARSRSSEHSSIRTLCSMHHLVPGGSAPPSPLLTRMHRQRSPTQSPPADTSFSSRRGRQLPQVPVRSGSIEQASLVVEERTRQMKMKVHRFKQTTGSGSSQELDREQYSKYNIHKDQYRSCDNVSAKSSDSDVSDVSAISRTSSASRLSSTSFMSEQSERPRGRISSFTPKMQGRRMGTSGRSIMKSTSVSGEMYTLEHNDGSQSDTAVGTVGAGGKKRRSSLSAKVVAIVSRRSRSTSQLSQTESGHKKLKSTIQRSTETGMAAEMRKMVRQPSRESTDGSINSYSSEGNLIFPGVRLGADSQFSDFLDGLGPAQLVGRQTLATPAMGDIQIGMEDKKGQLEVEVIRARSLTQKPGSKSTPAPYVKVYLLENGACIAKKKTRIARKTLDPLYQQSLVFDESPQGKVLQVIVWGDYGRMDHKCFMGVAQILLEELDLSSMVIGWYKLFPPSSLVDPTLTPLTRRASQSSLESSTGPPCIRS

SEQ ID NO: 11404 - protein, 1481 aa, Homo sapiens
MSSAVGPRGPRPPTVPPPMQELPDLSHLTEEERNIIMAVMDRQKEEEEKEEAMLKCVVRDMAKPAACKTPRNAENQPHQPSPRLHQQFESYKEQVRKIGEEARRYQGEHKDDAPTCGICHKTKFADGCGHLCSYCRTKFCARCGGRVSLRSNNEDKVVMWVCNLCRKQQEILTKSGAWFFGSGPQQTSQDGTLSDTATGAGSEVPREKKARLQERSRSQTPLSTAAASSQDAAPPSAPPDRSKGAEPSQQALGPEQKQASSRSRSEPPRERKKTPGLSEQNGKGALKSERKRVPKTSAQPVEGAVEERERKERRESRRLEKGRSQDYPDTPEKRDEGKAADEEKQRKEEDYQTRYRSDPNLARYPVKPPPEEQQMRMHARVSRARHERRHSDVALPRTEAGAALPEGKAGKRAPAAARASPPDSPRAYSAERTAETRAPGAKQLTNHSPPAPRHGPVPAEAPELKAQEPLRKQSRLDPSSAVLMRKAKREKVETMLRNDSLSSDQSESVRPSPPKPHRSKRGGKKRQMSVSSSEEEGVSTPEYTSCEDVELESESVSEKGDLDYYWLDPATWHSRETSPISSHPVTWQPSKEGDRLIGRVILNKRTTMPKDSGALLGLKVVGGKMTDLGRLGAFITKVKKGSLADVVGHLRAGDEVLEWNGKPLPGATNEEVYNIILESKSEPQVEIIVSRPIGDIPRIPESSHPPLESSSSSFESQKMERPSISVISPTSPGALKDAPQVLPGQLSVKLWYDKVGHQLIVNVLQATDLPARVDGRPRNPYVKMYFLPDRSDKSKRRTKTVKKILEPKWNQTFVYSHVHRRDFRERMLEITVWDQPRVQEEESEFLGEILIELETALLDDEPHWYKLQTHDESSLPLPQPSPFMPRRHIHGESSSKKLQRSQRISDSDISDYEVDDGIGVVPPVGYRSSARESKSTTLTVPEQQRTTHHRSRSVSPHRGNDQGKPRSRLPNVPLQRSLDEIHPTRRSRSPTRHHDASRSPVDHRTRDVDSQYLSEQDSELLMLPRAKRGRSAECLHTTSELQPFLDRARSASTNCLRPDTSLHSPERERMHRQRSPTQSPPADTSFSSRRGRQLPQVPVRSGSIEQASLVVEERTRQMKMKVHRFKQTTGSGSSQELDREQYSKYNIHKDQYRSCDNVSAKSSDSDVSDVSAISRTSSASRLSSTSFMSEQSERPRGRISSFTPKMQGRRMGTSGRSIMKSTSVSGEMYTLEHNDGSQSDTAVGTVGAGGKKRRSSLSAKVVAIVSRRSRSTSQLSQTESGHKKLKSTIQRSTETGMAAEMRKMVRQPSRESTDGSINSYSSEGNLIFPGVRLGADSQFSDFLDGLGPAQLVGRQTLATPAMAPYVKVYLLENGACIAKKKTRIARKTLDPLYQQSLVFDESPQGKVLQVIVWGDYGRMDHKCFMGVAQILLEELDLSSMVIGWYKLFPPSSLVDPTLTPLTRRASQSSLESSTGPPCIRS

SEQ ID NO: 11405 - protein, 1475 aa, Homo sapiens
MSSAVGPRGPRPPTVPPPMQELPDLSHLTEEERNIIMAVMDRQKEEEEKEEAMLKCVVRDMAKPAACKTPRNAENQPHQPSPRLHQQFESYKEQVRKIGEEARRYQGEHKDDAPTCGICHKTKFADGCGHLCSYCRTKFCARCGGRVSLRSNNEDKVVMWVCNLCRKQQEILTKSGAWFFGSGPQQTSQDGTLSDTATGAGSEVPREKKARLQERSRSQTPLSTAAASSQDAAPPSAPPDRSKGAEPSQQALGPEQKQASSRSRSEPPRERKKTPGLSEQNGKGALKSERKRVPKTSAQPVEGAVEERERKERRESRRLEKGRSQDYPDTPEKRDEGKAADEEKQRKEEDYQTRYRSDPNLARYPVKPPPEEQQMRMHARVSRARHERRHSDVALPRTEAGAALPEGKAGKRAPAAARASPPDSPRAYSAERTAETRAPGAKQLTNHSPPAPRHGPVPAEAPELKAQEPLRKQSRLDPSSAVLMRKAKREKVETMLRNDSLSSDQSESVRPSPPKPHRSKRGGKKRQMSVSSSEEEGVSTPEYTSCEDVELESESVSEKGDLDYYWLDPATWHSRETSPISSHPVTWQPSKEGDRLIGRVILNKRTTMPKDSGALLGLKVVGGKMTDLGRLGAFITKVKKGSLADVVGHLRAGDEVLEWNGKPLPGATNEEVYNIILESKSEPQVEIIVSRPIGDIPRIPESSHPPLESSSSSFESQKMERPSISVISPTSPGALKDAPQVLPGQLSVKLWYDKVGHQLIVNVLQATDLPARVDGRPRNPYVKMYFLPDRSDKSKRRTKTVKKILEPKWNQTFVYSHVHRRDFRERMLEITVWDQPRVQEEESEFLGEILIELETALLDDEPHWYKLQTHDESSLPLPQPSPFMPRRHIHGESSSKKLQRSQRISDSDISDYEVDDGIGVVPPGYRSSARESKSTTLTVPEQQRTTHHRSRSVSPHRGNDQGKPRSRLPNVPLQRSLDEIHPTRRSRSPTRHHDASRSPVDHRTRDVDSQYLSEQDSELLMLPRAKRGRSAECLHTTRMHRQRSPTQSPPADTSFSSRRGRQLPQVPVRSGSIEQASLVVEERTRQMKMKVHRFKQTTGSGSSQELDREQYSKYNIHKDQYRSCDNVSAKSSDSDVSDVSAISRTSSASRLSSTSFMSEQSERPRGRIRRMGTSGRSIMKSTSVSGEMYTLEHNDGSQSDTAVGTVGAGGKKRRSSLSAKVVAIVSRRSRSTSQLSQTESGHKKLKSTIQRSTETGMAAEMRKMVRQPSRESTDGSINSYSSEGNLIFPGVRLGADSQFSDFLDGLGPAQLVGRQTLATPAMGDIQIGMEDKKGQLEVEVIRARSLTQKPGSKSTPAPYVKVYLLENGACIAKKKTRIARKTLDPLYQQSLVFDESPQGKVLQVIVWGDYGRMDHKCFMGVAQILLEELDLSSMVIGWYKLFPPSSLVDPTLTPLTRRASQSSLESSTGPPCIRS

SEQ ID NO: 11406 - protein, 740 aa, Homo sapiens
RPRNPYVKMYFLPDRSDKSKRRTKTVKKILEPKWNQTFVYSHVHRRDFRERMLEITVWDQPRVQEEESEFLGEILIELETALLDDEPHWYKLQTHDESSLPLPQPSPFMPRRHIHGESSSKKLQRSQRISDSDISDYEVDDGIGVVPPVGYRSSARESKSTTLTVPEQQRTTHHRSRSVSPHRGNDQGKPRSRLPNVPLQRSLDEIHPTRRSRSPTRHHDASRSPVDHRTRDVDSQYLSEQDSELLMLPRAKRGRSAECLHTTSELQPFLDRARSASTNCLRPDTSLHSPERERMHRQRSPTQSPPADTSFSSRRGRQLPQVPVRSGSIEQASLVVEERTRQMKMKVHRFKQTTGSGSSQELDREQYSKYNIHKDQYRSCDNVSAKSSDSDVSDVSAISRTSSASRLSSTSFMSEQSERPRGRISSFTPKMQGRRMGTSGRSIMKSTSVSGEMYTLEHNDGSQSDTAVGTVGAGGKKRRSSLSAKVVAIVSRRSRSTSQLSQTESGHKKLKSTIQRSTETGMAAEMRKMVRQPSRESTDGSINSYSSEGNLIFPGVRLGADSQFSDFLDGLGPAQLVGRQTLATPAMGDIQIGMEDKKGQLEVEVIRARSLTQKPGSKSTPAPYVKVYLLENGACIAKKKTRIARKTLDPLYQQSLVFDESPQGKVLQVIVWGDYGRMDHKCFMGVAQILLEELDLSSMVIGWYKLFPPSSLVDPTLTPLTRRASQSSLESSTGPPCIRS

SEQ ID NO: 11407 - protein, 610 aa, Homo sapiens
  SITE 1: note = misc_feature - Xaa can be any naturally occurring amino acid
XDYEVDDGIGVVPPVGYRSSARESKSTTLTVPEQQRTTHHRSRSVSPHRGNDQGKPRSRLPNVPLQRSLDEIHPTRRSRSPTRHHDASRSPVDHRTRDVDSQYLSEQDSELLMLPRAKRGRSAECLHTTRHSRKSERSSIQKQTRKGTASDAERMHRQRSPTQSPPADTSFSSRRGRQLPQVPVRSGSIEQEQEKYNSSTKASLVVEERTRQMKMKVHRFKQTTGSGSSQELDREQYSKYNIHKDQYRSCDNVSAKSSDSDVSDVSAISRTSSASRLSSTSFMSEQSERPRGRISSFTPKMQGRRMGTSGRSIMKSTSVSGEMYTLEHNDGSQSDTAVGTVGAGGKKRRSSLSAKVVAIVSRRSRSTSQLSQTESGHKKLKSTIQRSTETGMAAEMRKMVRQPSRESTDGSINSYSSEGNLIFPGVRLGADSQFSDFLDGLGPAQLVGRQTLATPAMGDIQIGMEDKKGQLEVEVIRARSLTQKPGSKSTPAPYVKVYLLENGACIAKKKTRIARKTLDPLYQQSLVFDESPQGKVLQVIVWGDYGRMDHKCFMGVAQILLEELDLSSMVIGWYKLFPPSSLVDPTLTPLTRRASQSSLESSTGPPCIRS

SEQ ID NO: 11408 - protein, 1038 aa, Homo sapiens
  SITE 1: note = misc_feature - Xaa can be any naturally occurring amino acid
XYSAERTAETRAPGAKQLTNHSPPAPRHGPVPAEAPELKAQEPLRKQSRLDPSSAVLMRKAKREKVETMLRNDSLSSDQSESVRPSPPKPHRSKRGGKKRQMSVSSSEEEGVSTPEYTSCEDVELESESVSEKGDLDYYWLDPATWHSRETSPISSHPVTWQPSKEGDRLIGRVILNKRTTMPKDSGALLGLKVVGGKMTDLGRLGAFITKVKKGSLADVVGHLRAGDEVLEWNGKPLPGATNEEVYNIILESKSEPQVEIIVSRPIGDIPRIPESSHPPLESSSSSFESQKMERPSISVISPTSPGALKDAPQVLPGQLSVKLWYDKVGHQLIVNVLQATDLPARVDGRPRNPYVKMYFLPDRSDKSKRRTKTVKKILEPKWNQTFVYSHVHRRDFRERMLEITVWDQPRVQEEESEFLGEILIELETALLDDEPHWYKLQTHDESSLPLPQPSPFMPRRHIHGESSSKKLQRSQRISDSDISDYEVDDGIGVVPPVGYRSSARESKSTTLTVPEQQRTTHHRSRSVSPHRGNDQGKPRSRLPNVPLQRSLDEIHPTRRSRSPTRHHDASRSPVDHRTRDVDSQYLSEQDRMHRQRSPTQSPPADTSFSSRRGRQLPQVPVRSGSIEQASLVVEERTRQMKMKVHRFKQTTGSGSSQELDREQYSKYNIHKDQYRSCDNVSAKSSDSDVSDVSAISRTSSASRLSSTSFMSEQSERPRGRISSFTPKMQGRRMGTSGRSIMKSTSVSGEMYTLEHNDGSQSDTAVGTVGAGGKKRRSSLSAKVVAIVSRRSRSTSQLSQTESGHKKLKSTIQRSTETGMAAEMRKMVRQPSRESTDGSINSYSSEGNLIFPGVRLGADSQFSDFLDGLGPAQLVGRQTLATPAMGDIQIGMEDKKGQLEVEVIRARSLTQKPGSKSTPAPYVKVYLLENGACIAKKKTRIARKTLDPLYQQSLVFDESPQGKVLQVIVWGDYGRMDHKCFMGVAQILLEELDLSSMVIGWYKLFPPSSLVDPTLTPLTRRASQSSLESSTGPPCIRS

SEQ ID NO: 11409 - protein, 151 aa, Homo sapiens
MDSAACAAAATPVPALALALAPDLAQAPLALPGLLSPSCLLSSGQEVNGSERGTCLWRPWLSSTNDSPRQMRKLVDLAAGGATAAEVTKAESKFHHPVRLFWPKSRSFDYLYSAGEILLQNFPVQATINLYEDSDSEEEEEDEEQEDEEEK

SEQ ID NO: 11410 - protein, 104 aa, Homo sapiens
MDSAACAAAATPVPALALALAPDLAQAPLALPGLLSPSCLLSSGQEVNGSERLFWPKSRSFDYLYSAGEILLQNFPVQATINLYEDSDSEEEEEDEEQEDEEEK

SEQ ID NO: 11411 - protein, 185 aa, Homo sapiens
MPRLFLFHLLEFCLLLNQFSRAVAAKWKDDVIKLCGRELVRAQIAICGMSTWSKRSLSQEDAPQTPRPVAEIVPSFINKDTETIIIMLEFIANLPPELKAALSERQPSLPELQQYVPALKDSNLSFEEFKKLIRNRQSEAADSNPSELKYLGLDTHSQKKRRPYVALFEKCCLIGCTKRSLAKYC

SEQ ID NO: 11412 - protein, 185 aa, Homo sapiens
MPRLFFFHLLGVCLLLNQFSRAVADSWMEEVIKLCGRELVRAQIAICGMSTWSKRSLSQEDAPQTPRPVAEIVPSFINKDTETINMMSEFVANLPQELKLTLSEMQPALPQLQQHVPVLKDSSLLFEEFKKLIRNRQSEAADSSPSELKYLGLDTHSRKKRQLYSALANKCCHVGCTKRSLARFC

SEQ ID NO: 11413 - protein, 68 aa, Homo sapiens
  SITE 1: note = misc_feature - Xaa can be any naturally occurring amino acid
XTWSKRSLSQEDAPQTPRPVAGDFIQTVSLGISPDGGKALRTGSCFTREFLGALSKLCHPSSTKIQKP

SEQ ID NO: 11414 - protein, 109 aa, Homo sapiens
MARYMLLLLLAVWVLTGELWPGAEARAAPYGVRLCGREFIRAVIFTCGGSRWRRSDILAHEAMEKNIEAPRSKFTCSRLEKLDSCSVSPAPKCTRSSINKERYLPGCRC

SEQ ID NO: 11415 - protein, 142 aa, Homo sapiens
MARYMLLLLLAVWVLTGELWPGAEARAAPYGVRLCGREFIRAVIFTCGGSRWRRSDILAHEAMGDTFPDADADEDSLAGELDEAMGSSEWLALTKSPQAFYRGRPSWQGTPGVLRGSRDVLAGLSSSCCKWGCSKSEISSLC

SEQ ID NO: 11416 - protein, 165 aa, Homo sapiens
EEKKLLVYEALEYAKRALEKNESSFASHKWYAICLSDVGDYEGIKAKIANAYIIKEHFEKAIELNPKDATSIHLMGIWCYTFAEMPWYQRRIAKMLFATPPSSTYEKALGYFHRAEQGKTYLKLHNKKLAAFWLMKAKDYPAHTEEDKQIQTEAAQLLTSFSEKN

SEQ ID NO: 11417 - protein, 108 aa, Homo sapiens
MALAARLWRLLPFRRGAAPGSRLPAGTSGSRGHCGPCRFRGFEVMGNPGTFKRGLLLSALSYLGFETYQVISQAAVVHATAKESRCVTEGRVWRCDLSSLQPLPPGFK

SEQ ID NO: 11418 - protein, 271 aa, Homo sapiens
MALAARLWRLLPFRRGAAPGSRLPAGTSGSRGHCGPCRFRGFEVMGNPGTFKRGLLLSALSYLGFETYQVISQAAVVHATAKVEEILEQADYLYESGETEKLYQLLTQYKESEDAELLWRLARASRDVAQLSRTSEEEKKLLVYEALEYAKRALEKNESSFASHKKAIELNPKDATSIHLMGIWCYTFAEMPWYQRRIAKMLFATPPSSTYEKALGYFHRAEQGKTYLKLHNKKLAAFWLMKAKDYPAHTEEDKQIQTEAAQLLTSFSEKN

SEQ ID NO: 11419 - protein, 284 aa, Homo sapiens
MALAARLWRLLPFRRGAAPGSRLPAGTSGSRGHCGPCRFRGFEVMGNPGTFKRGLLLSALSYLGFETYQVISQAAVVHATAKVEEILEQADYLYESGETEKLYQLLTQYKESEDAELLWRLARASRDVAQLSRTSEEEKKLLVYEALEYAKRALEKNESSFASHKKAIELNPKDATSIHLMGIWCYTFAEMPWYQRRIAKMLFATPPSSTYEKALGYFHRAEQVDPNFYSKNLLLLGKTYLKLHNKKLAAFWLMKAKDYPAHTEEDKQIQTEAAQLLTSFSEKN

SEQ ID NO: 11420 - protein, 314 aa, Homo sapiens
MALAARLWRLLPFRRGAAPGSRLPAGTSGSRGHCGPCRFRGFEVMGNPGTFKRGLLLSALSYLGFETYQVISQAAVVHATAKVEEILEQADYLYESGETEKLYQLLTQYKESEDAELLWRLARASRDVAQLSRTSEEEKKLLVYEALEYAKRALEKNESSFASHKWYAICLSDVGDYEGIKAKIANAYIIKEHFEKAIELNPKDATSIHLMGIWCYTFAEMPWYQRRIAKMLFATPPSSTYEKALGYFHRAEQVDPNFYSKNLLLLGKTYLKLHNKKLAAFWLMKAKDYPAHTEEDKQIQTEAAQLLTSFSEKN

SEQ ID NO: 11421 - protein, 64 aa, Homo sapiens
MGNPGTFKRGLLLSALSYLGFETYQVISQAAVVHATAKESRCVTEGRVWRCDLSSLQPLPPGFK

SEQ ID NO: 11422 - protein, 95 aa, Homo sapiens
MGNPGTFKRGLLLSALSYLGFETYQVISQAAVVHATAKVEEILEQADYLYESGETEKLYQLLTQYKESEDAELLWRLARASRDVAQLSRTSEEEK

SEQ ID NO: 11423 - protein, 248 aa, Homo sapiens
MGNPGTFKRGLLLSALSYLGFETYQVISQAAVVHATAKVEEILEQADYLYESGETEKLYQLLTQYKESEDAELLWRLARASRDVAQLSRTSEEEKKLLVYEALEYAKRALEKNESSFASHKWYAICLSDVGDYEGIKAKIANAYIIKEHFEKAIELNPKDATSIHLMGIWCYTFAEMPWYQRRIAKMLFATPPSSTYEKALGYFHRAEQGKTYLKLHNKKLAAFWLMKAKDYPAHTEEDKQVKRNRSS

SEQ ID NO: 11424 - protein, 42 aa, Homo sapiens
MGNPGTFKRGLLLSALSYLGFETYQVISQAAVVHATAKVRQY

SEQ ID NO: 11425 - protein, 159 aa, Homo sapiens
  SITE 1: note = misc_feature - Xaa can be any naturally occurring amino acid
XCYTFAEMPWYQRRIAKMLFATPPSSTYEKALGYFHRAEQVDPNFYSKNLLLLGKTYLKLHNKKLAAFWLMKAKDYPAHTEEDKQEPDSPRVTLVRDVSPLRVRPITENKPQESLTFSFPCSPHLIVLVWIPELTAGLRCLFPHVHVYQRFCVASPSAS

SEQ ID NO: 11426 - protein, 107 aa, Homo sapiens
  SITE 1: note = misc_feature - Xaa can be any naturally occurring amino acid
XKAIELNPKDATSIHLMGIWCYTFAEMPWYQRRIAKMLFATPPSSTYEKALGYFHRAEQVDPNFYSKNLLLLGKTYLKLHNKKLAAFWLMKAKDYPAHTEEDKQEII

SEQ ID NO: 11427 - protein, 151 aa, Homo sapiens
  SITE 1: note = misc_feature - Xaa can be any naturally occurring amino acid
XKNESSFASHKWYAICLSDVGDYEGIKAKIANAYIIKEHFEKAIELNPKDATSIHLMGIWCYTFAEMPWYQRRIAKMLFATPPSSTYEKALGYFHRAEQVDPNFYSKNLLLLGKTYLKLHNKKLAAFWLMKAKDYPAHTEEDKQVKRNRSS

SEQ ID NO: 11428 - protein, 130 aa, Homo sapiens
  SITE 1: note = misc_feature - Xaa can be any naturally occurring amino acid
XKTYLKLHNKKLAAFWLMKAKDYPAHTEEDKQEPDSPRVTLVRDVSPLRVRPITENKPQESLTFSFPCSPHLIVLVWIPELTAGLRCLFPHVHVYQSLKITRVFIIRIWKRSLFNQADLCLSFVFTMNSE

SEQ ID NO: 11429 - protein, 225 aa, Homo sapiens
  SITE 1: note = misc_feature - Xaa can be any naturally occurring amino acid
XLLSALSYLGFETYQVISQAAVVHATAKVEEILEQADYLYESGETEKLYQLLTQYKESEDAELLWRLARASRDVAQLSRTSEEEKKLLVYEALEYAKRALEKNESSFASHKWYAICLSDVGDYEGIKAKIANAYIIKEHFEKAIELNPKDATSIHLMGIWCYTFAEMPWYQRRIAKMLFATPPSSTYEKALGYFHRAEQGEEKQKQLKGQEVGLSRDVAFCWMAF

SEQ ID NO: 11430 - protein, 156 aa, Homo sapiens
MALEKSLVRLLLLVLILLVLGWVQPSLGKESRAKKFQRQHMDSDSSPSSSSTYCNQMMRRRNMTQGRCKPVNTFVHEPLVDVQNVCFQEKVTCKNGQGNCYKSNSSMHITDCRLTNGSRYPNCAYRTSPKERHIIVACEGSPYVPVHFDASVEDST

SEQ ID NO: 11431 - protein, 156 aa, Homo sapiens; identical to SEQ ID NO: 11430

SEQ ID NO: 11432 - protein, 156 aa, Homo sapiens; identical to SEQ ID NO: 11430

SEQ ID NO: 11433 - protein, 156 aa, Homo sapiens; identical to SEQ ID NO: 11430

SEQ ID NO: 11434 - protein, 116 aa, Homo sapiens
MDSDSSPSSSSTYCNQMMRRRNMTQGRCKPVNTFVHEPLVDVQNVCFQEKVTCKNGQGNCYKSNSSMHITDCRLTNGSRYPNCAYRTSPKERHIIVACEGSPYVPVHFDASVEDST

SEQ ID NO: 11435 - protein, 216 aa, Homo sapiens
MKLNLVQIFFMLLMLLLGLGMGLGLGLHMATAVLEESDQPLNEFWSSDSQDKAEATEEGDGTQTTETLVLSNKEVVQPGWPEDPILGEDEVGGNKMLRASALFQSNKDYLRLDQTDRECNDMMAHKMKEPSQSCIAQYAFIHEDLNTVKAVCNSPVIACELKGGKCHKSSRPFDLTLCELSQPDQVTPNCNYLTSVIKKHIIITCNDMKRQLPTGQ

SEQ ID NO: 11436 - protein, 244 aa, Homo sapiens
MWGAPLPRRPVWDVRSASAGPQPCLGGKMKLNLVQIFFMLLMLLLGLGMGLGLGLHMATAVLEESDQPLNEFWSSDSQDKAEATEEGDGTQTTETLVLSNKEVVQPGWPEDPILGEDEVGGNKMLRASALFQSNKDYLRLDQTDRECNDMMAHKMKEPSQSCIAQYAFIHEDLNTVKAVCNSPVIACELKGGKCHKSSRPFDLTLCELSQPDQVTPNCNYLTSVIKKHIIITCNDMKRQLPTGQ

SEQ ID NO: 11437 - protein, 136 aa, Homo sapiens
METFPLLLLSLGLVLAEASESTMKIIKEEFTDEEMQYDMAKSGQEKQTIEILMNPILLVKNTSLSMSKDDMSSTLLTFRSLHYNDPKGNSSGNDKECCNDMTVWRKVSEANGSCKWSNNFIRSSTEVMRRVHRAPS

SEQ ID NO: 11438 - protein, 143 aa, Homo sapiens
METFPLLLLSLGLVLAEASESTMKIIKEEFTDEEMQYDMAKSGQEKQTIEILMNPILLVKNTSLSMSKDDMSSTLLTFRSLHYNDPKGNSSGNDKECCNDMTVWRKVSEANGSCKWSNNFIRSSTEVMRRVHRAPSCKFVQNP

SEQ ID NO: 11439 - protein, 171 aa, Homo sapiens
METFPLLLLSLGLVLAEASESTMKIIKEEFTDEEMQYDMAKSGQEKQTIEILMNPILLVKNTSLSMSKDDMSSTLLTFRSLHYNDPKGNSSGNDKECCNDMTVWRKVSEANGSCKWSNNFIRSSTEVMRRVHRAPSCKFVQNPGISCCESLELENTVCQFTTGKQFPRCQY

SEQ ID NO: 11440 - protein, 178 aa, Homo sapiens
METFPLLLLSLGLVLAEASESTMKIIKEEFTDEEMQYDMAKSGQEKQTIEILMNPILLVKNTSLSMSKDDMSSTLLTFRSLHYNDPKGNSSGNDKECCNDMTVWRKVSEANGSCKWSNNFIRSSTEVMRRVHRAPSCKFVQNPGISCCESLELENTVCQFTTGKQFPRCQYHSVTSLE

SEQ ID NO: 11441 - protein, 178 aa, Homo sapiens; identical to SEQ ID NO: 11440

SEQ ID NO: 11442 - protein, 199 aa, Homo sapiens
METFPLLLLSLGLVLAEASESTMKIIKEEFTDEEMQYDMAKSGQEKQTIEILMNPILLVKNTSLSMSKDDMSSTLLTFRSLHYNDPKGNSSGNDKECCNDMTVWRKVSEANGSCKWSNNFIRSSTEVMRRVHRAPSCKFVQNPGISCCESLELENTVCQFTTGKQFPRCQYHSVTSLEKILTVLTGHSLMSWLVCGSKL

SEQ ID NO: 11443 - protein, 199 aa, Homo sapiens; identical to SEQ ID NO: 11442

SEQ ID NO: 11444 - protein, 199 aa, Homo sapiens; identical to SEQ ID NO: 11442

SEQ ID NO: 11445 - protein, 199 aa, Homo sapiens; identical to SEQ ID NO: 11442

SEQ ID NO: 11446 - protein, 199 aa, Homo sapiens; identical to SEQ ID NO: 11442

SEQ ID NO: 11447 - protein, 199 aa, Homo sapiens; identical to SEQ ID NO: 11442

SEQ ID NO: 11448 - protein, 147 aa, Homo sapiens
MIIMVIIFLVLLFWENEVNDEAVMSTLEHLHVDYPQNDVPVPARYCNHMIIQRVIREPDHTCKKEHVFIHERPRKINGICISPKKVACQNLSAIFCFQSETKFKMTVCQLIEGTRYPACRYHYSPTEGFVLVTCDDLRPDSFLGYVK

SEQ ID NO: 11449 - protein, 156 aa, Homo sapiens
MAPAVTRLLFLQLVLGPTLVMDIKMQIGSRNFYTLSIDYPRVNYPKGFRGYCNGLMSYMRGKMQNSDCPKIHYVIHAPWKAIQKFCKYSDSFCENYNEYCTLTQDSLPITVCSLSHQQPPTSCYYNSTLTNQKLYLLCSRKYEADPIGIAGLYSGI

SEQ ID NO: 11450 - protein, 161 aa, Homo sapiens
MVPKLFTSQICLLLLLGLLAVEGSLHVKPPQFTWAQWFETQHINMTSQQCTNAMQVINNYQRRCKNQNTFLLTTFANVVNVCGNPNMTCPSNKTRKNCHHSGSQVPLIHCNLTTPSPQNISNCRYAQTPANMFYIVACDNRDQRRDPPQYPVVPVHLDRII

SEQ ID NO: 11451 - protein, 160 aa, Homo sapiens
MVPKLFTSQICLLLLLGLMGVEGSLHARPPQFTRAQWFAIQHISLNPPRCTIAMRAINNYRWRCKNQNTFLRTTFANVVNVCGNQSIRCPHNRTLNNCHRSRFRVPLLHCDLINPGAQNISNCTYADRPGRRFYVVACDNRDPRDSPRYPVVPVHLDTTI

SEQ ID NO: 11452 - protein, 147 aa, Homo sapiens
MALQRTHSLLLLLLLTLLGLGLVQPSYGQDGMYQRFLRQHVHPEETGGSDRYCNLMMQRRKMTLYHCKRFNTFIHEDIWNIRSICSTTNIQCKNGKMNCHEGVVKVTDCRDTGSSRAPNCRYRAIASTRRVVIACEGNPQVPVHFDG

SEQ ID NO: 11453 - protein, 147 aa, Homo sapiens; identical to SEQ ID NO: 11452

SEQ ID NO: 11454 - protein, 147 aa, Homo sapiens; identical to SEQ ID NO: 11452

SEQ ID NO: 11455 - protein, 150 aa, Homo sapiens
MVLCFPLLLLLLVLWGPVCPLHAWPKRLTKAHWFEIQHIQPSPLQCNRAMSGINNYTQHCKHQNTFLHDSFQNVAAVCDLLSIVCKNRRHNCHQSSKPVNMTDCRLTSGKYPQCRYSAAAQYKFFIVACDPPQKSDPPYKLVPVHLDSIL

SEQ ID NO: 11456 - protein, 156 aa, Homo sapiens
MAPARAGFCPLLLLLLLGLWVAEIPVSAKPKGMTSSQWFKIQHMQPSPQACNSAMKNINKHTKRCKDLNTFLHEPFSSVAATCQTPKIACKNGDKNCHQSHGAVSLTMCKLTSGKHPNCRYKEKRQNKSYVVACKPPQKKDSQQFHLVPVHLDRVL

SEQ ID NO: 11457 - protein, 156 aa, Homo sapiens; identical to SEQ ID NO: 11456

SEQ ID NO: 11458 - protein, 154 aa, Homo sapiens
MAPARAGCCPLLLLLLGLWVAEVLVRAKPKDMTSSQWFKTQHVQPSPQACNSAMSIINKYTERCKDLNTFLHEPFSSVAITCQTPNIACKNSCKNCHQSHGPMSLTMGELTSGKYPNCRYKEKHLNTPYIVACDPPQQGDPGYPLVPVHLDKVV

SEQ ID NO: 11459 - protein, 205 aa, Homo sapiens
MMRTLITTHPLPLLLLPQQLLQLVQFQEVDTDFDFPEEDKKEEFEECLEKFFSTGPARPPTKEKVKRRVLIEPGMPLNHIEYCNHEIMGKNVYYKHRWVAEHYFLLMQYDELQKICYNRFVPCKNGIRKCNRSKGLVEGVYCNLTEAFEIPACKYESLYRKGYVLITCSWQNEMQKRIPHTINDLVEPPEHRSFLSEDGVFVISP

SEQ ID NO: 11460 - protein, 205 aa, Homo sapiens; identical to SEQ ID NO: 11459

SEQ ID NO: 11461 - protein, 205 aa, Homo sapiens; identical to SEQ ID NO: 11459

SEQ ID NO: 11462 - protein, 205 aa, Homo sapiens; identical to SEQ ID NO: 11459

SEQ ID NO: 11463 - protein, 205 aa, Homo sapiens; identical to SEQ ID NO: 11459

SEQ ID NO: 11464 - protein, 205 aa, Homo sapiens; identical to SEQ ID NO: 11459

SEQ ID NO: 11465 - protein, 210 aa, Homo sapiens
MSAGKMMRTLITTHPLPLLLLPQQLLQLVQFQEVDTDFDFPEEDKKEEFEECLEKFFSTGPARPPTKEKVKRRVLIEPGMPLNHIEYCNHEIMGKNVYYKHRWVAEHYFLLMQYDELQKICYNRFVPCKNGIRKCNRSKGLVEGVYCNLTEAFEIPACKYESLYRKGYVLITCSWQNEMQKRIPHTINDLVEPPEHRSFLSEDGVFVISP

SEQ ID NO: 11466 - protein, 210 aa, Homo sapiens; identical to SEQ ID NO: 11465

SEQ ID NO: 11467 - protein, 210 aa, Homo sapiens; identical to SEQ ID NO: 11465

SEQ ID NO: 11468 - protein, 210 aa, Homo sapiens; identical to SEQ ID NO: 11465

SEQ ID NO: 11469 - protein, 210 aa, Homo sapiens; identical to SEQ ID NO: 11465

SEQ ID NO: 11470 - protein, 43 aa, Homo sapiens
MSWLLFLAHRVALAALPCRRGSRGFGMFYAVRRGRKTGVFLTC

SEQ ID NO: 11471 - protein, 43 aa, Homo sapiens
MSWLLFLAHRVALAALPCRRGSRGFGMFYAVRRGRKTGVFLTW

SEQ ID NO: 11472 - protein, 286 aa, Homo sapiens
MSWLLFLAHRVALAALPCRRGSRGFGMFYAVRRGRKTGVFLTWNECRAQVDRFPAARFKKFATEDEAWAFVRKSASPEVSEGHENQHGQESEAKASKRLREPLDGDGHESAEPYAKHMKPSVEPAPPVSRDTFSYMGDFVVVYTDGCCSSNGRRRPRAGIGVYWGPGHPLNVGIRLPGRQTNQRAEIHAACKAIEQAKTQNINKLVLYTDSMFTINGITNWVQGWKKNGWKTSAGKEVINKEDFVALERLTQGMDIQWMHVPGHSGFIGNEEADRLAREGAKQSED

SEQ ID NO: 11473 - protein, 254 aa, Homo sapiens
MRPAALRGALLGCLCLALLCLGGADKRLRDNHEWKKLIMVQHWPETVCEKIQNDCRDPPDYWTIHGLWPDKSEGCNRSWPFNLEEIKDLLPEMRAYWPDVIHSFPNRSRFWKHEWEKHGTCAAQVDALNSQKKYFGRSLELYRELDLNSVLLKLGIKPSINYYQVADFKDALARVYGVIPKIQCLPPSQDEEVQTIGQIELCLTKQDQQLQNCTEPGEQPSPKQEVWLANGAAESRGLRVCEDGPVFYPPPKKT

SEQ ID NO: 11474 - protein, 256 aa, Homo sapiens
MRPAALRGALLGCLCLALLCLGGADKRLRDNHEWKKLIMVQHWPETVCEKIQNDCRDPPDYWTIHGLWPDKSEGCNRSWPFNLEEIKDLLPEMRAYWPDVIHSFPNRSRFWKHEWEKHGTCAAQVDALNSQKKYFGRSLELYRELDLNSVLLKLGIKPSINYYQVADFKDALARVYGVIPKIQCLPPSQDEEVQTIGQIELCLTKQDQQLQNCTEPGEQPSPKQEVWLANGAAESRGLRVCEDGPVFYPPPKKTKH

SEQ ID NO: 11475 - protein, 256 aa, Homo sapiens; identical to SEQ ID NO: 11474

SEQ ID NO: 11476 - protein, 238 aa, Homo sapiens
MRPAALRGALLGCLCLALLCLGGADKRLRDNHEWKKLIMVQHWPETVCEKIQNDCRDPPDYWTIHGLWPDKSEGCNRSWPFNLEEIKKNWMEITDSSLPSPSMGPAPPRWMRSTPRRSTLAEAWNSTGSWTSTGGCALPPAALPSGDLCCRPSLTAGSRGVGVDLTALQQLLHVHYSATGIIPEECSEPTKPFQIILHHDHTEWVQSIGMPIWTISSSESAIGKTRTQPACAVLSHDS

SEQ ID NO: 11477 - protein, 121 aa, Homo sapiens
MRPAALRGALLGCLCLALLCLGGADKRLRDNHEWKKLIMVQHWPETVCEKIQNDCRDPPDYWTIHGLWPDKSEGCNRSWPFNLEEIKKNWMEITDSSLPSPSTLPIINIFYSVLHLLQLMN

SEQ ID NO: 11478 - protein, 306 aa, Homo sapiens [sequence omitted]

SEQ ID NO: 11479 - protein, 71 aa, Homo sapiens
MRPAALRGALLGCLCLALLCLGGADKRLRDNHEWKKLIMVQHWPETVCEKIQNDCRDPPDYWTIHGLWQAR

SEQ ID NO: 11480 - protein, 218 aa, Homo sapiens
MVQHWPETVCEKIQNDCRDPPDYWTIHGLWPDKSEGCNRSWPFNLEEIKDLLPEMRAYWPDVIHSFPNRSRFWKHEWEKHGTCAAQVDALNSQKKYFGRSLELYRELDLNSVLLKLGIKPSINYYQVADFKDALARVYGVIPKIQCLPPSQDEEVQTIGQIELCLTKQDQQLQNCTEPGEQPSPKQEVWLANGAAESRGLRVCEDGPVFYPPPKKTKH

SEQ ID NO: 11481 - protein, 9 aa, Homo sapiens
MAGCGEIDH

SEQ ID NO: 11482 - protein, 358 aa, Homo sapiens
MAGCGEIDHSINMLPTNRKANESCSNTAPSLTVPECAICLQTCVHPVSLPCKHVFCYLCVKGASWLGKRCALCRQEIPEDFLDKPTLLSPEELKAASRGNGEYAWYYEGRNGWWQYDERTSRELEDAFSKGKKNTEMLIAGFLYVADLENMVQYRRNEHGRRRKIKRDIIDIPKKGVAGLRLDCDANTVNLARESSADGADSVSAQSGASVQPLVSSVRPLTSVDGQLTSPATPSPDASTSLEDSFAHLQLSGDNTAERSHRGEGEEDHESPSSGRVPAPDTSIEETESDASSDSEDVSAVVAQHSLTQQRLLVSNANQTVPDRSDRSGTDRSVAGGGTVSVSVRSRRPDGQCTVTEV

SEQ ID NO: 11483 - protein, 358 aa, Homo sapiens; identical to SEQ ID NO: 11482

SEQ ID NO: 11484 - protein, 14 aa, Homo sapiens
MCWGSSIFMLFSPL

SEQ ID NO: 11485 - protein, 42 aa, Homo sapiens
MCWGSSIFMLFSPLVLYDCYLYEALVITKHFFCPFLPELCKL

SEQ ID NO: 11486 - protein, 42 aa, Homo sapiens; identical to SEQ ID NO: 11485

SEQ ID NO: 11487 - protein, 42 aa, Homo sapiens; identical to SEQ ID NO: 11485

SEQ ID NO: 11488 - protein, 40 aa, Homo sapiens
MGSSIFMLFSPLVLYDCYLYEALVITKHFFCPFLPELCKL

SEQ ID NO: 11489 - protein, 40 aa, Homo sapiens; identical to SEQ ID NO: 11488

SEQ ID NO: 11490 - protein, 359 aa, Homo sapiens
MMAGCGEIDHSINMLPTNRKANESCSNTAPSLTVPECAICLQTCVHPVSLPCKHVFCYLCVKGASWLGKRCALCRQEIPEDFLDKPTLLSPEELKAASRGNGEYAWYYEGRNGWWQYDERTSRELEDAFSKGKKNTEMLIAGFLYVADLENMVQYRRNEHGRRRKIKRDIIDIPKKGVAGLRLDCDANTVNLARESSADGADSVSAQSGASVQPLVSSVRPLTSVDGQLTSPATPSPDASTSLEDSFAHLQLSGDNTAERSHRGEGEEDHESPSSGRVPAPDTSIEETESDASSDSEDVSAVVAQHSLTQQRLLVSNANQTVPDRSDRSGTDRSVAGGGTVSVSVRSRRPDGQCTVTEV

SEQ ID NO: 11491 - protein, 359 aa, Homo sapiens; identical to SEQ ID NO: 11490

SEQ ID NO: 11492 - protein, 359 aa, Homo sapiens; identical to SEQ ID NO: 11490

SEQ ID NO: 11493 - protein, 101 aa, Homo sapiens
MSFLRITPSTHSSVSSGLLRLSIFLLLSFPDSNGKAIWTAHLNITFQGTENIVAVMISNLKGMEILHSIQKGVYVTVIIEVGRMHMQWEAKSNKDRCEESY

SEQ ID NO: 11494 - protein, 305 aa, Homo sapiens
MSFLRITPSTHSSVSSGLLRLSIFLLLSFPDSNGKAIWTAHLNITFQVGNEITSELGESGVFGNHSPLERVSGVVALPEGWNQNACHPLTNFSRPKQADSWLALIERGGCTFTHKINVAAEKGANGVIIYNYQGTGSKVFPMSHQGTENIVAVMISNLKGMEILHSIQKGVYVTVIIEVGRMHMQWVSHYIMYLFTFLAATIAYFYLDCVWRLTPRVPNSFTRRRSQIKTDVKKAIDQLQLRVLKEGDEELDLNEDNCVVCFDTYKPQDVVRILTCKHFFHKACIDPWLLAHRTCPMCKCDILKT

SEQ ID NO: 11495 - protein, 396 aa, Homo sapiens
MAMSLIQACCSLALSTWLLSFCFVHLLCLDFTVAEKEEWYTAFVNITYAEPAPDPGAGAAGGGGAELHTEKTECGRYGEHSPKQDARGEVVMASSAHDRLACDPNTKFAAPTRGKNWIALIPKGNCTYRDKIRNAFLQNASAVVIFNVGSNTNETITMPHAGVEDIVAIMIPEPKGKEIVSLLERNITVTMYITIGTRNLQKYRRLGDAAKKAISKLQIRTIKKGDKETESDFDNCAVCIEGYKPNDVVRILPCRHLFHKSCVDPWLLDHRTCPMCKMNILKALGIPPNADCMDDLPTDFEGSLGGPPTNQITGASDTTVNESSVTLDPAVRTVGALQVVQDTDPIPQEGDVIFTTNSEQEPAVSSDSDISLIMAMEVGLSDVELSTDQDCEEVKS

SEQ ID NO: 11496 - protein, 405 aa, Homo sapiens
MAMSLIQACCSLALSTWLLSFCFVHLLCLDFTVAEKEEWYTAFVNITYAEPAPDPGAGAAGGGGAELHTEKTECGRYGEHSPKQDARGEVVMASSAHDRLACDPNTKFAAPTRGKNWIALIPKGNCTYRDKIRNAFLQNASAVVIFNVGSNTNETITMPHAGVEDIVAIMIPEPKGKEIVSLLERNITVTMYITIGTRNLQKYVSRTSVVFVSISFIVLMIISLAWLVFYYIQRFRYANARDRNQRRLGDAAKKAISKLQIRTIKKGDKETESDFDNCAVCIEGYKPNDVVRILPCRHLFHKSCVDPWLLDHRTCPMCKMNILKALGIPPNADCMDDLPTDFEGSLGGPPTNQITGASDTTVNESSVTLDPAVRTVGALQVVQDTDPIPQEGDVIFTTNSEFCHT

SEQ ID NO: 11497 - protein, 438 aa, Homo sapiens
MAMSLIQACCSLALSTWLLSFCFVHLLCLDFTVAEKEEWYTAFVNITYAEPAPDPGAGAAGGGGAELHTEKTECGRYGEHSPKQDARGEVVMASSAHDRLACDPNTKFAAPTRGKNWIALIPKGNCTYRDKIRNAFLQNASAVVIFNVGSNTNETITMPHAGVEDIVAIMIPEPKGKEIVSLLERNITVTMYITIGTRNLQKYVSRTSVVFVSISFIVLMIISLAWLVFYYIQRFRYANARDRNQRRLGDAAKKAISKLQIRTIKKGDKETESDFDNCAVCIEGYKPNDVVRILPCRHLFHKSCVDPWLLDHRTCPMCKMNILKALGIPPNADCMDDLPTDFEGSLGGPPTNQITGASDTTVNESSVTLDPAVRTVGALQVVQDTDPIPQEGDVIFTTNSEQEPAVSSDSDISLIMAMEVGLSDVELSTDQDCEEVKS

SEQ ID NO: 11498 - protein, 230 aa, Homo sapiens
MIPEPKGKEIVSLLERNITVTMYITIGTRNLQKYVSRTSVVFVSISFIVLMIISLAWLVFYYIQRFRYANARDRNQRRLGDAAKKAISKLQIRTIKKGDKETESDFDNCAVCIEGYKPNDVVRILPCRHLFHKSCVDPWLLDHRTCPMCKMNILKALGIPPNADCMDDLPTDFEGSLGGPPTNQITGASDTTVNESSVTLDPAVRTVGALQVVQDTDPIPQEGDVIFTTN

SEQ ID NO: 11499 - protein, 297 aa, Homo sapiens
MSSHAQPLKLISPCPYSLSSGVEDIVAIMIPEPKGKEIVSLLERNITVTMYITIGTRNLQKYVSRTSVVFVSISFIVLMIISLAWLVFYYIQRFRYANARDRNQRRLGDAAKKAISKLQIRTIKKGDKETESDFDNCAVCIEGYKPNDVVRILPCRHLFHKSCVDPWLLDHRTCPMCKMNILKALGIPPNADCMDDLPTDFEGSLGGPPTNQITGASDTTVNESSVTLDPAVRTVGALQVVQDTDPIPQEGDVIFTTNSEQEPAVSSDSDISLIMAMEVGLSDVELSTDQDCEEVKS

SEQ ID NO: 11500 - protein, 208 aa, Homo sapiens
HNVNSNELLNMVWNSEEIQQQIWIPSVFIGERSSEYLRALFVYEKGARVLLVPDNTFPLGYYLIPFTGIVGLLVLAMGAVMIARCIQHRKRLQRNRLTKEQLKQIPTHDYQKGDQYDVCAICLDEYEDGDKLRVLPCAHGEALTACPCPSATSSHQVLHLVPLCSLPQPLRGPLAHSDPEDLPHLQAACSSGSWGRRPRGRNSRARGG

SEQ ID NO: 11501 - protein, 72 aa, Homo sapiens
MDFADLPALFGATLSQEGLQGFLVEAHPDNACSPIAPPPPAPVNGSVFIALLRRFDCNFDLKVLNAQKAGYG

SEQ ID NO: 11502 - protein, 315 aa, Homo sapiens
MDFADLPALFGATLSQEGLQGFLVEAHPDNACSPIAPPPPAPVNGSVFIALLRRFDCNFDLKVLNAQKAGYGAAVVHNVNSNELLNMVWNSEEIQQQIWIPSVFIGERSSEYLRALFVYEKGARVLLVPDNTFPLGYYLIPFTGIVGLLVLAMGAVMIARCIQHRKRLQRNRLTKEQLKQIPTHDYQKGDQYDVCAICLDEYEDGDKLRVLPCAHAYHSRCVDPWLTQTRKTCPICKQPVHRGPGDEDQEEETQGQEEGDEGEPRDHPASERTPLLGSSPTLPTSFGSLAPAPLVFPGPSTDPPLSPPSSPVILV

SEQ ID NO: 11503 - protein, 133 aa, Homo sapiens
MHPAAFPLPVVVAAVLWGAAPTRGLIRAGFLVEAHPDNACSPIAPPPPAPVNGSVFIALLRRFDCNFDLKVLNAQKAGYGAAVVHNVNSNELLNMVWNSEEIQQQIWIPSVFIGERSSEYLRALFVYEKGRPV

SEQ ID NO: 11504 - protein, 97 aa, Homo sapiens
MHPAAFPLPVVVAAVLWGAAPTRGLIRATSDHNASMDFADLPALFGATLSQEGLQGFLVEAHPDNACSPIAPPPPAPVNGSVFIALLRRFDCNFDLK

SEQ ID NO: 11505 - protein, 122 aa, Homo sapiens
MHPAAFPLPVVVAAVLWGAAPTRGLIRATSDHNASMDFADLPALFGATLSQEGLQGFLVEAHPDNACSPIAPPPPAPVNGSVFIALLRRFDCNFDLKVLNAQKAGYGAAVVHNVNSNELLNM

SEQ ID NO: 11506 - protein, 350 aa, Homo sapiens [sequence omitted]

SEQ ID NO: 11507 - protein, 350 aa, Homo sapiens [sequence omitted]

SEQ ID NO: 11508 - protein, 350 aa, Homo sapiens [sequence omitted]

SEQ ID NO: 11509 - protein, 350 aa, Homo sapiens [sequence omitted]

SEQ ID NO: 11510 - protein, 74 aa, Homo sapiens
  SITE 1: note = misc_feature - Xaa can be any naturally occurring amino acid
XEIQQQIWIPSVFIGERSSEYLRALFVYEKGLPQPLRGPLAHSDPEDLPHLQAACSSGSWGRRPRGRNSRARGG

SEQ ID NO: 11511 - protein, 566 aa, Homo sapiens
MDLHRAAFKMENSSYLPNPLASPALMVLASTAEASRDASIPCQQPRPFGVPVSVDKDVHIPFTNGSYTFASMYHRQGGVPGTFANRDFPPSLLHLHPQFAPPNLDCTPISMLNHSGVGAFRPFASTEDRESYQSAFTPAKRLKNCHDTESPHLRFSDADGKEYDFGTQLPSSSPGSLKVDDTGKKIFAVSGLISDREASSSPEDRNDRCKKKAAALFDSQAPICPICQVLLRPSELQEHMEQELEQLAQLPSSKNSLLKDAMAPGTPKSLLLSASIKREGESPTASPHSSATDDLHHSDRYQTFLRVRANRQTRLNARIGKMKRRKQDEGQREGSCMAEDDAVDIEHENNNRFEEYEWCGQKRIRATTLLEGGFRGSGFIMCSGKENPDSDADLDVDGDDTLEYGKPQYTEADVIPCTGEEPGEAKEREALRGAVLNGGPPSTRITPEFSKWASDEMPSTSNGESSKQEAMQKTCKNSDIEKITEDSAVTTFEALKARVRELERQLSRGDRYKCLICMDSYSMPLTSIQCWHVHCEECWLRTLGAKKLCPQCNTITAPGDLRRIYL

SEQ ID NO: 11512 - protein, 566 aa, Homo sapiens; identical to SEQ ID NO: 11511

SEQ ID NO: 11513 - protein, 566 aa, Homo sapiens; identical to SEQ ID NO: 11511

SEQ ID NO: 11514 - protein, 259 aa, Homo sapiens
MPRARSGRRSRGAGGREETFLRVRANRQTRLNARIGKMKRRKQDEGQREGSCMAEDDAVDIEHENNNRFEEYEWCGQKRIRATTLLEGGFRGSGFIMCSGKENPDSDADLDVDGDDTLEYGKPQYTEADVIPCTGEEPGEAKEREALRGAVLNGGPPSTRITPEFSKWASDEMPSTSNGESSKQEAMQKTCKNSDIEKITEDSAVTTFEALKARVRELERQLSRGDRYKCLICMDSYSMPLTSIQCWHVHCEECWLRTL

SEQ ID NO: 11515 - protein, 260 aa, Homo sapiens
MPRARSGRRSRGAGGREETFLRVRANRQTRLNARIGKMKRRKQDEGQVCPLCNRPLAGSEQEMSRHVEHCLSKREGSCMAEDDAVDIEHENNNRFEEYEWCGQKRIRATTLLEGGFRGSGFIMCSGKENPDSDADLDVDGDDTLEYGKPQYTEADVIPCTGEEPGEAKEREALRGAVLNGGPPSTRITPEFSKWASDEMPSTSNGESSKQEAMQKTCKNSDIEKITEDSAVTTFEALKARVRELERQLSRGDRYKCLICM

SEQ ID NO: 11516 - protein, 45 aa, Homo sapiens
MPRARSGRRSRGAGGREEVDLSASTSQPADPTECSDWENETEEAR

SEQ ID NO: 11517 - protein, 121 aa, Homo sapiens
  SITE 1: note = misc_feature - Xaa can be any naturally occurring amino acid
XEGESPTASPHSSATDDLHHSDRYQTFLRVRANRQTRLNARIGKMKRRKQDEGQVCPLCNRPLAGSEQEMSRHVEHCLSKREGSCMAEDDAVDIEHENNNRFEEYEWCGQKRIRATTLLEG

SEQ ID NO: 11518 - protein, 372 aa, Homo sapiens
MKAGATSMWASCCGLLNEVMGTGAVRGQQSAFAGATGPFRFTPNPEFSTYPPAATEGPNIVCKACGLSFSVFRKKHVCCDCKKDFCSVCSVLQENLRRCSTCHLLQETAFQRPQLMRLKVKDLRQYLILRNIPIDTCREKEDLVDLVLCHHGLGSEDDMDTSSLNSSRSQTSSFFTRSFFSNYTAPSATMSSFQGELMDGDQTSRSGVPAQVQSEITSANTEDDDDDDDEDDDDEEENAEDRNPGLSKERVRASLSDLSSLDDVEGMSVRQLKEILARNFVNYSGCCEKWELVEKVNRLYKENEENQKSYGERLQLQDEEDDSLCRICMDAVIDCVLLECGHMVTCTKCGKRMSECPICRQYVVRAVHVFKS

SEQ ID NO: 11519 - protein, 507 aa, Homo sapiens
MKAGATSMWASCCGLLNEVMGTGAVRGQQSAFAGATGPFRFTPNPEFSTYPPAATEGPNIVCKACGLSFSVFRKKHVCCDCKKDFCSVCSVLQENLRRCSTCHLLQETAFQRPQLMRLKVKDLRQYLILRNIPIDTCREKEDLVDLVLCHHGLGSEDDMDTSSLNSSRSQTSSFFTRSFFSNYTAPSATMSSFQGELMDGDQTSRSGVPAQVQSEITSANTEDDDDDDDEDDDDEEENAEDRNPGLSKERVRASLSDLSSLDDVEGMSVRQLKEILARNFVNYSGCCEKWELVEKVNRLYKENEENQKSYGERLQLQDEEDDSLCRICMDAVIDCVLLECGHMVTCTKCGKRMRMSSCKGRLRNGPESSAVTIQKDQRKVSAHSSPKRVVEQLLPWKDLQNGIALWSVVPRSKWKIKALIFVKSLPSQSPPRIYILILGLTQFLQEFFFYLPKLDTHRHLGYELLTAFLGDLLAVPQVNMTDVSTAFEEGQALISDLIAVCREEIVM

SEQ ID NO: 11520 - protein, 180 aa, Homo sapiens
MKGELMDGDQTSRSGVPAQVQSEITSANTEDDDDDDDEDDDDEEENAEDRNPGLSKERVRASLSDLSSLDDVEGMSVRQLKEILARNFVNYSGCCEKWELVEKVNRLYKENEENQKSYGERLQLQDEEDDSLCRICMDAVIDCVLLECGHMVTCTKCGKRMSECPICRQYVVRAVHVFKS

SEQ ID NO: 11521 - protein, 45 aa, Homo sapiens
MKMASGCSCRMRKTTACVASAWMPSSTVSYWSVGTWLPAPSAASA

SEQ ID NO: 11522 - protein, 373 aa, Homo sapiens
MRKAGATSMWASCCGLLNEVMGTGAVRGQQSAFAGATGPFRFTPNPEFSTYPPAATEGPNIVCKACGLSFSVFRKKHVCCDCKKDFCSVCSVLQENLRRCSTCHLLQETAFQRPQLMRLKVKDLRQYLILRNIPIDTCREKEDLVDLVLCHHGLGSEDDMDTSSLNSSRSQTSSFFTRSFFSNYTAPSATMSSFQGELMDGDQTSRSGVPAQVQSEITSANTEDDDDDDDEDDDDEEENAEDRNPGLSKERVRASLSDLSSLDDVEGMSVRQLKEILARNFVNYSGCCEKWELVEKVNRLYKENEENQKSYGERLQLQDEEDDSLCRICMDAVIDCVLLECGHMVTCTKCGKRMSECPICRQYVVRAVHVFKS

SEQ ID NO: 11523 - protein, 38 aa, Homo sapiens
MWASCCGLLNEVMGTGAVRGQQSAFAGATGPFRFTPNP

SEQ ID NO: 11524 - protein, 74 aa, Homo sapiens
MWASCCGLLNEVMGTGAVRGQQSAFAGATGPFRFTPNPEFSTYPPAATEGPNIVCKACGLSFSVFRKKHVCCDC

SEQ ID NO: 11525 - protein, 163 aa, Homo sapiens
MWASCCGLLNEVMGTGAVRGQQSAFAGATGPFRFTPNPEFSTYPPAATEGPNIVCKACGLSFSVFRKKHVCCDCKKDFCSVCSVLQENLRRCSTCHLLQETAFQRPQLMRLKVKDLRQYLILRNIPIDTCREKEDLVDLVLCHHGLGSEDDMDTSSLNSSRSQ

SEQ ID NO: 11526 - protein, 175 aa, Homo sapiens
MAQVLIVGAGMTGSLCAALLRRQTSGPLYLAVWDKAEDSGGRMTTACSPHNPQCTADLGAQYITCTPHYAKKHQRFYDELLAYGVLRPLSSPIEGMVMKEGDCNFVAPQGISSIIKHYLKESGAEVYFRHRVTQINLRDDKWEVSKQTGSPEQFDLIVLTMPVPEILQLQGDITT

SEQ ID NO: 11527 - protein, 342 aa, Homo sapiens
MAQVLIVGAGMTGSLCAALLRRQTSGPLYLAVWDKAEDSGGRMTTACSPHNPQCTADLGAQYITCTPHYAKKHQRFYDELLAYGVLRPLSSPIEGMVMKEGDCNFVAPQGISSIIKHYLKESGAEVYFRHRVTQINLRDDKWEVSKQTGSPEQFDLIVLTMPVPEILQLQGDITTLISECQRQQLEAVSYSSRYALGLFYEAGTKIDVPWAGQYITSNPCIRFVSIDNKKRNIESSEIGPSLVIHTTVPFGVTYLEHSIEDVQELVFQQLENILPGLPQPIATKCQKWRHSQVTNAAANCPGQMTLHHKPFLACGGDGFTQSNFDGCITSALCVLEALKNYI

SEQ ID NO: 11528 - protein, 315 aa, Homo sapiens
MAQVLIVGAGMTGSLCAALLRRQTSGPLYLAVWDKAEDSGGRMTTACSPHNPQCTADLGAQYITCTPHYAKKHQRFYDELLAYGVLRPLSSPIEGMVMKEGDCNFVAPQGISSIIKHYLKESGAEVYFRHRVTQINLRDDKWEVSKQTGSPEQFDLIVLTMPVPEILQLQGDITTLISECQRQQLEAVSYSSRYALGLFYEAGTKIDVPWAGQYITSNPCIRFVSIDNKKRNIESSEIGPSLVIHTTVPFGVTYLEHSIEDVQELVFQQLENILPGLPQPIATKCQKWRHSQVPSAGVILGCAKSPWMMAIGFPI

SEQ ID NO: 11529 - protein, 171 aa, Homo sapiens
FRAFELLHLHLDLRAEFGPPGPGAGSRGLSGTAVLDLRCLEPEGAAELRLDSHPCLEVTAAALRRERPGSEEPPAEPVSFYTQPFSHYGQALCVSFPQPCRAAERLQVLLTYRVGEGPGVCWLAPEQTAGKKKPFVYTQGQAVLNRAFFPCFDTPAVKYKYSALIEEPGVG

SEQ ID NO: 11530 - protein, 168 aa, Homo sapiens
LIDAAKEEYNGVIEEFLATGEKLFGPYVWGRYDLLFMPPSFPFGGMENPCLTFVTPCLLAGDRSLADVIIHEISHSWFGNLVTNANWGEFWLNEGFTMYAQRRISTILFGVDPDDTYNETPYEKGFCFVSYLAHLVGDQDQFDSFLKAYVHEFKFRSILADDFLDFYL

SEQ ID NO: 11531 - protein, 650 aa, Homo sapiens
MASGEHSPGSGAARRPLHSAQAVDVASASNFRAFELLHLHLDLRAEFGPPGPGAGSRGLSGTAVLDLRCLEPEGAAELRLDSHPCLEVTAAALRRERPGSEEPPAEPVSFYTQPFSHYGQALCVSFPQPCRAAERLQVLLTYRVGEGPGVCWLAPEQTAGKKKPFVYTQGQAVLNRAFFPCFDTPAVKYKYSALIEVPDGFTAVMSASTWEKRGPNKFFFQMCQPIPSYLIALAIGDLVSAEVGPRSRVWAEPCLIDAAKEEYNGVIEEFLATGEKLFGPYVWGRYDLLFMPPSFPFGGMENPCLTFVTPCLLAGDRSLADVIIHEISHSWFGNLVTNANWGEFWLNEGFTMYAQRRISTILFGAAYTCLEAATGRALLRQHMDITGEENPLNKLRVKIEPGVDPDDTYNETPYEKGFCFVSYLAHLVGDQDQFDSFLKAYVHEFKFRSILADDFLDFYLEYFPELKKKRVDIIPGFEFDRWLNTPGWPPYLPDLSPGDSLMKPAEELAQLWAAEELDMKAIEAVAISPWKTYQLVYFLDKILQKSPLPPGNVKKLGDTYPSISNARNAELRLRWGQIVLKNDHQEDFWKVKEFLHNQGKQKYTLPLYHAMMGGSEVAQTLAKETFASTASQLHSNVVNYVQQIVAPKGS

SEQ ID NO: 11532 - protein, 611 aa, Homo sapiens
MASGEHSPGSGAARRPLHSAQAVDVASASNFRAFELLHLHLDLRAEFGPPGPGAGSRGLSGTAVLDLRCLEPEGAAELRLDSHPCLEVTAAALRRERPGSEEPPAEPVSFYTQPFSHYGQALCVSFPQPCRAAERLQVLLTYRVGEGPGVCWLAPEQTAGKKKPFVYTQGQAVLNRAFFPCFDTPAVKYKYSALIEVPDGFTAVMSASTWEKRGPNKFFFQMCQPIPSYLIALAIGDLVSAEVGPRYDLLFMPPSFPFGGMENPCLTFVTPCLLAGDRSLADVIIHEISHSWFGNLVTNANWGEFWLNEGFTMYAQRRISTILFGAAYTCLEAATGRALLRQHMDITGEENPLNKLRVKIEPGVDPDDTYNETPYEKGFCFVSYLAHLVGDQDQFDSFLKAYVHEFKFRSILADDFLDFYLEYFPELKKKRVDIIPGFEFDRWLNTPGWPPYLPDLSPGDSLMKPAEELAQLWAAEELDMKAIEAVAISPWKTYQLVYFLDKILQKSPLPPGNVKKLGDTYPSISNARNAELRLRWGQIVLKNDHQEDFWKVKEFLHNQGKQKYTLPLYHAMMGGSEVAQTLAKETFASTASQLHSNVVNYVQQIVAPKGS

SEQ ID NO: 11533 - protein, 344 aa, Homo sapiens
MTCCSCTSLSALLDFWAEVCWLAPEQTAGKKKPFVYTQGQAVLNRAFFPCFDTPAVKYKYSALIEVPDGFTAVMSASTWEKRGPNKFFFQMCQPIPSYLIALAIGDLVSAEVGPRSRVWAEPCLIDAAKEEYNGVIEEFLATGEKLFGPYVWGRYDLLFMPPSFPFGGMENPCLTFVTPCLLAGDRSLADVIIHEISHSWFGNLVTNANWGEFWLNEGFTMYAQRRISTILFGAAYTCLEAATGRALLRQHMDITGEENPLNKLRVKIEPGVDPDDTYNETPYEKGFCFVSYLAHLVGDQDQFDSFLKAYVHEFKFRSILADDFLDFYLEYFPELKKKRVDIIP

SEQ ID NO: 11534 - protein, 151 aa, Homo sapiens
  SITE 1: note = misc_feature - Xaa can be any naturally occurring amino acid
XPGAGSRGLSGTAVLDLRCLEPEGAAELRLDSHPCLEVTAAALRRERPGSEEPPAEPVSFYTQPFSHYGQALCVSFPQPCRAAERLQVLLTYRVGEGPGVCWLAPEQTAGKKKPFVYTQGQAVLNRAFFPCFDTPAVKYKYSALIEEPGVG

SEQ ID NO: 11535 - protein, 937 aa, Homo sapiens
MHRPRRRGTRPPLLALLAALLLAARGAAAQETELSVSAELVPTSSWNISSELNKDSYLTLDEPMNNITTSLGQTAELHCKVSGNPPPTIRWFKNDAPVVQEPRRLSFRSTIYGSRLRIRNLDTTDTGYFQCVATNGKEVVSSTGVLFVKFGPPPTASPGYSDEYEEDGFCQPYRGIACARFIGNRTVYMESLHMQGEIENQITAAFTMIGTSSHLSDKCSQFAIPSLCHYAFPYCDETSSVPKPRDLCRDECEILENVLCQTEYIFARSNPMILMRLKLPNCEDLPQPESPEAANCIRIGIPMADPINKNHKCYNSTGVDYRGTVSVTKSGRQCQPWNSQYPHTHTFTALRFPELNGGHSYCRNPGNQKEAPWCFTLDENFKSDLCDIPACDSKDSKEKNKMEILYILVPSVAIPLAIALLFFFICVCRNNQKSSSAPVQRQPKHVRGQNVEMSMLNAYKPKSKAKELPLSAVRFMEELGECAFGKIYKGHLYLPGMDHAQLVAIKTLKDYNNPQQWTEFQQEASLMAELHHPNIVCLLGAVTQEQPVCMLFEYINQGDLHEFLIMRSPHSDVGCSSDEDGTVKSSLDHGDFLHIAIQIAAGMEYLSSHFFVHKDLAARNILIGEQLHVKISDLGLSREIYSADYYRVQSKSLLPIRWMPPEAIMYGKFSSDSDIWSFGVVLWEIFSFGLQPYYGFSNQEVIEMVRKRQLLPCSEDCPPRMYSLMTECWNEIPSRRPRFKDIHVRLRSWEGLSSHTSSTTPSGGNATTQTTSLSASPVSNLSNPRYPNYMFPSQGITPQGQIAGFIGPPIPQNQRFIPINGYPIPPGYAAFPAAHYQPTGPPRVIQHCPPPKSRSPSSASGSTSTGHVTSLPSSGSNQEANIPLLPHMSIPNHPGGMGITVFGNKSQKPYKIDSKQASLLGDANIHGHTESMISAEL

SEQ ID NO: 11536 - protein, 393 aa, Homo sapiens
MHRPRRRGTRPPLLALLAALLLAARGAAAQETELSVSAELVPTSSWNISSELNKDSYLTLDEPMNNITTSLGQTAELHCKVSGNPPPTIRWFKNDAPVVQEPRRLSFRSTIYGSRLRIRNLDTTDTGYFQCVATNGKEVVSSTGVLFVKFGPPPTASPGYSDEYEEDGFCQPYRGIACARFIGNRTVYMESLHMQGEIENQITAAFTMIGTSSHLSDKCSQFAIPSLCHYAFPYCDETSSVPKPRDLCRDECEILENVLCQTEYIFARSNPMILMRLKLPNCEDLPQPESPEAANCIRIGIPMADPINKNHKCYNSTGVDYRGTVSVTKSGRQCQPWNSQYPHTHTFTALRFPELNGGHSYCRNPGNQKEAPWCFTLDENFKSDLCDIPACGK

SEQ ID NO: 11537 - protein, 882 aa, Homo sapiens
SYLTLDEPMNNITTSLGQTAELHCKVSGNPPPTIRWFKNDAPVVQEPRRLSFRSTIYGSRLRIRNLDTTDTGYFQCVATNGKEVVSSTGVLFVKFGPPPTASPGYSDEYEEDGFCQPYRGIACARFIGNRTVYMESLHMQGEIENQITAAFTMIGTSSHLSDKCSQFAIPSLCHYAFPYCDETSSVPKPRDLCRDECEILENVLCQTEYIFARSNPMILMRLKLPNCEDLPQPESPEAANCIRIGIPMADPINKNHKCYNSTGVDYRGTVSVTKSGRQCQPWNSQYPHTHTFTALRFPELNGGHSYCRNPGNQKEAPWCFTLDENFKSDLCDIPACDSKDSKEKNKMEILYILVPSVAIPLAIALLFFFICVCRNNQKSSSAPVQRQPKHVRGQNVEMSMLNAYKPKSKAKELPLSAVRFMEELGECAFGKIYKGHLYLPGMDHAQLVAIKTLKDYNNPQQWTEFQQEASLMAELHHPNIVCLLGAVTQEQPVCMLFEYINQGDLHEFLIMRSPHSDVGCSSDEDGTVKSSLDHGDFLHIAIQIAAGMEYLSSHFFVHKDLAARNILIGEQLHVKISDLGLSREIYSADYYRVQSKSLLPIRWMPPEAIMYGKFSSDSDIWSFGVVLWEIFSFGLQPYYGFSNQEVIEMVRKRQLLPCSEDCPPRMYSLMTECWNEIPSRRPRFKDIHVRLRSWEGLSSHTSSTTPSGGNATTQTTSLSASPVSNLSNPRYPNYMFPSQGITPQGQIAGFIGPPIPQNQRFIPINGYPIPPGYAAFPAAHYQPTGPPRVIQHCPPPKSRSPSSASGSTSTGHVTSLPSSGSNQEANIPLLPHMSIPNHPGGMGITVFGNKSQKPYKIDSKQASLLGDANIHGHTESMISAEL

SEQ ID NO: 11538 - protein, 180 aa, Homo sapiens
MSHRKFSAPRHGSLGFLPRKRSSRHRGKVKSFPKDDPSKPVHLTAFLGYKAGMTHIVREVDRPGSKVNKKEVVEAVTIVETPPMVVVGIVGYVETPRGLRTFKTVFAEHISDECKRRFYKNCSARLCPMSSIQAPLAGGKGSLEAGNELHPHAVPVCLPLTPRRGDEGLHLVPSPTLLCS

SEQ ID NO: 11539 - protein, 403 aa, Homo sapiens
MSHRKFSAPRHGSLGFLPRKRSSRHRGKVKSFPKDDPSKPVHLTAFLGYKAGMTHIVREVDRPGSKVNKKEVVEAVTIVETPPMVVVGIVGYVETPRGLRTFKTVFAEHISDECKRRFYKNWHKSKKKAFTKYCKKWQDEDGKKQLEKDFSSMKKYCQVIRVIAHTQMRLLPLRQKKAHLMEIQVNGGTVAEKLDWARERLEQQVPVNQVFGQDEMIDVIGVTKGKGYKGVTSRWHTKKLPRKTHRGLRKVACIGAWHPARVAFSVARAGQKGYHHRTEINKKIYKIGQGYLIKDGKLIKNNASTDYDLSDKSINPLGGFVHYGEVTNDFVMLKGCVVGTKKRVLTLRKSLLVQTKRRALEKIDLKFIDTTSKFGHGRFQTMEEKKAFMGPLKKDRIAKEEGA

SEQ ID NO: 11540 - protein, 351 aa, Homo sapiens
MTHIVREVDRPGSKVNKKEVVEAVTIVETPPMVVVGIVGYVETPRGLRTFKTVFAEHISDECKRRFYKNWHKSKKKAFTKYCKKWQDEDGKKQLEKDFSSMKKYCQVIRVIAHTQMRLLPLRQKKAHLMEIQVNGGTVAEKLDWARERLEQQVPVNQVFGQDEMIDVIGVTKGKGYKGVTSRWHTKKLPRKTHRGLRKVACIGAWHPARVAFSVARAGQKGYHHRTEINKKIYKIGQGYLIKDGKLIKNNASTDYDLSDKSINPLGGFVHYGEVTNDFVMLKGCVVGTKKRVLTLRKSLLVQTKRRALEKIDLKFIDTTSKFGHGRFQTMEEKKAFMGPLKKDRIAKEEGA

SEQ ID NO: 11541 - protein, 272 aa, Homo sapiens
MTHIVREVDRPGSKVNKKEVVEAVTIVETPPMVVVGIVGYVETPRGLRTFKTVFAEHISDECKRRFYKNWHKSKKKAFTKYCKKWQDEDGKKQLEKDFSSMKKYCQVIRVIAHTQMRLLPLRQKKAHLMEIQVNGGTVAEKLDWARERLEQQVPVNQVFGQDEMIDVIGVTKGKGYKGVTSRWHTKKLPRKTHRGLRKVACIGAWHPARVAFSVARAGQKGYHHRTEINKKIYKIGQGYLIKDGKLIKNNASTDYDLSDKSINPLGGFVHYG

SEQ ID NO: 11542 - protein, 305 aa, Homo sapiens
QMMNLLTGGQKLCADCHVLIWLCGVLWPSHRKFSAPRHGSLGFLPRKRSSRHRGKVKSFPKDDPSKPVHLTAFLGYKAGMTHIVREVDRPGSKVNKKEVVEAVTIVETPPMVVVGIVGYVETPRGLRTFKTVFAEHISDECKRRFYKNWHKSKKKAFTKYCKKWQDEDGKKQLEKDFSSMKKYCQVIRVIAHTQMRLLPLRQKKAHLMEIQVNGGTVAEKLDWARERLEQQVPVNQVFGQDEMIDVIGVTKGKGYKGVTSRWHTKKLPRKTHRGLRKVACIGAWHPARVAFSVARAGQKGYHHRT

SEQ ID NO: 11543 - protein, 261 aa, Homo sapiens
  SITE 1: note = misc_feature - Xaa can be any naturally occurring amino acid
XVCVVMAAVSLSPASARLNPRRIAAIPSWPAPGSHRKFSAPRHGSLGFLPRKRSSRHRGKVKSFPKDDPSKPVHLTAFLGYKAGMTHIVREVDRPGSKVNKKEVVEAVTIVETPPMVVVGIVGYVETPRGLRTFKTVFAEHISDECKRRFYKNWHKSKKKAFTKYCKKWQDEDGKKQLEKDFSSMKKYCQVIRVIAHTQMRLLPLRQKKAHLMEIQVNGGTVAEKLDWARERLEQQVPVNQVFGQDEMIDVIGVTKGKGYK

SEQ ID NO: 11544 - protein, 115 aa, Homo sapiens
MRYVASYLLAALGGNSSPSAKDIKKILDSVGIEADDDRLNKVISELNGKNIEDVIAQGIGKLASVPAGGAVAVSAAPGSAAPAAGSAPAAAEEKKDEKKEESEESDDDMGFGLFD

SEQ ID NO: 11545 - protein, 115 aa, Homo sapiens; identical to SEQ ID NO: 11544

SEQ ID NO: 11546 - protein, 92 aa, Homo sapiens
  SITE 1: note = misc_feature - Xaa can be any naturally occurring amino acid
XGGNSSPSAKDIKKILDSVISELNGKNIEDVIAQGIGKLASVPAGGAVAVSAAPGSAAPAAGSAPAAAEEKKDEKKEESEESDDDMGFGLFD

SEQ ID NO: 11547 - protein, 138 aa, Homo sapiens
ELDTSERKIEFDSASGTYTLYLIIGDATLKNPILWNVADVVIKFPEEEAPSTVLSQNLFTPKQEIQWIRIGANVSNFTFAPSTIIFHLGHAAMLGLMYVYWTQLNMFQTLKYLAILGSVTFLAGNRMLAQQAVKRTAH

SEQ ID NO: 11548 - protein, 615 aa, Homo sapiens
MAPPGSSTVFLLALTIIASTWALTPTHYLTKHDVERLKASLDRPFTNLESAFYSIVGLSSLGAQVPDAKISISNETKDLLLAAVSEDSSVTQIYHAVAALSGFGLPLASQEALSALTARLSKEETVLATVQALQTASHLSQQADLRSIVEEIEDLVARLDELGGVYLQFEEGLETTALFVAATYKLMDHVGTEPSIKEDQVIQLMNAIFSKKNFESLSEAFSVASAAAVLSHNRYHVPVVVVPEGSASDTHEQAILRLQVTNVLSQPLTQATVKLEHAKSVASRATVLQKTSFTPVGDVFELNFMNVKFSSGYYDFLVEVEGDNRYIANTVELRVKISTEVGITNVDLSTVDKDQSIAPKTTRVTYPAKAKGTFIADSHQNFALFFQLVDVNTGAELTPHQTFVRLHNQKTGQEVVFVAEPDNKNVYKFELDTSERKIEFDSASGTYTLYLIIGDATLKNPILWNVADVVIKFPEEEAPSTVLSQNLFTPKQEIQHLFREPEKRPPTVVSNTFTALILSPLLLLFALWIRIGANVSNFTFAPSTIIFHLGHAAMLGLMYVYWTQLNMFQTLKYLAILGSVTFLAGNRMLAQQAVKRIAAEQSSRLAKYRTLRTAH

SEQ ID NO: 11549 - protein, 345 aa, Homo sapiens
MAPPGSSTVFLLALTIIASTWALTPTHYLTKHDVERLKASLDRPFTNLESAFYSIVGLSSLGAQVPDAKKACTYIRSNLDPSNVDSLFYAAQASQALSGCEISISNETKDLLLAAVSEDSSVTQIYHAVAALSGFGLPLASQEALSALTARLSKEETVLARVWSTVLESRSLFSKRTVQALQTASHLSQQADLRSIVEEIEDLVARLDELGGVYLQFEEGLETTALFVAATYKLMDHVGTEPSIKEDQVIQLMNAIFSKKNFESLSEAFSVASAAAVLSHNRYHVPVVVVPEGSASDTHEQAILRLQVTNVLSQPLTQATVKLEHAKSVASRATVLQKTSFTPVG

SEQ ID NO: 11550 - protein, 631 aa, Homo sapiens
MAPPGSSTVFLLALTIIASTWALTPTHYLTKHDVERLKASLDRPFTNLESAFYSIVGLSSLGAQVPDAKKACTYIRSNLDPSNVDSLFYAAQASQALSGCEISISNETKDLLLAAVSEDSSVTQIYHAVAALSGFGLPLASQEALSALTARLSKEETVLATVQALQTASHLSQQADLRSIVEEIEDLVARLDELGGVYLQFEEGLETTALFVAATYKLMDHVGTEPSIKEDQVIQLMNAIFSKKNFESLSEAFSVASAAAVLSHNRYHVPVVVVPEGSASDTHEQAILRLQVTNVLSQPLTQATVKLEHAKSVASRATVLQKTSFTPVGDVFELNFMNVKFSSGYYDFLVEVEGDNRYIANTVELRVKISTEVGITNVDLSTVDKDQSIAPKTTRVTYPAKAKGTFIADSHQNFALFFQLVDVNTGAELTPHQTFVRLHNQKTGQEVVFVAEPDNKNVYKFELDTSERKIEFDSASGTYTLYLIIGDATLKNPILWNVADVVIKFPEEEAPSTVLSQNLFTPKQEIQHLFREPEKRPPTVVSNTFTALILSPLLLLFALWIRIGANVSNFTFAPSTIIFHLGHAAMLGLMYVYWTQLNMFQTLKYLAILGSVTFLAGNRMLAQQAVKRTAH

SEQ ID NO: 11551 - protein, 162 aa, Homo sapiens
MQRKHVPTSDLTLIPAMWIPSSTLPRPARPSQDVRTVQALQTASHLSQQADLRSIVEEIEDLVARLDELGGVYLQFEEGLETTALFVAATYKLMDHVGTEPSIKEDQVIQLMNAIFSKKNFESLSEAFSVASAAAVLSHNRYHVPVVVVPEGSASDTHEQAI

SEQ ID NO: 11552 - protein, 167 aa, Homo sapiens
MQRTVQALQTASHLSQQADLRSIVEEIEDLVARLDELGGVYLQFEEGLETTALFVAATYKLMDHVGTEPSIKEDQVIQLMNAIFSKKNFESLSEAFSVASAAAVLSHNRYHVPVVVVPEGSASDTHEQAILRLQVTNVLSQPLTQATVKLEHAKSVASRATVLQKTS

SEQ ID NO: 11553 - protein, 147 aa, Homo sapiens
  SITE 1: note = misc_feature - Xaa can be any naturally occurring amino acid
XGTYTLYLIIGDATLKNPILWNVADVVIKFPEEEAPSTVLSQNLFTPKQEIQHLFREPEKRPPTVVSNTFTALILSPLLLLFALWIRIGANVSNFTFAPSTIIFHLGHAEQHISSRRKMEILKTECQEKESRTIHSMRRKMEKKNFI

SEQ ID NO: 11554 - protein, 100 aa, Homo sapiens
MCQRCGLKLIVIICFFVQLARDLLHPSLEEEKKKHKKKRLVQSPNSYFMDVKCPGCYKITTVFSHAQTVVLCVGCSTVLCQPTGGKARLTEGCSFRRKQH

SEQ ID NO: 11555 - protein, 52 aa, Homo sapiens
MDVKCPGCYKITTVFSHAQTVVLCVGCSTVLCQPTGGKARLTEGCSFRRKQH

SEQ ID NO: 11556 - protein, 52 aa, Homo sapiens; identical to SEQ ID NO: 11555

SEQ ID NO: 11557 - protein, 52 aa, Homo sapiens; identical to SEQ ID NO: 11555

SEQ ID NO: 11558 - protein, 84 aa, Homo sapiens
MPLARDLLHPSLEEEKKKHKKKRLVQSPNSYFMDVKCPGCYKITTVFSHAQTVVLCVGCSTVLCQPTGGKARLTEGCSFRRKQH

SEQ ID NO: 11559 - protein, 97 aa, Homo sapiens
MPLARDLLHPSLEEEKKKHKKKRLVQSPNSYFMDVKCPGCYKITTVFSHAQTVVLCVGCSTVLCQPTGGKARLTEGISFGILQPSDEIDDYKCLYLH

SEQ ID NO: 11560 - protein, 224 aa, Homo sapiens
MSRKIEGFLLLLLFGYEATLGLSSTEDEGEDPWYQKACKCDCQGGPNALWSAGATSLDCIPECPYHKPLGFESGEVTPDQITCSNPEQYVGWYSSWTANKARLNSQGFGCAWLSKFQDSSQWLQIDLKEIKVISGILTQGRCDIDEWMTKYSVQYRTDERLNWIYYKDQTGNNRVFYGNSDRTSTVQNLLRPPIISRFIRLIPLGWHVRIAIRMELLECVSKCA

SEQ ID NO: 11561 - protein, 702 aa, Homo sapiens
ATAAAAAAVMAPPGCPGSCPNFAVVCSFLERYGPLLDLPELPFPELERVLQAPPPDVGNGEVPKELVELHLKLMRKIGKSVTADRWEKYLIKICQEFNSTWAWEMEKKGYLEMSVECKLALLKYLCECQFDDNLKFKNIINEEDADTMRLQPIGRDKDGLMYWYQLDQDHNVRMYIEEQDDQDGSSWKCIVRNRNELAETLALLKAQIDPVLLKNSSQQDNSSRESPSLEDEETKKEEETPKQEEQKESEKMKSEEQPMDLENRSTANVLEETTVKKEKEDEKELVKLPVIVKLEKPLPENEEKKIIKEESDSFKENVKPIKVEVKECRADPKDTKSSMEKPVAQEPERIEFGGNIKSSHEITEKSTEETEKLKNDQQAKIPLKKREIKLSDDFDSPVKGPLCKSVTPTKEFLKDEIKQEEETCKRISTITALGHEGKQLVNGEVSDERVAPNFKTEPIETKFYETKEESYSPSKDRNIITEGNGTESLNSVITSMKTGELEKETAPLRKDADSSISVLEIHSQKAQIEEPDPPEMETSLDSSEMAKDLSSKTALSSTESCTMKGEEKSPKTKKDKRPPILECLEKLEKSKKTFLDKDAQRLSPIPEEVPKSTLESEKPGSPEAAETSPPSNIIDHCEKLASEKEVVECQSTSTVGGQSVKKVDLETLKEDSEFTKVEMDNLDNAQTSGIEEPSETKGSMQK

SEQ ID NO: 11562 - protein, 276 aa, Homo sapiens
EPCKKCGLPNHPELILLCDSCDSGYHTACLRPPLMIIPDGEWFCPPCQHKLLCEKLEEQLQDLDVALKKKERAERRKERLVYVGISIENIIPPQEPDFSEDQEEKKKDSKKSKANLLERRSTRTRKCISYRFDEFDEAIDEAIEDDIKEADGGGVGRGKDISTITGHRGKDISTILDEERKENKRPQRAAAARRKKRRRLNDLDSDSNLDEEESEDEFKISDGSQDEFVVSDENPDESEEDPPSNDDSDTDFCSRRLRRHPSRPMRQSRRLRRKTP

SEQ ID NO: 11563 - protein, 803 aa, Homo sapiens
ETLALLKAQIDPVLLKNSSQQDNSSRESPSLEDEETKKEEETPKQEEQKESEKMKSEEQPMDLENRSTANVLEETTVKKEKEDEKELVKLPVIVKLEKPLPENEEKKIIKEESDSFKENVKPIKVEVKECRADPKDTKSSMEKPVAQEPERIEFGGNIKSSHEITEKSTEETEKLKNDQQAKIPLKKREIKLSDDFDSPVKGPLCKSVTPTKEFLKDEIKQEEETCKRISTITALGHEGKQLVNGEVSDERVAPNFKTEPIETKFYETKEESYSPSKDRNIITEGNGTESLNSVITSMKTGELEKETAPLRKDADSSISVLEIHSQKAQIEEPDPPEMETSLDSSEMAKDLSSKTALSSTESCTMKGEEKSPKTKKDKRPPILECLEKLEKSKKTFLDKDAQRLSPIPEEVPKSTLESEKPGSPEAAETSPPSNIIDHCEKLASEKEVVECQSTSTVGGQSVKKVDLETLKEDSEFTKVEMDNLDNAQTSGIEEPSETKGSMQKSKFKYKLVPEEETTASENTEITSERQKEGIKLTIRISSRKKKPDSPPKVLEPENKQEKTEKEEEKTNVGRTLRRSPRISRPTAKVAEIRDQKADKKRGEGEDEVEEESTALQKTDKKEILKKSEKDTNSKVSKVKPKGKVRWTGSRTRGRWKYSSNDESEGSGSEKSSAASEEEEEKESEEAILADDDEPCKKCGLPNHPELILLCDSCDSGYHTACLRPPLMIIPDGEWFCPPCQHKLLCEKLEEQLQDLDVALKKKERAERRKERLVYVGISIENIIPPQEPDFSEDQEEKKKDSKK

SEQ ID NO: 11564 - protein, 1441 aa, Homo sapiens
MATAAAAAAVMAPPGCPGSCPNFAVVCSFLERYGPLLDLPELPFPELERVLQAPPPDVGNGEVPKELVELHLKLMRKIGKSVTADRWEKYLIKICQEFNSTWAWEMEKKGYLEMSVECKLALLKYLCECQFDDNLKFKNIINEEDADTMRLQPIGRDKDGLMYWYQLDQDHNVRMYIEEQDDQDGSSWKCIVRNRNELAETLALLKAQIDPVLLKNSSQQDNSSRESPSLEDEETKKEEETPKQEEQKESEKMKSEEQPMDLENRSTANVLEETTVKKEKEDEKELVKLPVIVKLEKPLPENEEKKIIKEESDSFKENVKPIKVEVKECRADPKDTKSSMEKPVAQEPERIEFGGNIKSSHEITEKSTEETEKLKNDQQAKIPLKKREIKLSDDFDSPVKGPLCKSVTPTKEFLKDEIKQEEETCKRISTITALGHEGKQLVNGEVSDERVAPNFKTEPIETKFYETKEESYSPSKDRNIITEGNGTESLNSVITSMKTGELEKETAPLRKDADSSISVLEIHSQKAQIEEPDPPEMETSLDSSEMAKDLSSKTALSSTESCTMKGEEKSPKTKKDKRPPILECLEKLEKSKKTFLDKDAQRLSPIPEEVPKSTLESEKPGSPEAAETSPPSNIIDHCEKLASEKEVVECQSTSTVGGQSVKKVDLETLKEDSEFTKVEMDNLDNAQTSGIEEPSETKGSMQKSKFKYKLVPEEETTASENTEITSERQKEGIKLTIRISSRKKKPDSPPKVLEPENKQEKTEKEEEKTNVGRTLRRSPRISRPTAKVAEIRDQKADKKRGEGEDEVEEESTALQKTDKKEILKKSEKDTNSKVSKVKPKGKVRWTGSRTRGRWKYSSNDESEGSGSEKSSAASEEEEEKESEEAILADDDEPCKKCGLPNHPELILLCDSCDSGYHTACLRPPLMIIPDGEWFCPPCQHKLLCEKLEEQLQDLDVALKKKERAERRKERLVYVGISIENIIPPQEPDFSEDQEEKKKDSKKSKANLLERRSTRTRKCISYRFDEFDEAIDEAIEDDIKEADGGGVGRGKDISTITGHRGKDISTILDEERKENKRPQRAAAARRKKRRRLNDLDSDSNLDEEESEDEFKISDGSQDEFVVSDENPDESEEDPPSNDDSDTDFCSRRLRRHPSRPMRQSRRLRRKTPKKKYSDDDEEEESEENSRDSESDFSDDFSDDFVETRRRRSRRNQKRQINYKEDSESDGSQKSLRRGKEIRRVHKRRLSSSESEESYLSKNSEDDELAKESKRSVRKRGRSTDEYSEADEEEEEEEGKPSRKRLHRIETDEEESCDNAHGDANQPARDSQPRVLPSEQESTKKPYRIESDEEEDFENVGKVGSPLDYSLVDLPSTNGQSPGKAIENLIGKPTEKSQTPKDNSTASASLASNGTSGGQEAGAPEEEEDELLRVTDLVDYVCNSEQL

SEQ ID NO: 11565 - protein, 1189 aa, Homo sapiens
MKSEEQPMDLENRSTANVLEETTVKKEKEDEKELVKLPVIVKLEKPLPENEEKKIIKEESDSFKENVKPIKVEVKECRADPKDTKSSMEKPVAQEPERIEFGGNIKSSHEITEKSTEETEKLKNDQQAKIPLKKREIKLSDDFDSPVKGPLCKSVTPTKEFLKDEIKQEEETCKRISTITALGHEGKQLVNGEVSDERVAPNFKTEPIETKFYETKEESYSPSKDRNIITEGNGTESLNSVITSMKTGELEKETAPLRKDADSSISVLEIHSQKAQIEEPDPPEMETSLDSSEMAKDLSSKTALSSTESCTMKGEEKSPKTKKDKRPPILECLEKLEKSKKTFLDKDAQRLSPIPEEVPKSTLESEKPGSPEAAETSPPSNIIDHCEKLASEKEVVECQSTSTVGGQSVKKVDLETLKEDSEFTKVEMDNLDNAQTSGIEEPSETKGSMQKSKFKYKLVPEEETTASENTEITSERQKEGIKLTIRISSRKKKPDSPPKVLEPENKQEKTEKEEEKTNVGRTLRRSPRISRPTAKVAEIRDQKADKKRGEGEDEVEEESTALQKTDKKEILKKSEKDTNSKVSKVKPKGKVRWTGSRTRGRWKYSSNDESEGSGSEKSSAASEEEEEKESEEAILADDDEPCKKCGLPNHPELILLCDSCDSGYHTACLRPPLMIIPDGEWFCPPCQHKLLCEKLEEQLQDLDVALKKKERAERRKERLVYVGISIENIIPPQEPDFSEDQEEKKKDSKKSKANLLERRSTRTRKCISYRFDEFDEAIDEAIEDDIKEADGGGVGRGKDISTITGHRGKDISTILDEERKENKRPQRAAAARRKKRRRLNDLDSDSNLDEEESEDEFKISDGSQDEFVVSDENPDESEEDPPSNDDSDTDFCSRRLRRHPSRPMRQSRRLRRKTPKKKYSDDDEEEESEENSRDSESDFSDDFSDDFVETRRRRSRRNQKRQINYKEDSESDGSQKSLRRGKEIRRVHKRRLSSSESEESYLSKNSEDDELAKESKRSVRKRGRSTDEYSEADEEEEEEEGKPSRKRLHRIETDEEESCDNAHGDANQPARDSQPRVLPSEQESTKKPYRIESDEEEDFENVGKVGSPLDYSLVDLPSTNGQSPGKAIENLIGKPTEKSQTPKDNSTASASLASNGTSGGQEAGAPEEEEDELLRVTDLVDYVCNSEQL

SEQ ID NO: 11566 - protein, 202 aa, Homo sapiens
  SITE 1: note = misc_feature - Xaa can be any naturally occurring amino acid
XAAAAAAVMAPPGCPGSCPNFAVVCSFLERYGPLLDLPELPFPELERVLQAPPPDVGNGEVPKELVELHLKLMRKIGKSVTADRWEKYLIKYLCECQFDDNLKFKNIINEEDADTMRLQPIGRDKDGLMYWYQLDQDHNVRMYIEEQDDQDGSSWKCIVRNRNELAETLALLKAQIDPVLLKNSSQQDNSSRESPSLEDEET

SEQ ID NO: 11567 - protein, 165 aa, Homo sapiens
  SITE 1: note = misc_feature - Xaa can be any naturally occurring amino acid
XKPDSPPKVLEPENKQEKTEKEEEKTNVGRTLRRSPRISRPTAKVAEIRDQKADKKRGEGEDEVEEESTALQKTDKKEILKKSEKDTNSKVKPKGKVRWTGSRTRGRWKYSSNDESEGSGSEKSSAASEEEEEKESEEAILADDDEPCKKCGLPNHPELILLCDS

SEQ ID NO: 11568 - protein, 236 aa, Homo sapiens
MIFRVSAEGSQACAKGCELCSEVNGCLKCSPKLFILLERNDIRQVGVCLPSCPPGYFDARNPDMNKCIKCKIEHCEACFSHNFCTKCKEGLYLHKGRCYPACPEGSSAANGTMECSSPAQCEMSEWSPWGPCSKKQQLCGFRRGSEERTRRVLHAPVGDHAACSDTKETRRCTVRRVPCPEGQKRRKGGQGRRENANRNLARKESKEAGAGSRRRKGQQQQQQQGTVGPLTSAGPA

SEQ ID NO: 11569 - protein, 263 aa, Homo sapiens
MRLGLCVVALVLSWTHLTISSRGIKGKRQRRISAEGSQACAKGCELCSEVNGCLKCSPKLFILLERNDIRQVGVCLPSCPPGYFDARNPDMNKCIKCKIEHCEACFSHNFCTKCKEGLYLHKGRCYPACPEGSSAANGTMECSSPAQCEMSEWSPWGPCSKKQQLCGFRRGSEERTRRVLHAPVGDHAACSDTKETRRCTVRRVPCPEGQKRRKGGQGRRENANRNLARKESKEAGAGSRRRKGQQQQQQQGTVGPLTSAGPA

SEQ ID NO: 11570 - protein, 263 aa, Homo sapiens; identical to SEQ ID NO: 11569

SEQ ID NO: 11571 - protein, 200 aa, Homo sapiens
MRLGLCVVALVLSWTHLTISSRGIKGKRQRRISAEGSQACAKGCELCSEVNGCLKCSPKLFILLERNDIRQVGVCLPSCPPGYFDARNPDMNKCIKCKIEHCEACFSHNFCTKCKEGLYLHKGRCYPACPEGSSAANGTMECSSPGQKRRKGGQGRRENANRNLARKESKEAGAGSRRRKGQQQQQQQGTVGPLTSAGPA

SEQ ID NO: 11572 - protein, 89 aa, Homo sapiens
MDLASYVSNPICKGCLSCSKDNGCSRCQQKLFFFLRREGMRQYGECLHSCPSGYYGHRAPDMNRCARCRIENCDSCFSKDFCTKCKVGF

SEQ ID NO: 11573 - protein, 77 aa, Homo sapiens
MQFRLFSFALIILNCMDYSHCQGNRWRRSKRASYVSNPICKGCLSCSKDNGCSRCQQKLFFFLRREGMRQYGECLHS

SEQ ID NO: 11574 - protein, 121 aa, Homo sapiens
MQFRLFSFALIILNCMDYSHCQGNRWRRSKRASYVSNPICKGCLSCSKDNGCSRCQQKLFFFLRREGMRQYGECLHSCPSGYYGHRAPDMNRCARCRIENCDSCFSKDFCTKCKVGFYLHR

SEQ ID NO: 11575 - protein, 243 aa, Homo sapiens
MQFRLFSFALIILNCMDYSHCQGNRWRRSKRASYVSNPICKGCLSCSKDNGCSRCQQKLFFFLRREGMRQYGECLHSCPSGYYGHRAPDMNRCARCRIENCDSCFSKDFCTKCKVGFYLHRGRCFDECPDGFAPLEETMECVEGCEVGHWSEWGTCSRNNRTCGFKWGLETRTRQIVKKPVKDTILCPTIAESRRCKMTMRHCPGGKRTPKAKEKRNKKKKRKLIERAQEQHSVFLATDRANQ

SEQ ID NO: 11576 - protein, 179 aa, Homo sapiens
MQFRLFSFALIILNCMDYSHCQGNRWRRSKRGCRIENCDSCFSKDFCTKCKVGFYLHRGRCFDECPDGFAPLEETMECVGCEVGHWSEWGTCSRNNRTCGFKWGLETRTRQIVKKPVKDTILCPTIAESRRCKMTMRHCPGGKRTPKAKEKRNKKKKRKLIERAQEQHSVFLATDRANQ

SEQ ID NO: 11577 - protein, 89 aa, Homo sapiens
MRQYGECLHSCPSGYYGHRAPDMNRCARCRIENCDSCFSKDFCTKCKVGFYLHRGRCFDECPDGFAPLEETMECVEGCEVGHWSEWGTC

SEQ ID NO: 11578 - protein, 168 aa, Homo sapiens
MRQYGECLHSCPSGYYGHRAPDMNRCARCRIENCDSCFSKDFCTKCKVGFYLHRGRCFDECPDGFAPLEETMECVEGCEVGHWSEWGTCSRNNRTCGFKWGLETRTRQIVKKPVKDTILCPTIAESRRCKMTMRHCPGGKRTPKAKEKRNKKKKRKLIERAQEQHSVF

SEQ ID NO: 11579 - protein, 176 aa, Homo sapiens
MRQYGECLHSCPSGYYGHRAPDMNRCARCRIENCDSCFSKDFCTKCKVGFYLHRGRCFDECPDGFAPLEETMECVEGCEVGHWSEWGTCSRNNRTCGFKWGLETRTRQIVKKPVKDTILCPTIAESRRCKMTMRHCPGGKRTPKAKEKRNKKKKRKLIERAQEQHSVFLATDRANQ

SEQ ID NO: 11580 - protein, 272 aa, Homo sapiens
MHLRLISWLFIILNFMEYIGSQNASRGRRQRRMHPNVSQGCQGGCATCSDYNGCLSCKPRLFFALERIGMKQIGVCLSSCPSGYYGTRYPDINKCTKCKADCDTCFNKNFCTKCKSGFYLHLGKCLDNCPEGLEANNHTMECVSIVHCEVSEWNPWSPCTKKGKTCGFKRGTETRVREIIQHPSAKGNLCPPTNETRKCTVQRKKCQKGERGKKGRERKRKKPNKGESKEAIPDSKSLESSKEIPEQRENKQQQKKRKVQDKQKSVSVSTVH

SEQ ID NO: 11581 - protein, 292 aa, Homo sapiens
MHLRLISWLFIILNFMEYIGSQNASRGRRQRRMHPNVSQGCQGGCATCSDYNGCLSCKPRLFFALERIGMKQIGVCLSSCPSGYYGTRYPDINKCTKCKADCDTCFNKNFCTKCKSGFYLHLGKCLDNCPEGLEANNHTMECVSIVHCEVSEWNPWSPCTKKGKTCGFKRGTETRVREIIQHPSAKGNLCPPTNETRKCTVQRKKCQKGERGKKGRERKRKKPNKGESKEAIPDSKSLESSKEIPEQRENKQQQKKRKVQDKQKSGIEVTLAEGLTSVSQRTQPTPCRRRYL

SEQ ID NO: 11582 - protein, 172 aa, Homo sapiens
MRAPLCLLLLVAHAVDMLALNRRKKQVGTGLGGNCTGCIICSEENGCSTCQQRLFLFIRREGIRQYGKCLHDCPPGYFGIRGQEVNRCKKCGATCESCFSQDFCIRCKRQFYLYKGKCLPTCPPGTLAHQNTRECQERSPGQKKGRKDRRPRKDRKLDRRLDVRPRQPGLQP

SEQ ID NO: 11583 - protein, 234 aa, Homo sapiens
MRAPLCLLLLVAHAVDMLALNRRKKQVGTGLGGNCTGCIICSEENGCSTCQQRLFLFIRREGIRQYGKCLHDCPPGYFGIRGQEVNRCKKCGATCESCFSQDFCIRCKRQFYLYKGKCLPTCPPGTLAHQNTRECQGECELGPWGGWSPCTHNGKTCGSAWGLESRVREAGRAGHEEAATCQVLSESRKCPIQRPCPGERSPGQKKGRKDRRPRKDRKLDRRLDVRPRQPGLQP

SEQ ID NO: 11584 - protein, 45 aa, Homo sapiens
MITLHEMAETDEGWLDVVQSLIRVIPLEDPLGPAVITLLLDECPL

SEQ ID NO: 11585 - protein, 172 aa, Homo sapiens
MIVFGWAVFLASRSLGQGLLLTLEEHIAHFLGTGGAATTMGNSCICRDDSGTDDSVDTQQQQAENSAVPTADTRSQPRDPVRPPRRGRGPHEPRRKKQNVDGLVLDTLAVIRTLVDKRKLQNEDAYIGPCFHKSSTGIVVSLPGISLSDQEPPYSMITLHEMAETDEGWLDV

SEQ ID NO: 11586 - protein, 121 aa, Homo sapiens
MIVFGWAVFLASRSLGQGLLLTLEEHIAHFLGTGGAATTMGNSCICRDDSGTDDSVDTQQQQAENSAVPTADTRSQPRDPVRPPRRGRGPHEPRRKKQNVDGLVLDTLAVIRTLVDNDQEP

SEQ ID NO: 11587 - protein, 146 aa, Homo sapiens
MIVFGWAVFLASRSLGQGLLLTLEEHIAHFLGTGGAATTMGNSCICRDDSGTDDSVDTQQQQAENSAVPTADTRSQPRDPVRPPRRGRGPHEPRRKKQNVDGLVLDTLAVIRTLVDNDQEPPYSMITLHEMAETDEGWLDVVQSLI

SEQ ID NO: 11588 - protein, 146 aa, Homo sapiens; identical to SEQ ID NO: 11587

SEQ ID NO: 11589 - protein, 576 aa, Homo sapiens
MIVFGWAVFLASRSLGQGLLLTLEEHIAHFLGTGGAATTMGNSCICRDDSGTDDSVDTQQQQAENSAVPTADTRSQPRDPVRPPRRGRGPHEPRRKKQNVDGLVLDTLAVIRTLVDNDQEPPYSMITLHEMAETDEGWLDVVQSLIRVIPLEDPLGPAVITLLLDECPLPTKDALQKLTEILNLNGEVACQDSSHPAKHRNTSAVLGCLAEKLAGPASIGLLSPGILEYLLQCLKLQSHPTVMLFALIALEKFAQTSENKLTISESSISDRLVTLESWANDPDYLKRQVGFCAQWSLDNLFLKEGRQLTYEKVNLSSIRAMLNSNDVSEYLKISPHGLEARCDASSFESVRCTFCVDAGVWYYEVTVVTSGVMQIGWATRDSKFLNHEGYGIGDDEYSCAYDGCRQLIWYNARSKPHIHPCWKEGDTVGFLLDLNEKQMIFFLNGNQLPPEKQVFSSTVSGFFAAASFMSYQQCEFNFGAKPFKYPPSMKFSTFNDYAFLTAEEKIILPRHRRLALLKQVSIRENCCSLCCDEVADTQLKPCGHSDLCMDCALQLETCPLCRKEIVSRIRQISHIS

SEQ ID NO: 11590 - protein, 576 aa, Homo sapiens; identical to SEQ ID NO: 11589

SEQ ID NO: 11591 - protein, 239 aa, Homo sapiens
MARQLLSQVDMDCRVHMRPIGLTWVLQLTLAWILLEACGGSRPLQARSQQHHGLAADLGKGKLHLAGPCCPSEMDTTETSGPGNHPERCGVPSPECESFLEHLQRALRSRFRLRLLGVRQAQPLCEELCQAWFANCEDDITCGPTWLPLSEKRGCEPSCLTYGQTFADGTDLCRSALGHALPVAAPGARHCFNISISAVPRPRPGRRGREAPSRRSRSPRTSILDAAGSGSGSGSGSGP

SEQ ID NO: 11592 - protein, 191 aa, Homo sapiens
MARQVDMDCRVHMRPIGLTWVLQLTLAWILLEACGGSRPLQARSQQHHGLAADLGKGKLHLAGPCCPSEMDTTETSGPGNHPERCGVPSPECESFLEHLQRALRSRFRLRLLGVRQAQPLCEELCQAWFANCEDDITCGPTWLPLSEKRGCEPSCLTYGQTFADGTDLCRSALGHALPVAAPGARHCFNIS

SEQ ID NO: 11593 - protein, 70 aa, Homo sapiens
MDCRVHMRPIGLTWVLQLTLAWILLEACGGSRPLQARSQQHHGLAADLGKGKLHLAEMDTTETSGPGNHP

SEQ ID NO: 11594 - protein, 193 aa, Homo sapiens
MDCRVHMRPIGLTWVLQLTLAWILLEACGGSRPLQARSQQHHGLAADLGKGKLHLAEMDTTETSGPGNHPERCGVPSPECESFLEHLQRALRSRFRLRLLGVRQAQPLCEELCQAWFANCEDDITCGPTWLPLSEKRGCEPSCLTYGQTFADGTDLCRSALGHALPVAAPGARHCFNISISAVPRPRPGRRGR

SEQ ID NO: 11595 - protein, 174 aa, Homo sapiens
MDCRVHMRPIGLTWVLQLTLAWILLEACGGSRPLQARSQQHHGLAADLGKGKLHLAGDPQASVPKPYLNIQDPSSQGSPLPGPCCPSEMDTTETSGPGNHPERCGVPSPECESFLEHLQRALRSRFRLRLLGVRQAQPLCEELCQAWFANCEDDITCGPTWLPLSEKRGCEPSC

SEQ ID NO: 11596 - protein, 130 aa, Homo sapiens
MDCRVHMRPIGLTWVLQLTLAWILLEACGGSRPLQARSQQHHGLAADLGKGKLHLAGPCCPSEMDTTETSGPGNHPERCGVPSPECESFLEHLQRALRSRFRLRLLGVRQAQPLCEELCQAWFANCEDDI

SEQ ID NO: 11597 - protein, 186 aa, Homo sapiens
MDCRVHMRPIGLTWVLQLTLAWILLEACGGSRPLQARSQQHHGLAADLGKGKLHLAGPCCPSEMDTTETSGPGNHPERCGVPSPECESFLEHLQRALRSRFRLRLLGVRQAQPLCEELCQAWFANCEDDITCGPTWLPLSEKRGCEPSCLTYGQTFADGTDLCRSALGHALPVAAPGARHCFNISI

SEQ ID NO: 11598 - protein, 214 aa, Homo sapiens
MDCRVHMRPIGLTWVLQLTLAWILLEACGGSRPLQARSQQHHGLAADLGKGKLHLAGPCCPSEMDTTETSGPGNHPERCGVPSPECESFLEHLQRALRSRFRLRLLGVRQAQPLCEELCQAWFANCEDDITCGPTWLPLSEKRGCEPSCLTYGQTFADGTDLCRSALGHALPVAAPGARHCFNISISAVPRPRPGRRGREAPSRRSRSPRTSIL

SEQ ID NO: 11599 - protein, 229 aa, Homo sapiens
MDCRVHMRPIGLTWVLQLTLAWILLEACGGSRPLQARSQQHHGLAADLGKGKLHLAGPCCPSEMDTTETSGPGNHPERCGVPSPECESFLEHLQRALRSRFRLRLLGVRQAQPLCEELCQAWFANCEDDITCGPTWLPLSEKRGCEPSCLTYGQTFADGTDLCRSALGHALPVAAPGARHCFNISISAVPRPRPGRRGREAPSRRSRSPRTSILDAAGSGSGSGSGSGP

SEQ ID NO: 11600 - protein, 229 aa, Homo sapiens; identical to SEQ ID NO: 11599

SEQ ID NO: 11601 - protein, 114 aa, Homo sapiens [sequence omitted]

SEQ ID NO: 11602 - protein, 205 aa, Homo sapiens
MDEALETQLKTSRGRFSATESLPTLELLSQVDMDCRVHMRPIGLTWVLQLTLAWILLEACGGSRPLQARSQQHHGLAADLGKGKLHLAGPCCPSEMDTTETSGPGNHPERCGVPSPECESFLEHLQRALRSRFRLRLLGVRQAQPLCEELCQAWFANCEDDITCGPTWLPLSEKRGCEPSCLTYGQAGVQWRDLSSMQPPPPGFK

SEQ ID NO: 11603 - protein, 261 aa, Homo sapiens
MDEALETQLKTSRGRFSATESLPTLELLSQVDMDCRVHMRPIGLTWVLQLTLAWILLEACGGSRPLQARSQQHHGLAADLGKGKLHLAGPCCPSEMDTTETSGPGNHPERCGVPSPECESFLEHLQRALRSRFRLRLLGVRQAQPLCEELCQAWFANCEDDITCGPTWLPLSEKRGCEPSCLTYGQTFADGTDLCRSALGHALPVAAPGARHCFNISISAVPRPRPGRRGREAPSRRSRSPRTSILDAAGSGSGSGSGSGP

SEQ ID NO: 11604 - protein, 441 aa, Homo sapiens
MLRKGCCVELLLLLVAAELPLGGGCPRDCVCYPAPMTVSCQAHNFAAIPEGIPVDSERVFLQNNRIGLLQPGHFSPAMVTLWIYSNNITYIHPSTFEGFVHLEELDLGDNRQLRTLAPETFQGLVKLHALYLYKCGLSALPAGVFGGLHSLQYLYLQDNHIEYLQDDIFVDLVNLSHLFLHGNKLWSLGPGTFRGLVNLDRLLLHENQLQWVHHKAFHDLRRLTTLFLFNNSLSELQGECLAPLGALEFLRLNGNPWDCGCRARSLWEWLQRFRGSSSAVPCVSPGLRHGQDLKLLRAEDFRNCTGPASPHQIKSHTLTTTDRAARKEHHSPHGPTRSKGHPHGPRPGHRKPGKNCTNPRNRNQISKAGAGKQAPELPDYAPDYQHKFSFDIMPTARPKRKGKCARRTPIRAPSGVQQASSASSLGASLLAWTLGLAVTLR

SEQ ID NO: 11605 - protein, 420 aa, Homo sapiens
MLPGLRRLLQAPASACLLLMLLALPLAAPSCPMLCTCYSSPPTVSCQANNFSSVPLSLPPSTQRLFLQNNLIRTLRPGTFGSNLLTLWLFSNNLSTIYPGTFRHLQALEELDLGDNRHLRSLEPDTFQGLERLQSLHLYRCQLSSLPGNIFRGLVSLQYLYLQENSLLHLQDDLFADLANLSHLFLHGNRLRLLTEHVFRGLGSLDRLLLHGNRLQGVHRAAFRGLSRLTILYLFNNSLASLPGEALADLPSLEFLRLNANPWACDCRARPLWAWFQRARVSSSDVTCATPPERQGRDLRALREADFQACPPAAPTRPGSRARGNSSSNHLYGVAEAGAPPADPSTLYRDLPAEDSRGRQGGDAPTEDDYWGGYGGEDQRGEQMCPGAACQAPPDSRGPALSAGLPSPLLCLLLLVPHHL

SEQ ID NO: 11606 - protein, 204 aa, Homo sapiens
MLPGLRRLLQAPASACLLLMLLALPLAAPSCPMLCTCYSSPPTVSCQANNFSSVPLSLPPSTQRLFLQNNLIRTLRPGTFGSNLLTLWLFSNNLSTIYPGTFRHLQALEELDLGDNRHLRSLEPDTFQGLERLQSLHLYRCQLSSLPGNIFRGLVSLQYLYLQENSLLHLQGKKEKGKSLLCSWRMDALKMEGIPVIVIHCYYY

SEQ ID NO: 11607 - protein, 193 aa, Homo sapiens
MLPGLRRLLQAPASACLLLMLLALPLAAPSCPMLCTCYSSPPTVSCQANNFSSVPLSLPPSTQRLFLQNNLIRTLRPGTFGSNLLTLWLFSNNLSTIYPGTFRHLQALEELDLGDNRHLRSLEPDTFQGLERLQSLHLYRCQLSSLPGNIFRGLVSLQYLYLQENSLLHLQGPLPKGLCSCFSHPPSSLPTSR

SEQ ID NO: 11608 - protein, 122 aa, Homo sapiens
MKLLTGLVFCSLVLGVSSRSFFSFLGEAFDGARDMWRAYSDMREANYIGSDKYFHARGNYDAAKRGPGGAWAAEVITDARENIQRFFGHGAEDSLADQAANEWGRSGKDPNHFRPAGLPEKY

SEQ ID NO: 11609 - protein, 122 aa, Homo sapiens; identical to SEQ ID NO: 11608

SEQ ID NO: 11610 - protein, 122 aa, Homo sapiens; identical to SEQ ID NO: 11608

SEQ ID NO: 11611 - protein, 80 aa, Homo sapiens
MKLLTGLVFCSLVLSVSSRSFFSFLGEAFDGARDMWRAYSDMREANYIGSDKYFHARGNYDAAKRGPGGAWAAEVIREDD

SEQ ID NO: 11612 - protein, 113 aa, Homo sapiens
MKLLTGLVFCSLVLSVSSRSFFSFLGEAFDGARDMWRAYSDMREANYIGSDKYFHARGNYDAAKRGPGGAWAAEVIRLKCHGMIMAHCNLDLPGLKRSSHFSLLNNWDCRCAP

SEQ ID NO: 11613 - protein, 83 aa, Homo sapiens
MKLLTGLVFCSLVLSVSSRSFFSFLGEAFDGARDMWRAYSDMREANYIGSDKYFHARGNYDAAKRGPGGAWAAEVISLFSAEL

SEQ ID NO: 11614 - protein, 122 aa, Homo sapiens
MKLLTGLVFCSLVLSVSSRSFFSFLGEAFDGARDMWRAYSDMREANYIGSDKYFHARGNYDAAKRGPGGAWAAEVISNARENIQRLTGRGAEDSLADQAANKWGRSGRDPNHFRPAGLPEKY

SEQ ID NO: 11615 - protein, 122 aa, Homo sapiens; identical to SEQ ID NO: 11614

SEQ ID NO: 11616 - protein, 122 aa, Homo sapiens; identical to SEQ ID NO: 11614

SEQ ID NO: 11617 - protein, 130 aa, Homo sapiens
MRLFTGIVFCSLVMGVTSESWRSFFKEALQGVGDMGRAYWDIMISNHQNSNRYLYARGNYDAAQRGPGGVWAAKLISRSRVYLQGLIDCYLFGNSSTVLEDSKSNEKAEEWGRSGKDPDRFRPDGLPKKY

SEQ ID NO: 11618 - protein, 220 aa, Homo sapiens
MNGFTPDEMSRGGDAAAAVAAVVAAAAAAASAGNGTGAGTGAEVPGAGAVSAAGPPGAAGPGPGQLCCLREDGERCGRAAGNASFSKRIQKSISQKKVKIELDKSARHLYICDYHKNLIQSVRNRRKRKGSDDDGGDSPVQDIDTPEVDLYQLQVNTLRRYKRHFKLPTRPGLNKAQLVEIVGCHFRSIPVNEKDTLTYFIYSVKNDKNKSDLKVDSGVH

SEQ ID NO: 11619 - protein, 51 aa, Homo sapiens
MSFIFEWIYNGFSSVLQFLGLYKKSGKLVFLGLDNAGKTTLLHMLKDDRLG

SEQ ID NO: 11620 - protein, 198 aa, Homo sapiens
MSFIFEWIYNGFSSVLQFLGLYKKSGKLVFLGLDNAGKTTLLHMLKDDRLGQHVPTLHPTSEELTIAGMTFTTFDLGGHEQARRVWKNYLPAINGIVFLVDCADHSRLVESKVELNALMTDETISNVPILILGNKIDRTDAISEEKLREIFGLYGQTTGKGNVTLKELNARPMEVFMCSVLKRQGYGEGFRWLSQYID

SEQ ID NO: 11621 - protein, 198 aa, Homo sapiens; identical to SEQ ID NO: 11620

SEQ ID NO: 11622 - protein, 198 aa, Homo sapiens; identical to SEQ ID NO: 11620

SEQ ID NO: 11623 - protein, 198 aa, Homo sapiens; identical to SEQ ID NO: 11620

SEQ ID NO: 11624 - protein, 121 aa, Homo sapiens
MSFIFEWIYNGFSSVLQFLGLYKKSGKLVFLGLDNAGKTTLLHMLKDDRLGQHVPTLHPTSEELTIAGMTFTTFDLGGHEQARRVWKNYLPAINGIVFLVDCADHSRLVESKVELNVCFVL

SEQ ID NO: 11625 - protein, 115 aa, Homo sapiens
  SITE 1: note = misc_feature - Xaa can be any naturally occurring amino acid
XSFWWTVQIILASWNPKLSLMIYCSSLLTLAPNALMTDETISNVPILILGNKIDRTDAISEEKLREIFGLYGQTTGKGNVTLKELNARPMEVFMCSVLKRQGYGEGFRWLSQYID

SEQ ID NO: 11626 - protein, 213 aa, Homo sapiens
IAYKFGKTVVSCEGYESSEDQYVLRGSCGLEYNLDYTELGLQKLKESGKQHGFASFSDYYYKWSSADSCNMSGLITIVVLLGIAFVVYKLFLSDGQYSPPPYSEYPPFSHRYQRFTNSAGPPPPGFKSEFTGPQNTGHGATSGFGSAFTGQQGYENSGPGFWTGLGTGGILGYLFGSNRAYSPLHGGSGSYSVCSNSDTKTRTASGYGGTRRR

SEQ ID NO: 11627 - protein, 36 aa, Homo sapiens
MAAACGPGAAGYCLLLGLHLFLLTAGPALGWIPSHS

SEQ ID NO: 11628 - protein, 147 aa, Homo sapiens
MAAACGPGAAGYCLLLGLHLFLLTAGPALGWNDPALTLHYDRYTTSRRLDPIPQLKCVGGTAGCDSYTPKVIQCQNKGWDGYDVQWECKTDLDIAYKFGKTVVSCEGYESSEDQYVLRGSCGLEYNLDYTELGLQKLKESGKQHGFA

SEQ ID NO: 11629 - protein, 339 aa, Homo sapiens
MAAACGPGAAGYCLLLGLHLFLLTAGPALGWNDPDRMLLRDVKALTLHYDRYTTSRRLDPIPQLKCVGGTAGCDSYTPKVIQCQNKGWDGYDVQWECKTDLDIAYKFGKTVVSCEGYESSEDQYVLRGSCGLEYNLDYTELGLQKLKESGKQHGFASFSDYYYKWSSADSCNMSGLITIVVLLGIAFVVYKLFLSDGQYSPPPYSEYPPFSHRYQRFTNSAGPPPPGFKSEFTGPQNTGHGATSGFGSAFTGQQGYENSGPGFWTGLGTGGILGYLFGSNRAATPFSDSWYYPSYPPSYPGTWNRAYSPLHGGSGSYSVCSNSDTKTRTASGYGGTRRR

SEQ ID NO: 11630 - protein, 40 aa, Homo sapiens
MAAACGPGAAGYCLLLGLHLFLLTAGPALGWNDPECCCGM

SEQ ID NO: 11631 - protein, 37 aa, Homo sapiens
MAAACGPGAAGYCLLLGLHLFLLTAGPALGWNDPVGM

SEQ ID NO: 11632 - protein, 37 aa, Homo sapiens; identical to SEQ ID NO: 11631

SEQ ID NO: 11633 - protein, 202 aa, Homo sapiens
MLLRDVKALTLHYDRYTTSRRLDPIPQLKCVGGTAGCDSYTPKVIQCQNKGWDGYDVQWECKTDLDIAYKFGKTVVSCEGYESSEDQYVLRGSCGLEYNLDYTELGLQKLKESGKQHGFASFSDYYYKWSSADSCNMSGLITIVVLLGIAFVVYKLFLSDGQYSPPPYSEYPPFSHRYQRFTNSAGPPPPGFKSEFTGPQNT

SEQ ID NO: 11634 - protein, 167 aa, Homo sapiens
MSGLITIVVLLGIAFVVYKLFLSDGQYSPPPYSEYPPFSHRYQRFTNSAGPPPPGFKSEFTGPQNTGHGATSGFGSAFTGQQGYENSGPGFWTGLGTGGILGYLFGSNRAATPFSDSWYYPSYPPSYPGTWNRAYSPLHGGSGSYSVCSNSDTKTRTASGYGGTRRR

SEQ ID NO: 11635 - protein, 347 aa, Homo sapiens
  SITE 1: note = misc_feature - Xaa can be any naturally occurring amino acid
XAAACGPGAAGYCLLLGLHLFLLTAGPALGWNDPDRMLLRDVKALTLHYDRYTTSRRLDPIPQLKCVGGTAGCDSYTPKVIQCQNKGWDGYDVQWECKTDLDIAYKFGKTVVSCEGYESSEDQYVLRGSCGLEYNLDYTELGLQKLKESGKQHGFASFSDYYYKWSSADSCNMSGLITIVVLLGIAFVVYKLFLSDGQYSPPPYSEYPPFSHRYQRFTNSAGPPPPGFKSEFTGPQNTGHGATSGFGSAFTGQQGYENSGPGFWTGLGTGGILGYLFGSNRAATPFSDSWYYPSYPPSYPGTWNRAYSPLHGGSGSYSDMVVPGDDKVESWSQTLDAEILDFSSLSL

SEQ ID NO: 11636 - protein, 218 aa, Homo sapiens
  SITE 1: note = misc_feature - Xaa can be any naturally occurring amino acid
XLEYNLDYTELGLQKLKESGKQHGFASFSDYYYKWSSADSCNMSGLITIVVLLGIAFVVYKLFLSDGQYSPPPYSEYPPFSHRYQRFTNSAGPPPPGFKSEFTGPQNTGHGATSGFGSAFTGQQGYENSGPGFWTGLGTGGILGYLFGSNRAATPFSDSWYYPSYPPSYPGTWNRAYSPLHGGSGSYSVCSNSDTKTRTASGKSKKYKFLLPRSKVQK

SEQ ID NO: 11637 - protein, 724 aa, Homo sapiens
MVLTLLLSAYKLCRFFAMSGPRPGAERLAVPGPDGGGGTGPWWAAGGRGPREVSPGAGTEVQDALERALPELQQALSALKQAGGARAVGAGLAEVFQLVEEAWLLPAVGREVAQGLCDAIRLDGGLDLLLRLLQAPELETRVQAARLLEQILVAENRDRVARIGLGVILNLAKEREPVELARSVAGILEHMFKHSEETCQRLVAAGGLDAVLYWCRRTDPALLRHCALALGNCALHGGQAVQRRMVEKRAAEWLFPLAFSKEDELLRLHACLAVAVLATNKEVEREVERSGTLALVEPLVASLDPGRFARCLVDASDTSQGRGPDDLQRLVPLLDSNRLEAQCIGAFYLCAEAAIKSLQGKTKVFSDIGAIQSLKRLVSYSTNGTKSALAKRALRLLGEEVPRPILPSVPSWKEAEVQTWLQQIGFSKYCESFREQQVDGDLLLRLTEEELQTDLGMKSGITRKRFFRELTELKTFANYSTCDRSNLADWLGSLDPRFRQYTYGLVSCGLDRSLLHRVSEQQLLEDCGIHLGVHRARILTAAREMLHSPLPCTGGKPSGDTPDVFISYRRNSGSQLASLLKVHLQLHGFSVFIDVEKLEAGKFEDKLIQSVMGARNFVLVLSPGALDKCMQDHDCKDWVHKEIVTALSCGKNIVPIIDGFEWPEPQVLPEDMQAVLTFNGIKWSHEYQEATIEKIIRFLQGRSSRDSSAGSDTSLEGAAPMGPT

SEQ ID NO: 11638 - protein, 107 aa, Homo sapiens
  SITE 1: note = misc_feature - Xaa can be any naturally occurring amino acid
XASLLKVHLQLHGFSVFIDVEKLEAGKFEDKLIQSVMGARNFVLVLSPGALDKCMQDHDCKDWVHKEIVTALSCGKNIVPIIDGFEWPEPQVLPEDMQAVLTFNGIK

SEQ ID NO: 11639 - protein, 118 aa, Homo sapiens
  SITE 1: note = misc_feature - Xaa can be any naturally occurring amino acid
XLLPQEQQVDGDLLLRLTEEELQTDLGMKSGITRKRFFRELTELKTFANYSTCDRSNLADWLGSLDPRFRQYTYGLVSCGLDRSLLHRVSEQQLLEDCGIHLGVHRARILTAARAITD

SEQ ID NO: 11640 - protein, 257 aa, Homo sapiens
  SITE 1: note = misc_feature - Xaa can be any naturally occurring amino acid
XNLADWLGSLDPRFRQYTYGLVSCGLDRSLLHRVSEQQLLEDCGIHLGVHRARILTAARVSDAEGPPSPCCLLPTSEMLHSPLPCTGGKPSGDTPDVFISYRRNSGSQLASLLKVHLQLHGFSVFIDVEKLEAGKFEDKLIQSVMGARNFVLVLSPGALDKCMQDHDCKDWVHKEIVTALSCGKNIVPIIDGFEWPEPQVLPEDMQAVLTFNGIKWSHEYQEATIEKIIRFLQGRSSRDSSAGSDTSLEGAAPMGPT

SEQ ID NO: 11641 - protein, 8 aa, Homo sapiens
MDHLNEAT

SEQ ID NO: 11642 - protein, 82 aa, Homo sapiens
MDHLNEATQGKEHSEMSNNVSDPKGPPAKIARLEQNGSPLGRGRLGSTGAKMQGVPLKHSGHLMKTNLRKDIEIVYYEHQFG

SEQ ID NO: 11643 - protein, 71 aa, Homo sapiens
MDHLNEATQGKEHSEMSNNVSDPKGPPAKIARLEQNGSPLGRGRLGSTGAKMQGVPLKHSGHLMKTNLRKG

SEQ ID NO: 11644 - protein, 116 aa, Homo sapiens
MDHLNEATQGKEHSEMSNNVSDPKGPPAKIARLEQNGSPLGRGRLGSTGAKMQGVPLKHSGHLMKTNLRKGTMLPVFCVVEHYENAIEYDCKEEHAEFVLVRKDMLFNQLIEMALL

SEQ ID NO: 11645 - protein, 130 aa, Homo sapiens
MDHLNEATQGKEHSEMSNNVSDPKGPPAKIARLEQNGSPLGRGRLGSTGAKMQGVPLKHSGHLMKTNLRKGTMLPVFCVVEHYENAIEYDCKEEHAEFVLVRKDMLFNQLIEMALLSLGYSHSSAAQAKG

SEQ ID NO: 11646 - protein, 166 aa, Homo sapiens
MDHLNEATQGKEHSEMSNNVSDPKGPPAKIARLEQNGSPLGRGRLGSTGAKMQGVPLKHSGHLMKTNLRKGTMLPVFCVVEHYENAIEYDCKEEHAEFVLVRKDMLFNQLIEMALLSLGYSHSSAAQAKGLIQVGKWNPVPLSYVTDAPDATVADMLQDVYHVVTL

SEQ ID NO: 11647 - protein, 172 aa, Homo sapiens
MDHLNEATQGKEHSEMSNNVSDPKGPPAKIARLEQNGSPLGRGRLGSTGAKMQGVPLKHSGHLMKTNLRKGTMLPVFCVVEHYENAIEYDCKEEHAEFVLVRKDMLFNQLIEMALLSLGYSHSSAAQAKGLIQVGKWNPVPLSYVTDAPDATVADMLQDVYHVVTLKIQLHR

SEQ ID NO: 11648 - protein, 224 aa, Homo sapiens
MDHLNEATQGKEHSEMSNNVSDPKGPPAKIARLEQNGSPLGRGRLGSTGAKMQGVPLKHSGHLMKTNLRKGTMLPVFCVVEHYENAIEYDCKEEHAEFVLVRKDMLFNQLIEMALLSLGYSHSSAAQAKGLIQVGKWNPVPLSYVTDAPDATVADMLQDVYHVVTLKIQLHSCPKLEDLPPEQWSHTTVRNALKDLLKDMNQSSLAKECPLSQSMISSIVNSTY

SEQ ID NO: 11649 - protein, 763 aa, Homo sapiens
MDHLNEATQGKEHSEMSNNVSDPKGPPAKIARLEQNGSPLGRGRLGSTGAKMQGVPLKHSGHLMKTNLRKGTMLPVFCVVEHYENAIEYDCKEEHAEFVLVRKDMLFNQLIEMALLSLGYSHSSAAQAKGLIQVGKWNPVPLSYVTDAPDATVADMLQDVYHVVTLKIQLHSCPKLEDLPPEQWSHTTVRNALKDLLKDMNQSSLAKECPLSQSMISSIVNSTYYANVSAAKCQEFGRWYKHFKKTKDMMVEMDSLSELSQQGANHVNFGQQPVPGNTAEQPPSPAQLSHGSQPSVRTPLPNLHPGLVSTPISPQLVNQQLVMAQLLNQQYAVNRLLAQQSLNQQYLNHPPPVSRSMNKPLEQQVSTNTEVSSEIYQWVRDELKRAGISQAVFARVAFNRTQGLLSEILRKEEDPKTASQSLLVNLRAMQNFLQLPEAERDRIYQDERERSLNAASAMGPAPLISTPPSRPPQVKTATIATERNGKPENNTMNINASIYDEIQQEMKRAKVSQALFAKVAATKSQGWLCELLRWKEDPSPENRTLWENLSMIRRFLSLPQPERDAIYEQESNAVHHHGDRPPHIIHVPAEQIQQQQQQQQQQQQQQQAPPPPQPQQQPQTGPRLPPRQPTVASPAESDEENRQKTRPRTKISVEALGILQSFIQDVGLYPDEEAIQTLSAQLDLPKYTIIKFFQNQRYYLKHHGKLKDNSGLEVDVAEYKEEELLKDLEESVQDKNTNTLFSVKLEEELSVEGNTDINTDLKD

SEQ ID NO: 11650 - protein, 763 aa, Homo sapiens; identical to SEQ ID NO: 11649

SEQ ID NO: 11651 - protein, 795 aa, Homo sapiens
MDHLNEATQGKEHSEMSNNVSDPKGPPAKIARLEQNGSPLGRGRLGSTGAKMQGVPLKHSGHLMKTNLRKGTMLPVFCVVEHYENAIEYDCKEEHAEFVLVRKDMLFNQLIEMALLSLGYSHSSAAQAKGLIQVGKWNPVPLSYVTDAPDATVADMLQDVYHVVTLKIQLHSCPKLEDLPPEQWSHTTVRNALKDLLKDMNQSSLAKECPLSQSMISSIVNSTYYANVSAAKCQEFGRWYKHFKKTKDMMVEMDSLSELSQQGANHVNFGQQPVPGNTAEQPPSPAQLSHGSQPSVRTPLPNLHPGLVSTPISPQLVNQQLVMAQLLNQQYAVNRLLAQQSLNQQYLNHPPPVSRSMNKPLEQQVSTNTEVSSEIYQWVRDELKRAGISQAVFARVAFNRTQGLLSEILRKEEDPKTASQSLLVNLRAMQNFLQLPEAERDRIYQDERERSLNAASAMGPAPLISTPPSRPPQVKTATIATERNGKPENNTMNINASIYDEIQQEMKRAKVSQALFAKVAATKSQGWLCELLRWKEDPSPENRTLWENLSMIRRFLSLPQPERDAIYEQESNAVHHHGDRPPHIIHVPAEQIQSPSPTTLGKGESRGVFLPGLPTPAPWLGAAPQQQQQQQQQQQQQQQAPPPPQPQQQPQTGPRLPPRQPTVASPAESDEENRQKTRPRTKISVEALGILQSFIQDVGLYPDEEAIQTLSAQLDLPKYTIIKFFQNQRYYLKHHGKLKDNSGLEVDVAEYKEEELLKDLEESVQDKNTNTLFSVKLEEELSVEGNTDINTDLKD

SEQ ID NO: 11652 - protein, 138 aa, Homo sapiens
MLFNQLIEMALLSLGYSHSSAAQAKGLIQVGKWNPVPLSYVTDAPDATVADMLQDVYHVVTLKIQLHSCPKLEDLPPEQWSHTTVRNALKDLLKDMNQSSLAKECPLSQHPEISNMLDNLFINGKINFKKKLPRAPEA

SEQ ID NO: 11653 - protein, 166 aa, Homo sapiens
MLPVFCVVEHYENAIEYDCKEEHAEFVLVRKDMLFNQLIEMALLSLGYSHSSAAQAKGLIQVGKWNPVPLSYVTDAPDATVADMLQDVYHVVTLKIQLHSCPKLEDLPPEQWSHTTVRNALKDLLKDMNQSSLAKECPLSQSMISSIVNSTYYANVSAAKCQEFGR

SEQ ID NO: 11654 - protein, 41 aa, Homo sapiens
MGAKSMRSWCLCQICSCGFLSSQPDHIPIPVQAAVLWDPPD

SEQ ID NO: 11655 - protein, 29 aa, Homo sapiens
MGAKSMRSWCLCQICSCGPGLTREPLPLP

SEQ ID NO: 11656 - protein, 398 aa, Homo sapiens
MGAKSMRSWCLCQICSCGSDYCPYEIVKQPRHVPEEYKPKQGKIDLGTTYKRDLNSYKVQPVAIVRPLERQVKKGKLDTVPTYKDDYRAWDLHKSELYKPEQTYHPPTVKFGNSTTFQDDFVPQEIKPRQSFKPSSVVKRSTAPFNGITSHRLDYIPHQLELKFERPKEVYKPTDQRFEDLTTHRCDFQGLIGETAKLCRPVHTRVTQNALFEGSTEFRESFQPWEIPPPEVKKVPEYVPPTGSMLLNSTSHLDYVPYQANHVVPIRPVSQKRSNNFPFQGKSIMKEDFPAWESCRQGLIKKQQQIPNPSGKFDGLSTFRSHYVPHELIPTESCKPLNIAFKSSVPFDDVTMYSVEYTPKRQEICPASYPSPPGYIFDNTNSQGHKFFRKIIPAVKAF

SEQ ID NO: 11657 - protein, 30 aa, Homo sapiens
MYDNVLPPQSLKAKQEIRACHGKMEGITTF

SEQ ID NO: 11658 - protein, 104 aa, Homo sapiens
MYDNVLPPQSLKAKQEIRACHGKMEGITTFKSDYCPYEIVKQPRHVPEEYKPKQGKIDLGTTYKRDLNSYKVQPVAIVRPLERQVKKGKLDTVPTYKGNLLFHT

SEQ ID NO: 11659 - protein, 149 aa, Homo sapiens
GWAASDDPIEKVIEGINRGLSNAEREVGKALDGINSGITHAGREVEKVFNGLSNMGSHTGKELDKGVQGLNHGMDKVAHEINHGIGQAGKEAEKLGHGVNNAAGQGNHQSGSSSHQGGATTTPLASGASVNTPFINLPALWRSVANIMP

SEQ ID NO: 11660 - protein, 247 aa, Homo sapiens
MHLARLVGSCSLLLLLGALSGWAASDDPIEKVIEGINRGLSNAEREVGKALDGINSGITHAGREVEKVFNGLSNMGSHTGKELDKGVQGLNHGMDKVAHEINHGIGQAGKEAEKLGHGVNNAAGQAGKEADKAVQGFHTGVHQAGKEAEKLGQGVNHAADQAGKEVEKLGQGAHHAAGQAGKELQNAHNGVNQASKEANQLLNGNHQSGSSSHQGGATTTPLASGASVNTPFINLPALWRSVANIMP

SEQ ID NO: 11661 - protein, 590 aa, Homo sapiens
MHLARLVGSCSLLLLLGALSGWAASDDPIEKVIEGINRGLSNAEREVGKALDGINSGITHAGREVEKVFNGLSNMGSHTGKELDKGVQGLNHGMDKVAHEINHGIGQAGKEAEKLGHGVNNAAGQVGKEADKLIHHGVHHGANQAGSEAGKFGQGVDNAAGQAGNEAGRFGQGVHHAAGQAGNEAGRFGQGVHHAAGQAGNEAGRFGQGAHHGLSEGWKETEKFGQGIHHAAGQVGKEAEKFGQGAHHAAGQAGNEAGRFGQGVHHGLSEGWKETEKFGQGVHHTAGQVGKEAEKFGQGAHHAAGQAGNEAGRFGQGAHHAAGQAGNEAGRFGQGVHHGLSEGWKETEKFGQGVHHAASQFGKETEKLGHGVHHGVNEAWKEAEKFGQGVHHAASQVGKEEDRVVQGLHHGVSQAGREAGQFGHDIHHTAGQAGKEGDIAVHGVQPGVHEAGKEAGQFGQGVHHTLEQAGKEADKAVQGFHTGVHQAGKEAEKLGQGVNHAADQAGKEVEKLGQGAHHAAGQAGKELQNAHNGVNQASKEANQLLNGNHQSGSSSHQGGATTTPLASGASVNTPFINLPALWRSVANIMP

SEQ ID NO: 11662 - protein, 264 aa, Homo sapiens
MRTLWMALCALSRLWPGAQAGCAEAGRCCPGRDPACFARGWRLDRVYGTCFCDQACRFTGDCCFDYDRACPARPCFVGEWSPWSGCADQCKPTTRVRRRSVQQEPQNGGAPCPPLEERAGCLEYSTPQGQDCGHTYVPAFITTSAFNKERTRQATSPHWSTHTEDAGYCMEFKTESLTPHCALENWPLTRWMQYLREGYTVCVDCQPPAMNSVSLRCSGDGLDSDGNQTLHWQAIGNPRCQGTWKKVRRVDQCSCPAVHSFIFI

SEQ ID NO: 11663 - protein, 49 aa, Homo sapiens
MGLGLLLPLLLLWTRGTQGSELDPKGQHVCVASRWVSWESDACGQQPLC

SEQ ID NO: 11664 - protein, 830 aa, Homo sapiens
MGLGLLLPLLLLWTRGTQGSELDPKGQHVCVASSPSAELQCCAGWRQKDQECTIPICEGPDACQKDEVCVKPGLCRCKPGFFGAHCSSRCPGQYWGPDCRESCPCHPHGQCEPATGACQCQADRWGARCEFPCACGPHGRCDPATGVCHCEPGWWSSTCRRPCQCNTAAARCEQATGACVCKPGWWGRRCSFRCNCHGSPCEQDSGRCACRPGWWGPECQQQCECVRGRCSAASGECTCPPGFRGARCELPCPAGSHGVQCAHSCGRCKHNEPCSPDTGSCESCEPGWNGTQCQQPCLPGTFGESCEQQCPHCRHGEACEPDTGHCQRCDPGWLGPRCEDPCPTGTFGEDCGSTCPTCVQGSCDTVTGDCVCSAGYWGPSCNASCPAGFHGNNCSVPCECPEGLCHPVSGSCQPGSGSRDTALIAGSLVPLLLLFLGLACCACCCWAPRSDLKDRPARDGATVSRMKLQVWGTLTSLGSTLPCRSLSSHKLPWVTVSHHDPEVPFNHSFIEPPSAGWATDDSFSSDPESGEADEVPAYCVPPQEGMVPVAQAGSSEASLAAGAFPPPEDASTPFAIPRTSSLARAKRPSVSFAEGTKFAPQSRRSSGELSSPLRKPKRLSRGAQSGPEGREAEESTGPEEAEAPESFPAAASPGDSATGHRRPPLGGRTVAEHVEAIEGSVQESSGPVTTIYMLAGKPRGSEGPVRSVFRHFGSFQKGQAEAKVKRAIPKPPRQALNRKKGSPGLASGSVGQSPNSAPKAGLPGATGPMAVRPEEAVRGLGAGTESSRRAQEPVSGCGSPEQDPQKQAEEERQEEPEYENVVPISRPPEP

SEQ ID NO: 11665 - protein, 744 aa, Homo sapiens
MGLGLLLPLLLLWTRGTQGSELDPKGQHVCVASSPSAELQCCAGWRQKDQECTIPICEGPDACQKDEVCVKPGLCRCKPGFFGAHCSSRCPGQYWGPDCRESCPCHPHGQCEPATGACQCQADRWGARCEFPCACGPHGRCDPATGVCHCEPGWWSSTCRRPCQCNTAAARCEQATGACVCKPGWWGRRCSFRCNCHGSPCEQDSGRCACRPGWWGPECQQQCECVRGRCSAASGECTCPPGFRGARCELPCPAGSHGVQCAHSCGRCKHNEPCSPDTGSCESCEPGWNGTQCQQPCLPGTFGESCEQQCPHCRHGEACEPDTGHCQPGSGSRDTALIAGSLVPLLLLFLGLACCACCCWAPRSDLKDRPARDGATVSRMKLQVWGTLTSLGSTLPCRSLSSHKLPWVTVSHHDPEVPFNHSFIEPPSAGWATDDSFSSDPESGEADEVPAYCVPPQEGMVPVAQAGSSEASLAAGAFPPPEDASTPFAIPRTSSLARAKRPSVSFAEGTKFAPQSRRSSGELSSPLRKPKRLSRGAQSGPEGREAEESTGPEEAEAPESFPAAASPGDSATGHRRPPLGGRTVAEHVEAIEGSVQESSGPVTTIYMLAGKPRGSEGPVRSVFRHFGSFQKGQAEAKVKRAIPKPPRQALNRKKGSPGLASGSVGQSPNSAPKAGLPGATGPMAVRPEEAVRGLGAGTESSRRAQEPVSGCGSPEQDPQKQAEEERQEEPEYENVVPISRPPEP

SEQ ID NO: 11666 - protein, 342 aa, Homo sapiens
MGLGLLLPLLLLWTRGTQGSELDPKGQHVCVASSPSAELQCCAGWRQKDQECTIPICEGPDACQKDEVCVKPGLCRCKPGFFGAHCSSRCPGQYWGPDCRESCPCHPHGQCEPATGACQCQADRWGARCEFPCACGPHGRCDPATGVCHCEPGWWSSTCRRPCQCNTAAARCEQATGACVCKPGWWGRRCSFRCNCHGSPCEQDSGRCACRPGWWGPECQQQCECVRGRCSAASGECTCPPGFRGARCELPCPAGSHGVQCAHSCGRCKHNEPCSPDTGSCESCEPGWNGTQCQQPCLPGTFGESCEQQCPHCRHGEACEPDTGHCQRCDPGWLGPRGPVIL

SEQ ID NO: 11667 - protein, 569 aa, Homo sapiens
MGLGLLLPLLLLWTRGTQGSELDPKGQHVCVASSPSAELQCCAGWRQKDQECTIPICEGPDACQKDEVCVKPGLCRCKPGFFGAHCSSRCPGQYWGPDCRESCPCHPHGQCEPATGACQCQADRWGARCEFPCACGPHGRCDPATGVCHCEPGWWSSTCRRPCQCNTAAARCEQATGACVCKPGWWGRRCSFRCNCHGSPCEQDSGRCACRPGWWGPECQQQCECVRGRCSAASGECTCPPGFRGARCELPCPAGSHGVQCAHSCGRCKHNEPCSPDTGSCESCEPGWNGTQCQQPCLPGTFGESCEQQCPHCRHGEACEPDTGHCQRCDPGWLGPRCEDPCPTGTFGEDCGSTCPTCVQGSCDTVTGDCVCSAGYWGPSCNASCPAGFHGNNCSVPCECPEGLCHPVSGSCQPGSGSRDTALIAGSLVPLLLLFLGLACCACCCWAPRSDLKDRPARDGATVSRMKLQVWGTLTSLGSTLPCRSLSSHKLPWVTASSSRPLPAGPLMTPSHPILSLERQMRFLPTVCHPKKGWSLWPRQGRQRPAWLQVLSRPLRTPPRHSPSRAPPA

SEQ ID NO: 11668 - protein, 125 aa, Homo sapiens
MAEAKTHWLGAALSLIPLIFLISGAEAASFQRNQLLQKEPDLRLENVQKFPSPEMIRALEYIENLRQQAHKEESSPDYNPYQGVSVPLQQKENGDESHLPERDSLSEEDWMRIILEALRQAENEP

SEQ ID NO: 11669 - protein, 144 aa, Homo sapiens
MAEAKTHWLGAALSLIPLIFLISGAEAASFQRNQLLQKEPDLRLENVQKFPSPEMIRALEYIENLRQQAHKEESSPDYNPYQGVSVPLQQKENGDESHLPERDSLSEEDWMRIILEALRQAENEPQSAPKENKPYALNSEKNFP

SEQ ID NO: 11670 - protein, 617 aa, Homo sapiens
MAEAKTHWLGAALSLIPLIFLISGAEAASFQRNQLLQKEPDLRLENVQKFPSPEMIRALEYIENLRQQAHKEESSPDYNPYQGVSVPLQQKENGDESHLPERDSLSEEDWMRIILEALRQAENEPQSAPKENKPYALNSEKNFPMDMSDDYETQQWPERKLKHMQFPPMYEENSRDNPFKRTNEIVEEQYTPQSLATLESVFQELGKLTGPNNQKRERMDEEQKLYTDDEDDIYKANNIAYEDVVGGEDWNPVEEKIESQTQEEVRDSKENIEKNEQINDEMKRSGQLGIQEEDLRKESKDQLSDDVSKVIAYLKRLVNAAGSGRLQNGQNGERATRLFEKPLDSQSIYQLIEISRNLQIPPEDLIEMLKTGEKPNGSVEPERELDLPVDLDDISEADLDHPDLFQNRMLSKSGYPKTPGRAGTEALPDGLSVEDILNLLGMESAANQKTSYFPNPYNQEKVLPRLPYGAGRSRSNQLPKAAWIPHVENRQMAYENLNDKDQELGEYLARMLVKYPEIINSNQVKRVPGQGSSEDDLQEEEQIEQAIKEHLNQGSSQETDKLAPVSKRFPVGPPKNDDTPNRQYWDEDLLMKVLEYLNQEKAEKGREHIAKRAMENM

SEQ ID NO: 11671 - protein, 57 aa, Homo sapiens
MAAIQDGLAKGENDETVSNTLTLTNGLERRTKTYSEDNFEELQYFPNFYALLKSIDS

SEQ ID NO: 11672 - protein, 236 aa, Homo sapiens
MAAIQDGLAKGENDETVSNTLTLTNGLERRTKTYSEDNFEELQYFPNFYALLKSIDSEKEAKEKETLITIMKTLIDFVKMMVKYGTISPEEGVSYLENLDEMIALQTKNKLEKNATDNISKLFPAPSEKSHEETDSTKEEAAKMEKEYGSLKDSTKDDNSNPGGKTDEPKGKTEAYLEAIRKNIEWLKKHDKKGNKEDYDLSKMRDFINKQADAYVEKGILDKEEAEAIKRIYSSL

SEQ ID NO: 11673 - protein, 468 aa, Homo sapiens
MGFLGTGTWILVLVLPIQAFPKPGGSQDKSLHNRELSAERPLNEQIAEAEEDKIKKTYPPENKPGQSNYSFVDNLNLLKAITEKEKIEKERQSIRSSPLDNKLNVEDVDSTKNRKLIDDYDSTKSGLDHKFQDDPDGLHQLDGTPLTAEDIVHKIAARIYEENDRAVFDKIVSKLLNLGLITESQAHTLEDEVAEVLQKLISKEANNYEEDPNKPTSWTENQAGKIPEKVTPMAAIQDGLAKGENDETVSNTLTLTNGLERRTKTYSEDNFEELQYFPNFYALLKSIDSEKEAKEKETLITIMKTLIDFVKMMVKYGTISPEEGVSYLENLDEMIALQTKNKLEKNATDNISKLFPAPSEKSHEETDSTKEEAAKMEKEYGSLKDSTKDDNSNPGGKTDEPKGKTEAYLEAIRKNIEWLKKHDKKGNKEDYDLSKMRDFINKQADAYVEKGILDKEEAEAIKRIYSSL

SEQ ID NO: 11674 - protein, 212 aa, Homo sapiens
MVSRMVSTMLSGLLFWLASGWTPAFAYSPRTPDRVSEADIQRLLHGVMEQLGIARPRVEYPAHQAMNLVGPQSIEGGAHEGLQHLGPFGNIPNIVAELTGDNIPKDFSEDQGYPDPPNPCPVGKTADDGCLENTPDTAEFSREFQLHQHLFDPEHDYPGLGKWNKKLLYEKMKGGERRKRRSVNPYLQGQRLDNVVAKKSVPHFSDEDKDPE

SEQ ID NO: 11675 - protein, 194 aa, Homo sapiens
MVSRMVSTMLSGLLFWLASGWTPAFAYSPRTPDRVSEADIQRLLHGVMEQLGIARPRVEYPAHQAMNLVGPQSIEGGAHEGLQHLGPFGNIPNIVAELTGDNIPKDFSEDQGYPDPPNPCPVGKTADDGCLENTPDTAEFSREFQLHQHLFDPEHDYPGLGKWSVNPYLQGQRLDNVVAKKSVPHFSDEDKDPE

SEQ ID NO: 11676 - protein, 211 aa, Homo sapiens
MVSRMVSTMLSGLLFWLASGWTPAFAYSPRTPDRVSEADIQRLLHGVMEQLGIARPRVEYPAHQAMNLVGPQSIEGGAHEGLQHLGPFGNIPNIVAELTGDNIPKDFSEDQGYPDPPNPCPVGKTDDGCLENTPDTAEFSREFQLHQHLFDPEHDYPGLGKWNKKLLYEKMKGGERRKRRSVNPYLQGQRLDNVVAKKSVPHFSDEDKDPE

SEQ ID NO: 11677 - protein, 193 aa, Homo sapiens
MVSRMVSTMLSGLLFWLASGWTPAFAYSPRTPDRVSEADIQRLLHGVMEQLGIARPRVEYPAHQAMNLVGPQSIEGGAHEGLQHLGPFGNIPNIVAELTGDNIPKDFSEDQGYPDPPNPCPVGKTDDGCLENTPDTAEFSREFQLHQHLFDPEHDYPGLGKWSVNPYLQGQRLDNVVAKKSVPHFSDEDKDPE

SEQ ID NO: 11678 - protein, 216 aa, Homo sapiens
SGLLFWLASGWTPAFAYSPRTPDRVSEADIQRLLHGVMEQLGIARPRVEYPAHQAMNLVGPQSIEGGAHEGLQHLGPFGNIPNIVAELTGDNIPKDFSEDQGYPDPPNPCPVGKTADDGCLENTPDTAEFSREFQLHQHLFDPEHDYPGLGKWNKKLLYEKMKGGERRKRRVTRAWLDCCGDAWSFLSGAVNRLKPSLVGKSQNPPLCSPEKHWSM

SEQ ID NO: 11679 - protein, 56 aa, Homo sapiens
MDTPSSYEAAMELFSPDQDMREAGAQLKKLVDTLPQKPRESIIKLMEKIAQSSLCN

SEQ ID NO: 11680 - protein, 91 aa, Homo sapiens
MKLAVTLTLVTLALCCSSASAEICPSFQRVIETLLMDTPSSYEAAMELFSPDQDMREAGAQLKKLVDTLPQKPRESIIKLMEKIAQSSLCN

SEQ ID NO: 11681 - protein, 95 aa, Homo sapiens
MKGSRALLLVALTLFCICRMATGEDNDEFFMDFLQTLLVGTPEELYEGTLGKYNVNEDAKAAMTELKSCIDGLQPMHKAELVKLLVQVLGSQDGA

SEQ ID NO: 11682 - protein, 95 aa, Homo sapiens
MKGSRALLLVALTLFCICRMATGEDNDEFFMDFLQTLLVGTPEELYEGTLGKYNVNEDAKAAMTELKSCRDGLQPMHKAELVKLLVQVLGSQDGA

SEQ ID NO: 11683 - protein, 90 aa, Homo sapiens
MRLSVCLLLLTLALCCYRANAVVCQALGSEITGFLLAGKPVFKFQLAKFKAPLEAVAAKMEVKKCVDTMAYEKRVLITKTLGKIAEKCDR

SEQ ID NO: 11684 - protein, 90 aa, Homo sapiens
MKLSVCLLLVTLALCCYQANAEFCPALVSELLDFFFISEPLFKLSLAKFDAPPEAVAAKLGVKRCTDQMSLQKRSLIAEVLVKILKKCSV

SEQ ID NO: 11685 - protein, 83 aa, Homo sapiens
MRLSVCLLMVSLALCCYQAHALVCPAVASEITVFLFLSDAAVNLQVAKLNPPPEALAAKLEVKHCTDQISFKKRLSLKKSWWK

SEQ ID NO: 11686 - protein, 95 aa, Homo sapiens
MKLLMVLMLAALLLHCYADSGCKLLEDMVEKTINSDISIPEYKELLQEFIDSDAAAEAMGKFKQCFLNQSHRTLKNFGLMMHTVYDSIWCNMKSN

SEQ ID NO: 11687 - protein, 93 aa, Homo sapiens
MKLLMVLMLAALSQHCYAGSGCPLLENVISKTINPQVSKTEYKELLQEFIDDNATTNAIDELKECFLNQTDETLSNVEVFMQLIYDSSLCDLF

SEQ ID NO: 11688 - protein, 120 aa, Homo sapiens
MKLLMVLMLAALSQHCYAGSGCPLLENVISKTINPQVSKTEYKELLQEFIDDNATTNAIDELKECFLNQTDETLSNVEVFMVISFSSYKLFKSPDQGQVGSSFLTDNAKATSEQAFSYIG

SEQ ID NO: 11689 - protein, 96 aa, Homo sapiens
MRVTSATCALLLALICSVQLGDACLDIDKLLANVVFDVSQDLLKEELARYNPSPLTEESFLNVQQCFANVSVTERFAHSVVIKKILQSNDCIEAAF

SEQ ID NO: 11690 - protein, 96 aa, Homo sapiens; identical to SEQ ID NO: 11689

SEQ ID NO: 11691 - protein, 104 aa, Homo sapiens
MKLAALLGLCVALSCSSAAAFLVGSAKPVAQPVAALESAAEAGAGTLANPLGTLNPLKLLLSSLGIPVNHLIEGSQKCVAELGPQAVGAVKALKALLGALTVFG

SEQ ID NO: 11692 - protein, 48 aa, Homo sapiens
MDPLKLLLKTLGISVEHLVEGLRKCVNELGPEASEAVKKLLEALSHLV

SEQ ID NO: 11693 - protein, 93 aa, Homo sapiens
MKLVTIFLLVTISLCSYSATAFLINKVPLPVDKLAPLPLDNILPFMDPLKLLLKTLGISVEHLVEGLRKCVNELGPEASEAVKKLLEALSHLV

SEQ ID NO: 11694 - protein, 218 aa, Homo sapiens
MGRLLALVVGAALVSSACGGCVEVDSETEAVYGMTFKILCISCKRRSETNAETFTEWTFRQKGTEEFVKILRYENEVLQLEEDERFEGRVVWNGSRGTKDLQDLSIFITNVTYNHSGDYECHVYRLLFFENYEHNTSVVKKIHIEVVDKANRDMASIVSEIMMYVLIVVLTIWLVAEMIYCYKKIAAATETAAQENASEYLAITSESKENCTGVQVAE

SEQ ID NO: 11695 - protein, 218 aa, Homo sapiens; identical to SEQ ID NO: 11694

SEQ ID NO: 11696 - protein, 268 aa, Homo sapiens
MGRLLALVVGAALVSSACGGCVEVDSETEAVYGMTFKILCISCKRRSETNAETFTEWTFRQKGTEEFVKILRYENEVLQLEEDERFEGRVVWNGSRGTKDLQDLSIFITNVTYNHSGDYECHVYRLLFFENYEHNTSVVKKIHIEVVDKGESGAACPFTVTHRRARWRDRWQAVDRTGWLCAWPANRPQQRAEGEGSSPSCPLQLWPLFLSSPRRGQSMPVPHRRSGYRTQLCHLCCMTSGRCLLSLSQRVVLGLPGIIIRCVSRGVV

SEQ ID NO: 11697 - protein, 147 aa, Homo sapiens
MGRLLALVVGAALVSSACGGCVEVDSETEAVYGMTFKILCISCKRRSETNAETFTEWTFRQKGTEEFVKKIHIEVVDKANRDMASIVSEIMMYVLIVVLTIWLVAEMIYCYKKIAAATETAAQENASEYLAITSESKENCTGVQVAE

SEQ ID NO: 11698 - protein, 185 aa, Homo sapiens
MTFKILCISCKRRSETNAETFTEWTFRQKGTEEFVKILRYENEVLQLEEDERFEGRVVWNGSRGTKDLQDLSIFITNVTYNHSGDYECHVYRLLFFENYEHNTSVVKKIHIEVVDKANRDMASIVSEIMMYVLIVVLTIWLVAEMIYCYKKIAAATETAAQENASEYLAITSESKENCTGVQVAE

SEQ ID NO: 11699 - protein, 235 aa, Homo sapiens
MTFKILCISCKRRSETNAETFTEWTFRQKGTEEFVKILRYENEVLQLEEDERFEGRVVWNGSRGTKDLQDLSIFITNVTYNHSGDYECHVYRLLFFENYEHNTSVVKKIHIEVVDKGESGAACPFTVTHRRARWRDRWQAVDRTGWLCAWPANRPQQRAEGEGSSPSCPLQLWPLFLSSPRRGQSMPVPHRRSGYRTQLCHLCCMTSGRCLLSLSQRVVLGLPGIIIRCVSRGVV

SEQ ID NO: 11700 - protein, 93 aa, Homo sapiens
MPAFNRLFPLASLVLIYWVSVCFPVCVEVPSETEAVQGNPMKLRCISCMKREEVEATTVVEWFYRPEGGKDFLIYEYRNGHQEVESPFQGRLQ

SEQ ID NO: 11701 - protein, 141 aa, Homo sapiens
MPAFNRLFPLASLVLIYWVSVCFPVCVEVPSETEAVQGNPMKLRCISCMKREEVEATTVVEWFYRPEGGKDFLIYEYRNGHQEVESPFQGRLQWNGSKDLQDVSITVLNVTLNDSGLYTCNVSREFEFEAHRPFVKTTRLI

SEQ ID NO: 11702 - protein, 215 aa, Homo sapiens
MPAFNRLFPLASLVLIYWVSVCFPVCVEVPSETEAVQGNPMKLRCISCMKREEVEATTVVEWFYRPEGGKDFLIYEYRNGHQEVESPFQGRLQWNGSKDLQDVSITVLNVTLNDSGLYTCNVSREFEFEAHRPFVKTTRLIPLRVTEEAGEDFTSVVSEIMMYILLVFLTLWLLIEMIYCYRKVSKAEEAAQENASDYLAIPSENKENSAVPVEE

SEQ ID NO: 11703 - protein, 215 aa, Homo sapiens; identical to SEQ ID NO: 11702

SEQ ID NO: 11704 - protein, 215 aa, Homo sapiens; identical to SEQ ID NO: 11702

SEQ ID NO: 11705 - protein, 147 aa, Homo sapiens
MELALRRSPVPRWLLLLPLLLGLNAGAVIDWPTEEGKEVWDYVTVRKDAYMFWWLYYATNSCKNFSELPLVMWLQGGPGGSSTGFGNFEEIGPFSEGPSSATLRGLPWVIPGSPLLIRCSPGDLTCTACLFSKTKVWQRCLRLQSKY

SEQ ID NO: 11706 - protein, 147 aa, Homo sapiens; identical to SEQ ID NO: 11705

SEQ ID NO: 11707 - protein, 452 aa, Homo sapiens
MELALRRSPVPRWLLLLPLLLGLNAGAVIDWPTEEGKEVWDYVTVRKDAYMFWWLYYATNSCKNFSELPLVMWLQGGPGGSSTGFGNFEEIGPLDSDLKPRKTTWLQAASLLFVDNPVGTGFSYVNGSGAYAKDLAMVASDMMVLLKTFFSCHKEFQTVPFYIFSESYGGKMAAGIGLELYKAIQRGTIKCNFAGVALGDSWISPVDSVLSWGPYLYSMSLLEDKGLAEVSKVAEQVLNAVNKGLYREATELWGKAEMIIEQNTDGVNFYNILTKSTPTSTMESSLEFTQSHLVCLCQRHVRHLQRDALSQLMNGPIRKKLKIIPEDQSWGGQATNVFVNMEEDFMKPVISIVDELLEAGINVTVYNGQLDLIVDTMGQEAWVRKLKWPELPKFSQLKWKALYSDPKSLETSAFVKSYKNLAFYWILKAGHMVPSDQGDMALKMMRLVTQQE

SEQ ID NO: 11708 - protein, 296 aa, Homo sapiens
MELALRRSPVPRWLLLLPLLLGLNAGAVIDWPTEEGKEVWDYVTVRKDAYMFWWLYYATNSCKNFSELPLVMWLQGGPGGSSTGFGNFEEIGPLDSDLKPRKTTWLQAASLLFVDNPVGTGFSYVNGSGAYAKDLAMVASDMMVLLKTFFSCHKEFQTVPFYIFSESYGGKMAAGIGLELYKAIQRGTIKCNFAGVALGDSWISPVDSVLSWGPYLYSMSLLEDKGLAEVSKVAEQVLNAVNKGLYREATELWGKAEMIIEQNTDGVNFYNILTKSTPTSTMESSLEFTQSHLVWF

SEQ ID NO: 11709 - protein, 176 aa, Homo sapiens
MELALRRSPVPRWLLLLPLLLGLNAGAVIDWPTEEGKEVWDYVTVRKDAYMFWWLYYATNSCKNFSELPLVMWLQLQAASLLFVDNPVGTGFSYVNGSGAYAKDLAMVASDMMVLLKTFFSCHKEFQTVPFYIFSESYGGKMAAGIGLELYKAIQRGTIKCNFAGVALGDSWISPV

SEQ ID NO: 11710 - protein, 69 aa, Homo sapiens
MELALRRSPVPRWLLLLPLLLGLNAGSMGLCDGPQGCLHVLVALLCHQLLQELLRTAPGHVASGRSRRF

SEQ ID NO: 11711 - protein, 95 aa, Homo sapiens
MVASDMMVLLKTFFSCHKEFQTVPFYIFSESYGGKMAAGIGLELYKAIQRGTIKCNFAGVALGDSWISPVDSVLSWGPYLYSMSLLEDKGLAEVS

SEQ ID NO: 11712 - protein, 135 aa, Homo sapiens
  SITE 1: note = misc_feature - Xaa can be any naturally occurring amino acid
XTMESSLEFTQSHLGQATNVFVNMEEDFMKPVISIVDELLEAGINVTVYNGQLDLIVDTMGQEAWVRKLKWPELPKFSQLKWKALYSDPKSLETSAFVKSYKNLAFYWILKAGHMVPSDQGDMALKMMRLVTQQE

SEQ ID NO: 11713 - protein, 92 aa, Homo sapiens
MKLMVLVFTIGLTLLLGVQAMPANRLSCYRKILKDHNCHNLPEGVADLTQIDVNVQDHFWDGKGCEMICYCNFSELLCCPKCHHIFILLRNL

SEQ ID NO: 11714 - protein, 98 aa, Homo sapiens
MKLMVLVFTIGLTLLLGVQAMPANRLSCYRKILKDHNCHNLPEGVADLTQIDVNVQDHFWDGKGCEMICYCNFSELLCCPKDVFFGPKISFVIPCNNQ

SEQ ID NO: 11715 - protein, 121 aa, Homo sapiens
MAPRPLLLLLLLLGGSAARPAPPRARRHSDGTFTSELSRLREGARLQRLLQGLVGKRSEQDAENSMAWTRLSAGLLCPSGSNMPILQAWMPLDGTWSPWLPPGPMVSEPAGAAAEGTLRPR

SEQ ID NO: 11716 - protein, 347 aa, Homo sapiens
MGAAAVRWHLCVLLALGTRGRLAGGSGLPGSVDVDECSEGTDDCHIDAICQNTPKSYKCLCKPGYKGEGKQCEDIDECENDYYNGGCVHECINIPGNYRCTCFDGFMLAHDGHNCLDVDECQDNNGGCQQICVNAMGSYECQCHSGFFLSDNQHTCIHRSNEGMNCMNKDHGCAHICRETPKGGVACDCRPGFDLAQNQKDCTLTCNYGNGGCQHSCEDTDTGPTCGCHQKYALHSDGRTCIEKDEAAIERSQFNATSVADVDKRVKRRLLMETCAVNNGGCDRTCKDTATGVRCSCPVGFTLQPDGKTCKGQHVELCGCPCLYWPGQEPPCACIAGPRAGLNGGHV

SEQ ID NO: 11717 - protein, 988 aa, Homo sapiens
MGAAAVRWHLCVLLALGTRGRLAGGSGLPGSVDVDECSEGTDDCHIDAICQNTPKSYKCLCKPGYKGEGKQCEDIDECENDYYNGGCVHECINIPGNYRCTCFDGFMLAHDGHNCLDVDECQDNNGGCQQICVNAMGSYECQCHSGFFLSDNQHTCIHRSNEGMNCMNKDHGCAHICRETPKGGVACDCRPGFDLAQNQKDCTLTCNYGNGGCQHSCEDTDTGPTCGCHQKYALHSDGRTCIETCAVNNGGCDRTCKDTATGVRCSCPVGFTLQPDGKTCKDINECLVNNGGCDHFCRNTVGSFECGCRKGYKLLTDERTCQDIDECSFERTCDHICINSPGSFQCLCHRGYILYGTTHCGDVDECSMSNGSCDQGCVNTKGSYECVCPPGRRLHWNGKDCVETGKCLSRAKTSPRAQLSCSKAGGVESCFLSCPAHTLFVPDSENSYVLSCGVPGPQGKALQKRNGTSSGLGPSCSDAPTTPIKQKARFKIRDAKCHLRPHSQARAKETARQPLLDHCHVTFVTLKCDSSKKRRRGRKSPSKEVSHITAEFEIETKMEEASDTCEADCLRKRAEQSLQAAIKTLRKSIGRQQFYVQVSGTEYEVAQRPAKALEGQGACGAGQVLQDSKCVACGPGTHFGGELGQCVSCMPGTYQDMEGQLSCTPCPSSDGLGLPGARNVSECGGQCSPGFFSADGFKPCQACPVGTYQPEPGRTGCFPCGGGLLTKHEGTTSFQDCEAKVHCSPGHHYNTTTHRCIRCPVGTYQPEFGQNHCITCPGNTSTDFDGSTNVTHCKNQHCGGELGDYTGYIESPNYPGDYPANAECVWHIAPPPKRRILIVVPEIFLPIEDECGDVLVMRKSASPTSITTYETCQTYERPIAFTSRSRKLWIQFKSNEGNSGKGFQVPYVTYDEDYQQLIEDIVRDGRLYASENHQEILKDKKLIKALFDVLAHPQNYFKYTAQESKEMFPRSFIKLLRSKVSRFLRPYK

SEQ ID NO: 11718 - protein, 363 aa, Homo sapiens [sequence omitted]

SEQ ID NO: 11719 - protein, 175 aa, Homo sapiens
  SITE 1: note = misc_feature - Xaa can be any naturally occurring amino acid
XRETPKGGVACDCRPGFDLAQNQKDCTLTCNYGNGGCQHSCEDTDTGPTCGCHQKYALHSDGRTCIEKDEAAIERSQFNATSVADVDKRVKRRLLMETCAVNNGGCDRTCKDTATGVRCSCPVGFTLQPDGKTCKDINECLVNNGGCDHFCRNTVGSFECGCRKGYKLLTDERTC

SEQ ID NO: 11720 - protein, 999 aa, Homo sapiens
MGVAGRNRPGAAWAVLLLLLLLPPLLLLAGAVPPGRGRAAGPQEDVDECAQGLDDCHADALCQNTPTSYKCSCKPGYQGEGRQCEDIDECGNELNGGCVHDCLNIPGNYRCTCFDGFMLAHDGHNCLDVDECLENNGGCQHTCVNVMGSYECCCKEGFFLSDNQHTCIHRSEEGLSCMNKDHGCSHICKEAPRGSVACECRPGFELAKNQRDCILTCNHGNGGCQHSCDDTADGPECSCHPQYKMHTDGRSCLEREDTVLEVTESNTTSVVDGDKRVKRRLLMETCAVNNGGCDRTCKDTSTGVHCSCPVGFTLQLDGKTCKDIDECQTRNGGCDHFCKNIVGSFDCGCKKGFKLLTDEKSCQDVDECSLDRTCDHSCINHPGTFACACNRGYTLYGFTHCGDTNECSINNGGCQQVCVNTVGSYECQCHPGYKLHWNKKDCVEVKGLLPTSVSPRVSLHCGKSGGGDGCFLRCHSGIHLSSDVTTIRTSVTFKLNEGKCSLKNAELFPEGLRPALPEKHSSVKESFRYVNLTCSSGKQVPGAPGRPSTPKEMFITVEFELETNQKEVTASCDLSCIVKRTEKRLRKAIRTLRKAVHREQFHLQLSGMNLDVAKKPPRTSERQAESCGVGQGHAENQCVSCRAGTYYDGARERCILCPNGTFQNEEGQMTCEPCPRPGNSGALKTPEAWNMSECGGLCQPGEYSADGFAPCQLCALGTFQPEAGRTSCFPCGGGLATKHQGATSFQDCETRVQCSPGHFYNTTTHRCIRCPVGTYQPEFGKNNCVSCPGNTTTDFDGSTNITQCKNRRCGGELGDFTGYIESPNYPGNYPANTECTWTINPPPKRRILIVVPEIFLPIEDDCGDYLVMRKTSSSNSVTTYETCQTYERPIAFTSRSKKLWIQFKSNEGNSARGFQVPYVTYDEDYQELIEDIVRDGRLYASENHQEILKDKKLIKALFDVLAHPQNYFKYTAQESREMFPRSFIRLLRSKVSRFLRPYK

SEQ ID NO: 11721 - protein, 807 aa, Homo sapiens
MGVAGRNRPGAAWAVLLLLLLLPPLLLLAGAVPPGRGRAAGPQEDVDECAQGLDDCHADALCQNTPTSYKCSCKPGYQGEGRQCEDIDECGNELNGGCVHDCLNIPGNYRCTCFDGFMLAHDGHNCLDVDECLENNGGCQHTCVNVMGSYECCCKEGFFLSDNQHTCIHRSEEGLSCMNKDHGCSHICKEAPRGSVACECRPGFELAKNQRDCILTCNHGNGGCQHSCDDTADGPECSCHPQYKMHTDGRSCLEREDTVLEVTESNTTSVVDGDKRVKRRLLMETCAVNNGGCDRTCKDTSTGVHCSCPVGFTLQLDGKTCKDIDECQTRNGGCDHFCKNIVGSFDCGCKKGFKLLTDEKSCQDVDECSLDRTCDHSCINHPGTFACACNRGYTLYGFTHCGDTNECSINNGGCQQVCVNTVGSYECQCHPGYKLHWNKKDCVASCDLSCIVKRTEKRLRKAIRTLRKAVHREQFHLQLSGMNLDVAKKPPRTSERQAESCGVGQGHAENQCVSCRAGTYYDGARERCILCPNGTFQNEEGQMTCEPCPRPGNSGALKTPEAWNMSECGGLCQPGEYSADGFAPCQLCALGTFQPEAGRTSCFPCGGGLATKHQGATSFQDCETRVQCSPGHFYNTTTHRCIRCPVGTYQPEFGKNNCVSCPGNTTTDFDGSTNITQCKTSSNSVTTYETCQTYERPIAFTSRSKKLWIQFKSNEGNSARGFQVPYVTYDEDYQELIEDIVRDGRLYASENHQEILKDKKLIKALFDVLAHPQNYFKYTAQESREMFPRSFIRLLRSKVSRFLRPYK

SEQ ID NO: 11722 - protein, 971 aa, Homo sapiens
MGVAGRNRPGAAWAVLLLLLLLPPLLLLAGAVPPGRGRAAGPQEDVDECAQGLDDCHADALCQNTPTSYKCSCKPGYQGEGRQCEDIDECGNELNGGCVHDCLNIPGNYRCTCFDGFMLAHDGHNCLDVDECLENNGGCQHTCVNVMGSYECCCKEGFFLSDNQHTCIHRSEEGLSCMNKDHGCSHICKEAPRGSVACECRPGFELAKNQRDCILTCNHGNGGCQHSCDDTADGPECSCHPQYKMHTDGRSCLEREDTVLEVTESNTTSVVDGDKRVKRRLLMETCAVNNGGCDRTCKDTSTGVHCSCPVGFTLQLDGKTCKDIDECQTRNGGCDHFCKNIVGSFDCGCKKGFKLLTDEKSCQDVDECSLDRTCDHSCINHPGTFACACNRGYTLYGFTHCGDTNECSINNGGCQQVCVNTVGSYECQCHPGYKLHWNKKDCVEVKGLLPTSVSPRVSLHCGKSGGGDGCFLRCHSGIHLSSGLQGAYSVTCGSSSPLRNKQQKSNDSAFGDVTTIRTSVTFKLNEGKCSLKNAELFPEGLRPALPEKHSSVKESFRYVNLTCSSGKQVPGAPGRPSTPKEMFITVEFELETNQKEVTASCDLSCIVKRTEKRLRKAIRTLRKAVHREQFHLQLSGMNLDVAKKPPRTSERQAESCGVGQGHAENQCGLCQPGEYSADGFAPCQLCALGTFQPEAGRTSCFPCGGGLATKHQGATSFQDCETRVQCSPGHFYNTTTHRCIRCPVGTYQPEFGKNNCVSCPGNTTTDFDGSTNITQCKNRRCGGELGDFTGYIESPNYPGNYPANTECTWTINPPPKRRILIVVPEIFLPIEDDCGDYLVMRKTSSSNSVTTYETCQTYERPIAFTSRSKKLWIQFKSNEGNSARGFQVPYVTYDEDYQELIEDIVRDGRLYASENHQEILKDKKLIKALFDVLAHPQNYFKYTAQESREMFPRSFIRLLRSKVSRFLRPYK

SEQ ID NO: 11723 - protein, 172 aa, Homo sapiens
  SITE 1: note = misc_feature - Xaa can be any naturally occurring amino acid
XCSCHPQYKMHTDGRSCLEREDTVLEVTESNTTSVVDGDKRVKRRLLMETCAVNNGGCDRTCKDTSTGVHCSCPVGFTLQLDGKTCKDIDECQTRNGGCDHFCKNIVGSFDCGCKKGFKLLTDEKSCQDVDECSLDRTCDHSCINHPGTFACACNRGYTLYGFTHCGEVKGL

SEQ ID NO: 11724 - protein, 112 aa, Homo sapiens
  SITE 1: note = misc_feature - Xaa can be any naturally occurring amino acid
XGDFTGYIESPNYPGNYPANTECTWTINPPPKRRILIVVPEIFLPIEDDCGDYLVMRKTSSSNSVTTYETCQTYERPIAFTSRSKKLWIQFKSNEGNSARGFQVPYVTYDDA

SEQ ID NO: 11725 - protein, 192 aa, Homo sapiens
  SITE 1: note = misc_feature - Xaa can be any naturally occurring amino acid
XKRRLLMETCAVNNGGCDRTCKDTSTGVHCSCPVGFTLQLDGKTCKDIDECQTRNGGCDHFCKNIVGSFDCGCKKGFKLLTDEKSCQDVDECSLDRTCDHSCINHPGTFACACNRGYTLYGFTHCGDTNECSINNGGCQQVCVNTVGSYECQCHPGYKLHWNKKDCVVKGLLPTSVSPRVSLHCGKSGGGDG

SEQ ID NO: 11726 - protein, 119 aa, Homo sapiens
  SITE 1: note = misc_feature - Xaa can be any naturally occurring amino acid
XYIESPNYPGNYPANTECTWTINPPPKRRILIVVPEIFLPIEDDCGDYLVMRKTSSSNSVTTYETCQTYERPIAFTSRSKKLWIQFKSNEGNSARGFQVPYVTYDGKHSLQHMERASLL

SEQ ID NO: 11727 - protein, 993 aa, Homo sapiens
MGSGRVPGLCLLVLLVHARAAQYSKAAQDVDECVEGTDNCHIDAICQNTPRSYKCICKSGYTGDGKHCKDVDECEREDNAGCVHDCVNIPGNYRCTCYDGFHLAHDGHNCLDVDECAEGNGGCQQSCVNMMGSYECHCREGFFLSDNQHTCIQRPEEGMNCMNKNHGCAHICRETPKGGIACECRPGFELTKNQRDCKLTCNYGNGGCQHTCDDTEQGPRCGCHIKFVLHTDGKTCIETCAVNNGGCDSKCHDAATGVHCTCPVGFMLQPDRKTCKDIDECRLNNGGCDHICRNTVGSFECSCKKGYKLLINERNCQDIDECSFDRTCDHICVNTPGSFQCLCHRGYLLYGITHCGDVDECSINRGGCRFGCINTPGSYQCTCPAGQGRLHWNGKDCTEPLKCQGSPGASKAMLSCNRSGKKDTCALTCPSRARFLPESENGFTVSCGTPSPRAAPARAGHNGNSTNSNHCHEAAVLSIKQRASFKIKDAKCRLHLRNKGKTEEAGRITGPGGAPCSECQVTFIHLKCDSSRKGKGRRARTPPGKEVTRLTLELEAEVRAEETTASCGLPCLRQRMERRLKGSLKMLRKSINQDRFLLRLAGLDYELAHKPGLVAGERAEPMESCRPGQHRAGTKCVSCPQGTYYHGQTEQCVPCPAGTFQEREGQLSCDLCPGSDAHGPLGATNVTTCAGQCPPGQHSVDGFKPCQPCPRGTYQPEAGRTLCFPCGGGLTTKHEGAISFQDCDTKVQCSPGHYYNTSIHRCIRCAMGSYQPDFRQNFCSRCPGNTSTDFDGSTSVAQCKNRQCGGELGEFTGYIESPNYPGNYPAGVECIWNINPPPKRKILIVVPEIFLPSEDECGDVLVMRKNSSPSSITTYETCQTYERPIAFTARSRKLWINFKTSEANSARGFQIPYVTYDEDYEQLVEDIVRDGRLYASENHQEILKDKKLIKAFFEVLAHPQNYFKYTEKHKEMLPKSFIKLLRSKVSSFLRPYK

SEQ ID NO: 11728 - protein, 310 aa, Homo sapiens
MRRAALWLWLCALALSLQPALPQIVATNLPPEDQDGSGDDSDNFSGSGAGALQDITLSQQTPSTWKDTQLLTAIPTSPEPTGLEATAASTSTLPAGEGPKEGEAVVLPEVEPGLTAREQEATPRPRETTQLPTTHLASTTTATTAQEPATSHPHRDMQPGHHETSTPAGPSQADLHTPHTEDGGPSATERAAEDGASSQLPAAEGSGEQDFTFETSGENTAVVAVEPDRRNQSPVDQGATGASQGLLDRKEVLGGVIAGGLVGLIFAVCLVGFMLYRMKKKDEGSYSLEEPKQANGGAYQKPTKQEEFYA

SEQ ID NO: 11729 - protein, 310 aa, Homo sapiens; identical to SEQ ID NO: 11728

SEQ ID NO: 11730 - protein, 169 aa, Homo sapiens
MRRAALWLWLCALALSLQPALPQIVATNLPPEDQDGSGDDSDNFSGSGAGALQDITLSQQTPSTWKDTQLLTAIPTSPEPTGLEATAASTSTLPAGEGPKEGEAVVLPEVEPGLTAREQEATPRPRETTQLPTTHLASTTTATTAQEPATSHPHRDMQPVHFVSWGGLI

SEQ ID NO: 11731 - protein, 28 aa, Homo sapiens
MRRAALWLWLCALALSLQPALPSLSHGR

SEQ ID NO: 11732 - protein, 215 aa, Homo sapiens
PRWPGEPGQGCVGGAGERLQGPRACRGRLEQIVATNLPPEDQDGSGDDSDNFSGSGAGALQDITLSQQTPSTWKDTQLLTAIPTSPEPTGLEATAASTSTLPAGEGPKEGEAVVLPEVEPGLTAREQEATPRPRETTQLPTTHLASTTTATTAQEPATSHPHRDMQPGHHETSTPAGPSQADLHTPHTEDGGPSATERAAEDGASSQLPAAEGSG

SEQ ID NO: 11733 - protein, 211 aa, Homo sapiens
MAVVPLLLLGGLWSAVGASSLGVVTCGSVVKLLNTRHNVRLHSHDVRYGSGSGQQSVTGVTSVDDSNSYWRIRGKSATVCERGTPIKCGQPIRLTHVNTGRNLHSHHFTSPLSGNQEVSAFGEEGEGDYLDDWTVLCNGPYWVRDGEVRFKHSSTEVLLSVTGEQYGRPISGQKEVHGMAQPSQNNYWKAMEGIFMKPSELLKAEAHHAEL

SEQ ID NO: 11734 - protein, 104 aa, Homo sapiens
SLGVVTCGSVVKLLNTRHNVRLHSHDVRYGSGSGQQSVTGVTSVDDSNSYWRIRGKSATVCERGTPIKCGQPIRLTHVNTGRNLHSHHFTSPLSGNQLLCKVIL

SEQ ID NO: 11735 - protein, 50 aa, Homo sapiens
  SITE 1: note = misc_feature - Xaa can be any naturally occurring amino acid
XRNLHSHHFTSPLSGNQENNMVDLSVGKKRCMAWPSQVRTTTGKPWKASS

SEQ ID NO: 11736 - protein, 221 aa, Homo sapiens
MWSAGRGGAAWPVLLGLLLALLVPGGGAAKTGAELVTCGSVLKLLNTHHRVRLHSHDIKYGSGSGQQSVTGVEASDDANSYWRIRGGSEGGCPRGSPVRCGQAVRLTHVLTGKNLHTHHFPSPLSNNQEVSAFGEDGEGDDLDLWTVRCSGQHWEREAAVRFQHVGTSVFLSVTGEQYGSPIRGQHEVHGMPSANTHNTWKAMEGIFIKPSVEPSAGHDEL

SEQ ID NO: 11737 - protein, 254 aa, Homo sapiens
MVWPWVAMASRWGPLIGLAPCCLWLLGAVLLMDASARPANHSSTRERVANREENEILPPDHLNGVKLEMDGHLNRGFHQEVFLGKDLGGFDEDAEPRRSRRKLMVIFSKVDVNTDRKISAKEMQRWIMEKTAEHFQEAMEESKTHFRAVDPDGDGHVSWDEYKVKFLASKGHSEKEVADAIRLNEELKVDEESCAPLSTGSPGEPEGPLVPGGQPPCRPAADGGGVPVVPPPRAQPGNAQVHGEGDRPGPGPGR

SEQ ID NO: 11738 - protein, 348 aa, Homo sapiens
MVWPWVAMASRWGPLIGLAPCCLWLLGAVLLMDASARPANHSSTRERVANREENEILPPDHLNGVKLEMDGHLNRGFHQEVFLGKDLGGFDEDAEPRRSRRKLMVIFSKVDVNTDRKISAKEMQRWIMEKTAEHFQEAMEESKTHFRAVDPDGDGHVSWDEYKVKFLASKGHSEKEVADAIRLNEELKVDEETQEVLENLKDRWYQADSPPADLLLTEEEFLSFLHPEHSRGMLRFMVKEIVRDLDQDGDKQLSVPEFISLPVGTVENQQGQDIDDNWVKDRKKEFEELIDSNHDGIVTAEELENVPTLPLQPIGTLNSHFVRLAAELGGGKATLTCAPLARRATWTP

SEQ ID NO: 11739 - protein, 362 aa, Homo sapiens
MVWPWVAMASRWGPLIGLAPCCLWLLGAVLLMDASARPANHSSTRERVANREENEILPPDHLNGVKLEMDGHLNRGFHQEVFLGKDLGGFDEDAEPRRSRRKLMVIFSKVDVNTDRKISAKEMQRWIMEKTAEHFQEAMEESKTHFRAVDPDGDGHVSWDEYKVKFLASKGHSEKEVADAIRLNEELKVDEETQEVLENLKDRWYQADSPPADLLLTEEEFLSFLHPEHSRGMLRFMVKEIVRDLDQDGDKQLSVPEFISLPVGTVENQQGQDIDDNWVKDRKKEFEELIDSNHDGIVTAEELESYMDPMNEYNALNEAKQMIAVADENQNHHLEPEEVLKYSEFFTGSKLVDYARSVHEEF

SEQ ID NO: 11740 - protein, 243 aa, Homo sapiens
  SITE 1: note = misc_feature - Xaa can be any naturally occurring amino acid
XLEMDGHLNRGFHQEVFLGKDLGGFDEDAEPRRSRRKLMVIFSKVDVNTDRKISAKEMQRWIMEKTAEHFQEAMEESKTHFRAVDPDGDGHVSWDEYKVKFLASKGHSEKEVADAIRLNEELKVDEESSTSRNFLDLRAGVCRPRYPQAAPLSAQEVLENLKDRWYQADSPPADLLLTEEEFLSFLHPEHSRGMLRFMVKEIVRDLDQDGDKQLSVPEFISLPVGTVENQQGQDIDDNWVKDR

SEQ ID NO: 11741 - protein, 65 aa, Homo sapiens
MAVSTVFSTSSLGIGLFVAVGSVSPSGKEDLGFPTPPSSPLAEVTTLTSYLDKLSTSLDWEPLGD

SEQ ID NO: 11742 - protein, 65 aa, Homo sapiens; identical to SEQ ID NO: 11741

SEQ ID NO: 11743 - protein, 28 aa, Homo sapiens
MAVSTVFSTSSLKLNQPQKYLKMKSWPC

SEQ ID NO: 11744 - protein, 88 aa, Homo sapiens
MAVSTVFSTSSLMLALSRHSLLSPLLSVTSFRRFYRGDSPTDSQKDMIEIPLPPWQERTDESIETKRARLLYESRKRGMLENCILLRS

SEQ ID NO: 11745 - protein, 166 aa, Homo sapiens
MAVSTVFSTSSLMLALSRHSLLSPLLSVTSFRRFYRGDSPTDSQKDMIEIPLPPWQERTDESIETKRARLLYESRKRGMLENCILLSLFAKEHLQHMTEKQLNLYDRLINEPSNDWDIYYWATEAKPAPEIFENEVMALLRDFAKNKNKEQRLRAPDLEYLFEKPR

SEQ ID NO: 11746 - protein, 133 aa, Homo sapiens
MAVSTVFSTSSLMLALSRHSLLSPLLSVTSFRRFYRGDSPTDSQKDMIEIPLPPWQERTDESIETKRARLLYESRKRGMLENCILLSLFAKEHLQHMTEKQLNLYDRLINEPSNDWDIYYWATGSSDSPASAS

SEQ ID NO: 11747 - protein, 141 aa, Homo sapiens
MAVSTVFSTSSLMLALSRHSLLSPLLSVTSFRRFYRGDSPTDSQKDMIEIPLPPWQERTDESIETKRARLLYESRKRGMLENCILLSLFAKEHLQHMTEKQLNLYDRLINEPSNDWDIYYWATGTGYDKQHNVKIGQFRLI

SEQ ID NO: 11748 - protein, 129 aa, Homo sapiens
MAVSTVFSTSSLMLALSRHSLLSPLLSVTSFRRFYRGDSPTDSQKDMIEIPLPPWQERTDESIETKRARLLYESRKRGMLENCILLSLFAKEHLQHMTEKQLNLYDRLINEPSNDWDIYYWATGWSAMA

SEQ ID NO: 11749 - protein, 108 aa, Homo sapiens
MTPSRLPWLLSWVSATAWRAARSPLLCHSLRKTSSSQGGKSELVKQSLKKPKLPEGRFDAPEDSHLEKEPLEKFPDDVNPVTKEKGGPRGPEPTRYGDWERKGRCIDF

SEQ ID NO: 11750 - protein, 280 aa, Homo sapiens
MAAVVALSLRRRLPATTLGGACLQASRGAQTAAATAPRIKKFAIYRWDPDKAGDKPHMQTYEVDLNKCGPMVLDALIKIKNEVDSTLTFRRSCREGICGSCAMNINGGNTLACTRRIDTNLNKVSKIYPLPHMYVIKDLVPDLSNFYAQYKSIEPYLKKKDESQEGKQQYLQSIEEREKLDGLYECILCACCSTSCPSYWWNGDKYLGPAVLMQAYRWMIDSRDDFTEERLAKLQDPFSLYRCHTIMNCTRTCPKGLNPGKAIAEIKKMMATYKEKKASV

SEQ ID NO: 11751 - protein, 200 aa, Homo sapiens
MFNLTLVHYKASRGAQTAAATAPRIKKFAIYRWDPDKAGDKPHMQTYEVDLNKCGPMVLDALIKIKNEVDSTLTFRRSCREGICGSCAMNINGGNTLACTRRIDTNLNKVSKIYPLPHMYVIKDLVPDLSNFYAQYKSIEPYLKKKDESQEGKQQYLQSIEEREKLDGLYECILCACCSTSCPSYWWNGDKYLGPAVLMQ

SEQ ID NO: 11752 - protein, 123 aa, Homo sapiens
MQTYEVDLNKCGPMVLDALIKIKNEVDSTLTFRRSCREGICGSCAMNINGGNTLACTRRIDTNLNKVSKIYPLPHMYVIKDLVPDLSNFYAQYKSIEPYLKKKDESQEGKQQYLQSIEEREKL

SEQ ID NO: 11753 - protein, 120 aa, Homo sapiens
MAVLWRLSAVCGALGGRAGSKAASLHWTSERVVSVLLLGLLPAAYLNPCSAMDYSLAAALTLHGHWGLGQVVTDYVHGDALQKAAKAGLLALSALTFAGLCYFNYHDVGICKAVAMLWKL

SEQ ID NO: 11754 - protein, 72 aa, Homo sapiens
MAVLWRLSAVCGALGGRALLLRTPVVRPAHISAFLQDRPIPEWCGVQHIHLSPSHHCWSAVVRSRLTATSTF

SEQ ID NO: 11755 - protein, 131 aa, Homo sapiens
MAVLWRLSAVCGALGGRALLLRTPVVRPAHISAFLQDRPIPEWCGVQHIHLSPSHHSGSKAASLHWTSERVVSVLLLGLLPAAYLNPCSAMDYSLAAALTLHGALDKLLLTMFMGMPCRKLPRQGFWHFQL

SEQ ID NO: 11756 - protein, 104 aa, Homo sapiens
MAVLWRLSAVCGALGGRALLLRTPVVRPAHISAFLQDRPIPEWCGVQHIHLSPSHHSGSKAASLHWTSERVVSVLLLGLLPAAYLNPCSAMDYSLAAALTLHGH

SEQ ID NO: 11757 - protein, 159 aa, Homo sapiens
MAVLWRLSAVCGALGGRALLLRTPVVRPAHISAFLQDRPIPEWCGVQHIHLSPSHHSGSKAASLHWTSERVVSVLLLGLLPAAYLNPCSAMDYSLAAALTLHGHWGLGQVVTDYVHGDALQKAAKAGLLALSALTFAGLCYFNYHDVGICKAVAMLWKL

SEQ ID NO: 11758 - protein, 143 aa, Homo sapiens
MAVLWRLSAVCGALGGRALLLRTPVVRPAHISAFLQDRPIPEWCGVQHIHLSPSHHSGSKAASLHWTSERVVSVLLLGLLPAAYLNPCSAMDYSLAAALTLHGHWLECNGAILARHDLGSARSQLTATSAFRVQAILLPQPPK

SEQ ID NO: 11759 - protein, 143 aa, Homo sapiens; identical to SEQ ID NO: 11758

SEQ ID NO: 11760 - protein, 85 aa, Homo sapiens
MAVLWRLSAVCGALGGRALLLRTPVVRPAHISAFLQDRPIPEWCGVQHIHLSPSHHWALDKLLLTMFMGMPCRKLPRQGFWHFQL

SEQ ID NO: 11761 - protein, 55 aa, Homo sapiens
  SITE 1: note = misc_feature - Xaa can be any naturally occurring amino acid
XGSKAASLHWTSERVVSVLLLGLLPAAYLNPCSAMDYSLAAALTLHGHWKIKNNE

SEQ ID NO: 11762 - protein, 101 aa, Homo sapiens
  SITE 1: note = misc_feature - Xaa can be any naturally occurring amino acid
XWRLSAVCGALGGRALLLRTPVVRPAHISAFLQDRPIPEWCGVQHIHLSPSHHSGSKAASLHWTSERVVSVLLLGLLPAAYLNPCSAMDYSLAAALTLHGH

SEQ ID NO: 11763 - protein, 353 aa, Homo sapiens
MEFRKTMDIDHILDWQPPEVIQKYMPGGLCGYDRDGCPVWYDIIGPLDPKGLLFSVTKQDLLKTKMRDCERILHECDLQTERLGKKIETIVMIFDCEGLGLKHFWKPLVEVYQEFFGLLEENYPETLKFMLIVKATKLFPVGYNLMKPFLSEDTRRKIIVLGNNWKEGLLKLISPEELPAQFGGTLTDPDGNPKCLTKINYGGEIPKSMYVRDQVKTQYEHSVQINRGSSHQVEYEILFPGCVLRWQFSSDGADIGFGVFLKTKMGERQRAGEMTDVLPSQRYNAHMVPEDGNLTCSEAGVYVESESGKSCCHLPVIICSHELQNSHSNSQVMAYQMVRKCKLSRPLPLPASN

SEQ ID NO: 11764 - protein, 341 aa, Homo sapiens
MEFRKTMDIDHILDWQPPEVIQKYMPGGLCGYDRDGCPVWYDIIGPLDPKGLLFSVTKQDLLKTKMRDCERILHECDLQTERLGKKIETIVMIFDCEGLGLKHFWKPLVEVYQEFFGLLEENYPETLKFMLIVKATKLFPVGYNLMKPFLSEDTRRKIIVLGNNWKEGLLKLISPEELPAQFGGTLTDPDGNPKCLTKINYGGEIPKSMYVRDQVKTQYEHSVQINRGSSHQVEYEILFPGCVLRWQFSSDGADIGFGVFLKTKMGERQRAGEMTDVLPSQRYNAHMVPEDGNLTCSEAGVYVLRFDNTYSFVHAKKVSFTVEVLLPDEGMQKYDKELTPV

SEQ ID NO: 11765 - protein, 400 aa, Homo sapiens
MSGRVGDLSPKQAETLAKFRENVQDVLPALPNPDDYFLLRWLRARNFDLQKSEALLRKYMEFRKTMDIDHILDWQPPEVIQKYMPGGLCGYDRDGCPVWYDIIGPLDPKGLLFSVTKQDLLKTKMRDCERILHECDLQTERLGKKIETIVMIFDCEGLGLKHFWKPLVEVYQEFFGLLEENYPETLKFMLIVKATKLFPVGYNLMKPFLSEDTRRKIIVLGNNWKEGLLKLISPEELPAQFGGTLTDPDGNPKCLTKINYGGEIPKSMYVRDQVKTQYEHSVQINRGSSHQVEYEILFPGCVLRWQFSSDGADIGFGVFLKTKMGERQRAGEMTDVLPSQRYNAHMVPEDGNLTCSEAGVYVLRFDNTYSFVHAKKVSFTVEVLLPDEGMQKYDKELTPV

SEQ ID NO: 11766 - protein, 51 aa, Homo sapiens
MSGRVGDLSPKQAETLAKMESLSSRLECCGAISAHCSLCLPGSSNSPASAS

SEQ ID NO: 11767 - protein, 323 aa, Homo sapiens
MVIQKYMPGGLCGYDRDGCPVWYDIIGPLDPKGLLFSVTKQDLLKTKMRDCERILHECDLQTERLGKKIETIVMIFDCEGLGLKHFWKPLVEVYQEFFGLLEENYPETLKFMLIVKATKLFPVGYNLMKPFLSEDTRRKIIVLGNNWKEGLLKLISPEELPAQFGGTLTDPDGNPKCLTKINYGGEIPKSMYVRDQVKTQYEHSVQINRGSSHQVEYEILFPGCVLRWQFSSDGADIGFGVFLKTKMGERQRAGEMTDVLPSQRYNAHMVPEDGNLTCSEAGVYVLRFDNTYSFVHAKKVSFTVEVLLPDEGMQKYDKELTPV

SEQ ID NO: 11768 - protein, 323 aa, Homo sapiens; identical to SEQ ID NO: 11767

SEQ ID NO: 11769 - protein, 231 aa, Homo sapiens
  SITE 1: note = misc_feature - Xaa can be any naturally occurring amino acid
XKTSRMCFLPCPTLMIISFYAGSEYMEFRKTMDIDHILDWQPPEVIQKYMPGGLCGYDRDGCPVWYDIIGPLDPKGLLFSVTKQDLLKTKMRDCERILHECDLQTERLGKKIETIVMIFDCEGLGLKHFWKPLVEVYQEFFGLLEENYPETLKFMLIVKATKLFPVGYNLMKPFLSEDTRRKIIVLGNNWKEGLLKLISPEELPAQFGGTLTDPDGNPKCLTKINYGGEIP

SEQ ID NO: 11770 - protein, 1059 aa, Homo sapiens
ARVRDPRTYDRRYWCDAEYDAYRREHSAFGDRPEKRDNNWRYDPRFTGSFDDDPDPHRDPYGEEVDRRSVHSEHSARSLHSAHSLASRRSSLSSHSHQSQIYRSHNVAAGSYEAPLPPGSFHGDFAYGTYRSNFSSGPGFPEYGYPADTVWPAMEQVSSRPTSPEKFSVPHVCARFGPGGQLIKVIPNLPSEGQPALVEVHSMEALLQHTSEQEEMRAFPGPLAKDDTHKVDVINFAQNKAMKCLQNENLIDKESASLLWNFIVLLCRQNGTVVGTDIAELLLRDHRTVWLPGKSPNEANLIDFTNEAVEQVEEEESGEAQLSFLTGGPAAAASSLERETERFRELLLYGRKKDALESAMKNGLWGHALLLASKMDSRTHARVMTRFANSLPINDPLQTVYQLMSGRMPAASTCCGDEKWGDWRPHLAMVLSNLNNNMDVESRTMATMGDTLASRGLLDAAHFCYLMAQAGFGVYTKKTTKLVLIGSNHSLPFLKFATNEAIQRTEAYEYAQSLGAETCPLPSFQVFKFIYSCRLAEMGLATQAFHYCEAIAKSILTQPHLYSPVLISQLVQMASQLRLFDPQLKEKPEEESLAAPTWLVHLQQVERQIKEGAGVWHQDGALPQQCPGTPSSEMEQLDRPGLSQPGALGIANPLLAVPAPSPEHSSPSVRLLPSAPQTLPDGPLASPARVPMFPVPLPPGPLEPGPGCVTPGPALGFLEPSGPGLPPGVPPLQERRHLLQEARSPDPGIVPQEAPVGNSLSELSEENFDGKFANLTPSRTVPDSEAPPGWDRADSGPTQPPLSLSPAPETKRPGQAAKKETKEPKKGESWFFRWLPGKKKTEAYLPDDKNKSIVWDEKKNQWVNLNEPEEEKKAPPPPPTSMPKTVQAAPPALPGPPGAPVNMYSRRAAGTRARYVDVLNPSGTQRSEPALAPADFVAPLAPLPIPSNLFVPTPDAEEPQLPDGTGREGPAAARGLANPEPAPEPKVLSSAASLPGSELPSSRPEGSQGGEAPGDLPAAGGPPSGAMPFYNPAQLAQACATSGSSRLGRIGQRKHLVLN

SEQ ID NO: 11771 - protein, 385 aa, Homo sapiens
MDLLPTSILLASLWICSHLHPPGVSVDLPPTSILLVSLWICSHLHPPGVSVDRPPPPSSWCLCGSPPTSILLVSLWICSPPPSSWCLCGSAPTSILLVSLWIWRLWGLTEGESWFFRWLPGKKKTEAYLPDDKNKSIVWDEKKNQWVNLNEPEEEKKAPPPPPTSMPKTVQAAPPALPGPPGAPVNMYSRRAAGTRARYVDVLNPSGTQRSEPALAPADFVAPLAPLPIPSNLFVPTPVSSVRPQGRSGRNDGLLALSSPDAEEPQLPDGTGREGPAAARGLANPEPAPEPKVLSSAASLPGSELPSSRPEGSQGGELSRCSSMSSLSREVSQHFNQAPGDLPAAGGPPSGAMPFYNPAQLAQACATSGSSRLGRIGQRKHLVLN

SEQ ID NO: 11772 - protein, 2134 aa, Homo sapiens
MPGLDRPLSRQNPHDGVVTPAASPSLPQPGLQMPGQWGPVQGGPQPSGQHRSPCPEGPVPSGVPCATSVPHFPTPSILHQGPGHEQHSPLVAPPAALPSDGRDEVSHLQSGSHLANNSDPESTFRQNPRIVNHWASPELRQNPGVKNEHRPASALVNPLARGDSPENRTHHPLGAGAGSGCAPLEADSGASGALAMFFQGGETENEENLSSEKAGLSGQADFDDFCSSPGLGRPPAPTHVGAGSLCQALLPGPSNEAAGDVWGDTASTGVPDASGSQYENVENLEFVQNQEVLPSEPLNLDPSSPSDQFRYGPLPGPAVPRHGAVCHTGAPDATLHTVHPDSVSSSYSSRSHGRLSGSARPQELVGTFIQQEVGKPEDEASGSFFKQIDSSPVGGETDETTVSQNYRGSVSQPSTPSPPKPTGIFQTSANSSFEPVKSHLVGVKPFEADRANVVGEVRETCVRQKQCRPAAALPDASPGNLEQPPDNMETLCAPQVCPLPLNSTTEAVHMLPHAGAPPLDTVYPAPEKRPSARTQGPVKCESPATTLWAQSELPDFGGNVLLAPAAPALYVCAKPQPPVVQPPEEAMSGQQSRNPSSAAPVQSRGGIGASENLENPPKMGEEEALQSQASSGYASLLSSPPTESLQNPPVLIAQPDHSYNLAQPINFSVSLSNSHEKNQSWREALVGDRPAVSSWALGGDSGENTSLSGIPTSSVLSLSLPSSVAQSNFPQGSGASEMVSNQPANLLVQPPSQPVPENLVPESQKDRKAGSALPGFANSPAGSTSVVLVPPAHGTLVPDGNKANHSSHQEDTYGALDFTLSRTLENPVNVYNPSHSDSLASQQSVASHPRQSGPGAPNLDRFYQQVTKDAQGQPGLERAQQELVPPQQQASPPQLPKAMFSELSNPESLPAQGQAQNSAQSPASLVLVDAGQQLPPRPPQSSSVSLVSSGSGQAAVPSEQPWPQPVPALAPGPPPQDLAAYYYYRPLYDAYQPQYSLPYPPEPGAASLYYQDVYSLYEPRYRPYDGAASAYAQNYRYPEPERPSSRASHSSERPPPRQGYPEGYYSSKSGWSSQSDYYASYYSSQYDYGDPGHWDRYHYSARVRDPRTYDRRYWCDAEYDAYRREHSAFGDRPEKRDNNWRYDPRFTGSFDDDPDPHRDPYGEEVDRRSVHSEHSARSLHSAHSLASRRSSLSSHSHQSQIYRSHNVAAGSYEAPLPPGSFHGDFAYGTYRSNFSSGPGFPEYGYPADTVWPAMEQVSSRPTSPEKFSVPHVCARFGPGGQLIKVIPNLPSEGQPALVEVHSMEALLQHTSEQEEMRAFPGPLAKDDTHKVDVINFAQNKAMKCLQNENLIDKESASLLWNFIVLLCRQNGTVVGTDIAELLLRDHRTVWLPGKSPNEANLIDFTNEAVEQVEEEESGEAQLSFLTGGPAAAASSLERETERFRELLLYGRKKDALESAMKNGLWGHALLLASKMDSRTHARVMTRFANSLPINDPLQTVYQLMSGRMPAASTCCGDEKWGDWRPHLAMVLSNLNNNMDVESRTMATMGDTLASRGLLDAAHFCYLMAQAGFGVYTKKTTKLVLIGSNHSLPFLKFATNEAIQRTEAYEYAQSLGAETCPLPSFQVFKFIYSCRLAEMGLATQAFHYCEAIAKSILTQPHLYSPVLISQLVQMASQLRLFDPQLKEKPEEESLAAPTWLVHLQQVERQIKEGAGVWHQDGALPQQCPGTPSSEMEQLDRPGLSQPGALGIANPLLAVPAPSPEHSSPSVRLLPSAPQTLPDGPLASPARVPMFPVPLPPGPLEPGPGCVTPGPALGFLEPSGPGLPPGVPPLQERRHLLQEARSPDPGIVPQEAPVGNSLSELSEENFDGKFANLTPSRTVPDSEAPPGWDRADSGPTQPPLSLSPAPETKRPGQAAKKETKEPKKGESWFFRWLPGKKKTEAYLPDDKNKSIVWDEKKNQWVNLNEPEEEKKAPPPPPTSMPKTVQAAPPALPGPPGAPVNMYSRRAAGTRARYVDVLNPSGTQRSEPALAPADFVAPLAPLPIPSNLFVPTPDAEEPQLPDGTGREGPAAARGLANPEPAPEPKAPGDLPAAGGPPSGAMPFYNPAQLAQACATSGSSRLGRIGQRKHLVLN

SEQ ID NO: 11773 - protein, 2154 aa, Homo sapiens
MPGLDRPLSRQNPHDGVVTPAASPSLPQPGLQMPGQWGPVQGGPQPSGQHRSPCPEGPVPSGVPCATSVPHFPTPSILHQGPGHEQHSPLVAPPAALPSDGRDEVSHLQSGSHLANNSDPESTFRQNPRIVNHWASPELRQNPGVKNEHRPASALVNPLARGDSPENRTHHPLGAGAGSGCAPLEADSGASGALAMFFQGGETENEENLSSEKAGLSGQADFDDFCSSPGLGRPPAPTHVGAGSLCQALLPGPSNEAAGDVWGDTASTGVPDASGSQYENVENLEFVQNQEVLPSEPLNLDPSSPSDQFRYGPLPGPAVPRHGAVCHTGAPDATLHTVHPDSVSSSYSSRSHGRLSGSARPQELVGTFIQQEVGKPEDEASGSFFKQIDSSPVGGETDETTVSQNYRGSVSQPSTPSPPKPTGIFQTSANSSFEPVKSHLVGVKPFEADRANVVGEVRETCVRQKQCRPAAALPDASPGNLEQPPDNMETLCAPQVCPLPLNSTTEAVHMLPHAGAPPLDTVYPAPEKRPSARTQGPVKCESPATTLWAQSELPDFGGNVLLAPAAPALYVCAKPQPPVVQPPEEAMSGQQSRNPSSAAPVQSRGGIGASENLENPPKMGEEEALQSQASSGYASLLSSPPTESLQNPPVLIAQPDHSYNLAQPINFSVSLSNSHEKNQSWREALVGDRPAVSSWALGGDSGENTSLSGIPTSSVLSLSLPSSVAQSNFPQGSGASEMVSNQPANLLVQPPSQPVPENLVPESQKDRKAGSALPGFANSPAGSTSVVLVPPAHGTLVPDGNKANHSSHQEDTYGALDFTLSRTLENPVNVYNPSHSDSLASQQSVASHPRQSGPGAPNLDRFYQQVTKDAQGQPGLERAQQELVPPQQQASPPQLPKAMFSELSNPESLPAQGQAQNSAQSPASLVLVDAGQQLPPRPPQSSSVSLVSSGSGQAAVPSEQPWPQPVPALAPGPPPQDLAAYYYYRPLYDAYQPQYSLPYPPEPGAASLYYQDVYSLYEPRYRPYDGAASAYAQNYRYPEPERPSSRASHSSERPPPRQGYPEGYYSSKSGWSSQSDYYASYYSSQYDYGDPGHWDRYHYSARVRDPRTYDRRYWCDAEYDAYRREHSAFGDRPEKRDNNWRYDPRFTGSFDDDPDPHRDPYGEEVDRRSVHSEHSARSLHSAHSLASRRSSLSSHSHQSQIYRSHNVAAGSYEAPLPPGSFHGDFAYGTYRSNFSSGPGFPEYGYPADTVWPAMEQVSSRPTSPEKFSVPHVCARFGPGGQLIKVIPNLPSEGQPALVEVHSMEALLQHTSEQEEMRAFPGPLAKDDTHKVDVINFAQNKAMKCLQNENLIDKESASLLWNFIVLLCRQNGTVVGTDIAELLLRDHRTVWLPGKSPNEANLIDFTNEAVEQVEEEESGEAQLSFLTGGPAAAASSLERETERFRELLLYGRKKDALESAMKNGLWGHALLLASKMDSRTHARVMTRFANSLPINDPLQTVYQLMSGRMPAASTCCGDEKWGDWRPHLAMVLSNLNNNMDVESRTMATMGDTLASRGLLDAAHFCYLMAQAGFGVYTKKTTKLVLIGSNHSLPFLKFATNEAIQRTEAYEYAQSLGAETCPLPSFQVFKFIYSCRLAEMGLATQAFHYCEAIAKSILTQPHLYSPVLISQLVQMASQLRLFDPQLKEKPEEESLAAPTWLVHLQQVERQIKEGAGVWHQDGALPQQCPGTPSSEMEQLDRPGLSQPGALGIANPLLAVPAPSPEHSSPSVRLLPSAPQTLPDGPLASPARVPMFPVPLPPGPLEPGPGCVTPGPALGFLEPSGPGLPPGVPPLQERRHLLQEARSPDPGIVPQEAPVGNSLSELSEENFDGKFANLTPSRTVPDSEAPPGWDRADSGPTQPPLSLSPAPETKRPGQAAKKETKEPKKGESWFFRWLPGKKKTEAYLPDDKNKSIVWDEKKNQWVNLNEPEEEKKAPPPPPTSMPKTVQAAPPALPGPPGAPVNMYSRRAAGTRARYVDVLNPSGTQRSEPALAPADFVAPLAPLPIPSNLFVPTPDAEEPQLPDGTGREGPAAARGLANPEPAPEPKLSRCSSMSSLSREVSQHFNQAPGDLPAAGGPPSGAMPFYNPAQLAQACATSGSSRLGRIGQRKHLVLN

SEQ ID NO: 11774 - protein, 2357 aa, Homo sapiens
MQPPPQTVPSGMAGPPPAGNPRSVFWASSPYRRRANNNAAVAPTTCPLQPVTDPFAFSRQALQSTPLGSSSKSSPPVLQGPAPAGFSQHPGLLVPHTHARDSSQGPCEPLPGPLTQPRAHASPFSGALTPSAPPGPEMNRSAEVGPSSEPEVQTLPYLPHYIPGVDPETSHGGHPHGNMPGLDRPLSRQNPHDGVVTPAASPSLPQPGLQMPGQWGPVQGGPQPSGQHRSPCPEGPVPSGVPCATSVPHFPTPSILHQGPGHEQHSPLVAPPAALPSDGRDEVSHLQSGSHLANNSDPESTFRQNPRIVNHWASPELRQNPGVKNEHRPASALVNPLARGDSPENRTHHPLGAGAGSGCAPLEADSGASGALAMFFQGGETENEENLSSEKAGLSGQADFDDFCSSPGLGRPPAPTHVGAGSLCQALLPGPSNEAAGDVWGDTASTGVPDASGSQYENVENLEFVQNQEVLPSEPLNLDPSSPSDQFRYGPLPGPAVPRHGAVCHTGAPDATLHTVHPDSVSSSYSSRSHGRLSGSARPQELVGTFIQQEVGKPEDEASGSFFKQIDSSPVGGETDETTVSQNYRGSVSQPSTPSPPKPTGIFQTSANSSFEPVKSHLVGVKPFEADRANVVGEVRETCVRQKQCRPAAALPDASPGNLEQPPDNMETLCAPQVCPLPLNSTTEAVHMLPHAGAPPLDTVYPAPEKRPSARTQGPVKCESPATTLWAQSELPDFGGNVLLAPAAPALYVCAKPQPPVVQPPEEAMSGQQSRNPSSAAPVQSRGGIGASENLENPPKMGEEEALQSQASSGYASLLSSPPTESLQNPPVLIAQPDHSYNLAQPINFSVSLSNSHEKNQSWREALVGDRPAVSSWALGGDSGENTSLSGIPTSSVLSLSLPSSVAQSNFPQGSGASEMVSNQPANLLVQPPSQPVPENLVPESQKDRKAGSALPGFANSPAGSTSVVLVPPAHGTLVPDGNKANHSSHQEDTYGALDFTLSRTLENPVNVYNPSHSDSLASQQSVASHPRQSGPGAPNLDRFYQQVTKDAQGQPGLERAQQELVPPQQQASPPQLPKAMFSELSNPESLPAQGQAQNSAQSPASLVLVDAGQQLPPRPPQSSSVSLVSSGSGQAAVPSEQPWPQPVPALAPGPPPQDLAAYYYYRPLYDAYQPQYSLPYPPEPGAASLYYQDVYSLYEPRYRPYDGAASAYAQNYRYPEPERPSSRASHSSERPPPRQGYPEGYYSSKSGWSSQSDYYASYYSSQYDYGDPGHWDRYHYSARVRDPRTYDRRYWCDAEYDAYRREHSAFGDRPEKRDNNWRYDPRFTGSFDDDPDPHRDPYGEEVDRRSVHSEHSARSLHSAHSLASRRSSLSSHSHQSQIYRSHNVAAGSYEAPLPPGSFHGDFAYGTYRSNFSSGPGFPEYGYPADTVWPAMEQVSSRPTSPEKFSVPHVCARFGPGGQLIKVIPNLPSEGQPALVEVHSMEALLQHTSEQEEMRAFPGPLAKDDTHKVDVINFAQNKAMKCLQNENLIDKESASLLWNFIVLLCRQNGTVVGTDIAELLLRDHRTVWLPGKSPNEANLIDFTNEAVEQVEEEESGEAQLSFLTGGPAAAASSLERETERFRELLLYGRKKDALESAMKNGLWGHALLLASKMDSRTHARVMTRFANSLPINDPLQTVYQLMSGRMPAASTCCGDEKWGDWRPHLAMVLSNLNNNMDVESRTMATMGDTLASRGLLDAAHFCYLMAQAGFGVYTKKTTKLVLIGSNHSLPFLKFATNEAIQRTEAYEYAQSLGAETCPLPSFQVFKFIYSCRLAEMGLATQAFHYCEAIAKSILTQPHLYSPVLISQLVQMASQLRLFDPQLKEKPEEESLAAPTWLVHLQQVERQIKEGAGVWHQDGALPQQCPGTPSSEMEQLDRPGLSQPGALGIANPLLAVPAPSPEHSSPSVRLLPSAPQTLPDGPLASPARVPMFPVPLPPGPLEPGPGCVTPGPALGFLEPSGPGLPPGVPPLQERRHLLQEARSPDPGIVPQEAPVGNSLSELSEENFDGKFANLTPSRTVPDSEAPPGWDRADSGPTQPPLSLSPAPETKRPGQAAKKETKEPKKGESWFFRWLPGKKKTEAYLPDDKNKSIVWDEKKNQWVNLNEPEEEKKAPPPPPTSMPKTVQAAPPALPGPPGAPVNMYSRRAAGTRARYVDVLNPSGTQRSEPALAPADFVAPLAPLPIPSNLFVPTPDAEEPQLPDGTGREGPAAARGLANPEPAPEPKVLSSAASLPGSELPSSRPEGSQGGELSRCSSMSSLSREVSQHFNQAPGDLPAAGGPPSGAMPFYNPAQLAQACATSGSSRLGRIGQRKHLVLN

SEQ ID NO: 11775 - protein, 2334 aa, Homo sapiens
MQPPPQTVPSGMAGPPPAGNPRSVFWASSPYRRRANNNAAVAPTTCPLQPVTDPFAFSRQALQSTPLGSSSKSSPPVLQGPAPAGFSQHPGLLVPHTHARDSSQGPCEPLPGPLTQPRAHASPFSGALTPSAPPGPEMNRSAEVGPSSEPEVQTLPYLPHYIPGVDPETSHGGHPHGNMPGLDRPLSRQNPHDGVVTPAASPSLPQPGLQMPGQWGPVQGGPQPSGQHRSPCPEGPVPSGVPCATSVPHFPTPSILHQGPGHEQHSPLVAPPAALPSDGRDEVSHLQSGSHLANNSDPESTFRQNPRIVNHWASPELRQNPGVKNEHRPASALVNPLARGDSPENRTHHPLGAGAGSGCAPLEADSGASGALAMFFQGGETENEENLSSEKAGLSGQADFDDFCSSPGLGRPPAPTHVGAGSLCQALLPGPSNEAAGDVWGDTASTGVPDASGSQYENVENLEFVQNQEVLPSEPLNLDPSSPSDQFRYGPLPGPAVPRHGAVCHTGAPDATLHTVHPDSVSSSYSSRSHGRLSGSARPQELVGTFIQQEVGKPEDEASGSFFKQIDSSPVGGETDETTVSQNYRGSVSQPSTPSPPKPTGIFQTSANSSFEPVKSHLVGVKPFEADRANVVGEVRETCVRQKQCRPAAALPDASPGNLEQPPDNMETLCAPQVCPLPLNSTTEAVHMLPHAGAPPLDTVYPAPEKRPSARTQGPVKCESPATTLWAQSELPDFGGNVLLAPAAPALYVCAKPQPPVVQPPEEAMSGQQSRNPSSAAPVQSRGGIGASENLENPPKMGEEEALQSQASSGYASLLSSPPTESLQNPPVLIAQPDHSYNLAQPINFSVSLSNSHEKNQSWREALVGDRPAVSSWALGGDSGENTSLSGIPTSSVLSLSLPSSVAQSNFPQGSGASEMVSNQPANLLVQPPSQPVPENLVPESQKDRKAGSALPGFANSPAGSTSVVLVPPAHGTLVPDGNKANHSSHQEDTYGALDFTLSRTLENPVNVYNPSHSDSLASQQSVASHPRQSGPGAPNLDRFYQQVTKDAQGQPGLERAQQELVPPQQQASPPQLPKAMFSELSNPESLPAQGQAQNSAQSPASLVLVDAGQQLPPRPPQSSSVSLVSSGSGQAAVPSEQPWPQPVPALAPGPPPQDLAAYYYYRPLYDAYQPQYSLPYPPEPGAASLYYQDVYSLYEPRYRPYDGAASAYAQNYRYPEPERPSSRASHSSERPPPRQGYPEGYYSSKSGWSSQSDYYASYYSSQYDYGDPGHWDRYHYSARVRDPRTYDRRYWCDAEYDAYRREHSAFGDRPEKRDNNWRYDPRFTGSFDDDPDPHRDPYGEEVDRRSVHSEHSARSLHSAHSLASRRSSLSSHSHQSQIYRSHNVAAGSYEAPLPPGSFHGDFAYGTYRSNFSSGPGFPEYGYPADTVWPAMEQVSSRPTSPEKFSVPHVCARFGPGGQLIKVIPNLPSEGQPALVEVHSMEALLQHTSEQEEMRAFPGPLAKDDTHKVDVINFAQNKAMKCLQNENLIDKESASLLWNFIVLLCRQNGTVVGTDIAELLLRDHRTVWLPGKSPNEANLIDFTNEAVEQVEEEESGEAQLSFLTGGPAAAASSLERETERFRELLLYGRKKDALESAMKNGLWGHALLLASKMDSRTHARVMTRFANSLPINDPLQTVYQLMSGRMPAASTCCGDEKWGDWRPHLAMVLSNLNNNMDVESRTMATMGDTLASRGLLDAAHFCYLMAQAGFGVYTKKTTKLVLIGSNHSLPFLKFATNEAIQRTEAYEYAQSLGAETCPLPSFQVFKFIYSCRLAEMGLATQAFHYCEAIAKSILTQPHLYSPVLISQLVQMASQLRLFDPQLKEKPEEESLAAPTWLVHLQQVERQIKEGAGVWHQDGALPQQCPGTPSSEMEQLDRPGLSQPGALGIANPLLAVPAPSPEHSSPSVRLLPSAPQTLPDGPLASPARVPMFPVPLPPGPLEPGPGCVTPGPALGFLEPSGPGLPPGVPPLQERRHLLQEARSPDPGIVPQEAPVGNSLSELSEENFDGKFANLTPSRTVPDSEAPPGWDRADSGPTQPPLSLSPAPETKRPGQAAKKETKEPKKGESWFFRWLPGKKKTEAYLPDDKNKSIVWDEKKNQWVNLNEPEEEKKAPPPPPTSMPKTVQAAPPALPGPPGAPVNMYSRRAAGTRARYVDVLNPSGTQRSEPALAPADFVAPLAPLPIPSNLFVPTPVSSVRPQGRSGRNDGLLALSSPDAEEPQLPDGTGREGPAAARGLANPEPAPEPKAPGDLPAAGGPPSGAMPFYNPAQLAQACATSGSSRLGRIGQRKHLVLN

SEQ ID NO: 11776 - protein, 751 aa, Homo sapiens
PAAAASSLERETERFRELLLYGRKKDALESAMKNGLWGHALLLASKMDSRTHARVMTRFANSLPINDPLQTVYQLMSGRMPAASTCCGDEKWGDWRPHLAMVLSNLNNNMDVESRTMATMGDTLASRGLLDAAHFCYLMAQAGFGVYTKKTTKLVLIGSNHSLPFLKFATNEAIQRTEAYEYAQSLGAETCPLPSFQVFKFIYSCRLAEMGLATQAFHYCEAIAKSILTQPHLYSPVLISQLVQMASQLRLFDPQLKEKPEEESLAAPTWLVHLQQVERQIKEGAGVWHQDGALPQQCPGTPSSEMEQLDRPGLSQPGALGIANPLLAVPAPSPEHSSPSVRLLPSAPQTLPDGPLASPARVPMFPVPLPPGPLEPGPGCVTPGPALGFLEPSGPGLPPGVPPLQERRHLLQEARSPDPGIVPQEAPVGNSLSELSEENFDGKFANLTPSRTVPDSEAPPGWDRADSGPTQPPLSLSPAPETKRPGQAAKKETKEPKKGESWFFRWLPGKKKTEAYLPDDKNKSIVWDEKKNQWVNLNEPEEEKKAPPPPPTSMPKTVQAAPPALPGPPGAPVNMYSRRAAGTRARYVDVLNPSGTQRSEPALAPADFVAPLAPLPIPSNLFVPTPDAEEPQLPDGTGREGPAAARGLANPEPAPEPKVLSSAASLPGSELPSSRPEGSQGGELSRCSSMSSLSREVSQHFNQAPGDLPAAGGPPSGAMPFYNPAQLAQACATSGSSRLGRIGQRKHLVLN

SEQ ID NO: 11777 - protein, 1060 aa, Homo sapiens
MELWAPQRLPQTRGKATAPSKDPDRGFRRDGHHRPVPHSWHNGERFHQWQDNRGSPQPQQEPRADHQQQPHYASRPGDWHQPVSGVDYYEGGYRNQLYSRPGYENSYQSYQSPTMREEYAYGSYYYHGHPQWLQEERVPRQRSPYIWHEDYREQKYLDEHHYENQHSPFGTNSETHFQSNSRNPCKDSPASNSGQEWPGELFPGSLLAEAQKNKPSLASESNLLQQRESGLSSSSYELSQYIRDAPERDDPPASAAWSPVQADVSSAGPKAPMKFYIPHVPVSFGPGGQLVHVGPSSPTDGQAALVELHSMEVILNDSEEQEEMRSFSGPLIREDVHKVDIMTFCQQKAAQSCKSETLGSRDSALLWQLLVLLCRQNGSMVGSDIAELLMQDCKKLEKYKRQPPVANLINLTDEDWPVLSSGTPNLLTGEIPPSVETPAQIVEKFTRLLYYGRKKEALEWAMKNHLWGHALFLSSKMDPQTYSWVMSGFTSTLALNDPLQTLFQLMSGRIPQAATCCGEKQWGDWRPHLAVILSNQAGDPELYQRAIVAIGDTLAGKGLVEAAHFCYLMAHVPFGHYTVKTDHLVLLGSSHSQEFLKFATTEAIQRTEIFEYCQMLGRPKSFIPSFQVYKLLYASRLADYGLVSQALHYCEAIGAAVLSQGESSHPVLLVELIKLAEKLKLSDPLVLERRSGDRDLEPDWLAQLRRQLEQKVAGDIGDPHPTRSDISGAGGTTTENTFYQDFSGCQGYSEAPGYRSALWLTPEQTCLLQPSPQQPFPLQPGSYPAGGGAGQTGTPRPFYSVPETHLPGTGSSVAVTEATGGTVWEEMLQTHLGPGENTVSQETSQPPDGQEVISKPQTPLAARPRSISESSASSAKEDEKESSDEADKNSPRNTAQRGKLGDGKEHTKSSGFGWFSWFRSKPTKNASPAGDEDSSDSPDSEETPRASSPHQAGLGLSLTPSPESPPLPDVSAFSRGRGGGEGRGSASSGGAAAGAGVGGLSGPESVSFELCSNPGVLLPPPALKGAVPLYNPSQVPQLPTATSLNRPNRLAQRRYPTQPC

SEQ ID NO: 11778 - protein, 625 aa, Homo sapiens
MELWAPQRLPQTRGKATAPSKDPDRGFRRDGHHRPVPHSWHNGERFHQWQDNRGSPQPQQEPRADHQQQPHYASRPGDWHQPVSGVDYYEGGYRNQLYSRPGYENSYQSYQSPTMREEYAYGSYYYHGHPQWLQEERVPRQRSPYIWHEDYREQKYLDEHHYENQHSPFGTNSETHFQSNSRNPCKDSPASNSGQEWPGELFPGSLLAEAQKNKPSLASESNLLQQRESGLSSSSYELSQYIRDAPERDDPPASAAWSPVQAEDVSSAGPKAPMKFYIPHVPVSFGPGGQLVHVGPSSPTDGQAALVELHSMEVILNDSEEQEEMRSFSGPLIREDVHKVDIMTFCQQKAAQSCKSETLGSRDSALLWQLLVLLCRQNGSMVGSDIAELLMQDCKKLEKYKRQPPVANLINLTDEDWPVLSSGTPNLLTGEIPPSVETPAQIVEKFTRLLYYGRKKEALEWAMKNHLWGHALFLSSKMDPQTYSWVMSGFTSTLALNDPLQTLFQLMSGRIPQAATCCGEKQWGDWRPHLAVILSNQAGDPELYQRAIVAIGDTLAGKGLVEAAHFCYLMAHVPFGHYTVKTDHLVLLGSSHRYATWEKGNSKDIFQGTVLALVGFYGSIFHFLM

SEQ ID NO: 11779 - protein, 316 aa, Homo sapiens
MELWAPQRLPQTRGKATAPSKDPDRGFRRDGHHRPVPHSWHNGERFHQWQDNRGSPQPQQEPRADHQQQPHYASRPGDWHQPVSGVDYYEGGYRNQLYSRPGYENSYQSYQSPTMREEYAYGSYYYHGHPQWLQEERVPRQRSPYIWHEDYREQKYLDEHHYENQHSPFGTNSETHFQSNSRNPCKDSPASNSGQEWPGELFPGSLLAEAQKNKPSLASESNLLQQRESGLSSSSYELSQYIRDAPERDDPPASAAWSPVQADVSSAGPKAPMKFYIPHVPVSFGPGGQLVHVGPSSPTDGQAALVELHSMEGRCT

SEQ ID NO: 11780 - protein, 175 aa, Homo sapiens
  SITE 1: note = misc_feature - Xaa can be any naturally occurring amino acid
XLGSRDSALLWQLLVLLCRQNGSMVGSDIAELLMQDCKKLEKYKRQPPVANLINLTDEDWPVLSSGTPNLLTGEIPPSVETPAQIVEKFTRLLYYGRKKCCGEKQWGDWRPHLAVILSNQAGDPELYQRAIVAIGDTLAGKGLVEAAHFCYLMAHVPFGHYTVKTDHLVLLGSSH

SEQ ID NO: 11781 - protein, 107 aa, Homo sapiens
MSVIFFACVVRVRDGLPLSASTDFYHTQDFLEWRRRLKSLALRLAQYPGRGSAEGCDFSIHFSSFGDVACMAICSCQCPAAMAFCFLETLWWEFTASYDTTCIGLAS

SEQ ID NO: 11782 - protein, 142 aa, Homo sapiens
MSVIFFACVVRVRDGLPLSASTDFYHTQDFLEWRRRLKSLALRLAQYPGRGSAEGCDFSIHFSSFGDVACMAICSCQCPAAMAFCFLETLWWEFTASYDTTCIGLASRPYAFLEFDSIIQKVKWHFNYVSSSQMECSLEKIQ

SEQ ID NO: 11783 - protein, 228 aa, Homo sapiens
MSVIFFACVVRVRDGLPLSASTDFYHTQDFLEWRRRLKSLALRLAQYPGRGSAEGCDFSIHFSSFGDVACMAICSCQCPAAMAFCFLETLWWEFTASYDTTCIGLASRPYAFLEFDSIIQKVKWHFNYVSSSQMECSLEKIQEELKLQPPAVLTLEDTDVANGVMNGHTPMHLEPAPNFRMEPVTALGILSLILNIMCAALNLIRGVHLAEHSLQDPRSWFCWLDQTS

SEQ ID NO: 11784 - protein, 236 aa, Homo sapiens
MSVIFFACVVRVRDGLPLSASTDFYHTQDFLEWRRRLKSLALRLAQYPGRGSAEGCDFSIHFSSFGDVACMAICSCQCPAAMAFCFLETLWWEFTASYDTTCIGLASRPYAFLEFDSIIQKVKWHFNYVSSSQMECSLEKIQEELKLQPPAVLTLEDTDVANGVMNGHTPMHLEPAPNFRMEPVTALGILSLILNIMCAALNLIRGVHLAEHSLQVAHEEIGNILAFLVPFVACIF

SEQ ID NO: 11785 - protein, 303 aa, Homo sapiens
MSVIFFACVVRVRDGLPLSASTDFYHTQDFLEWRRRLKSLALRLAQYPGRGSAEGCDFSIHFSSFGDVACMAICSCQCPAAMAFCFLETLWWEFTASYDTTCIGLASRPYAFLEFDSIIQKVKWHFNYVSSSQMECSLEKIQEELKLQPPAVLTLEDTDVANGVMNGHTPMHLEPAPNFRMEPVTALGILSLILNIMCAALNLIRGVHLAEHSLQVAHEEIGNILAFLVPFVACIFQCYLYLFYSPARTMKVVLMLLFICLGNMYLHGLRNLWQILFHIGVAFLSSYQILTRQLQEKQSDCGV

SEQ ID NO: 11786 - protein, 250 aa, Homo sapiens
MSVIFFACVVRVRDGLPLSASTDFYHTQDFLEWRRRLKSLALRLAQYPGRGSAEGCDFSIHFSSFGDVACMAICSCQCPAAMAFCFLETLWWEFTASYDTTCIGLASRPYAFLEFDSIIQKVKWHFNYVSSSQMECSLEKIQEELKLQPPAVLTLEDTDVANGVMNGHTPMHLEPAPNFRMEPVTALGILSLILNIMCAALNLIRGVHLAEHSLQVAHEEIGNILAFLVPFVACIFQDPRSWFCWLDQTS

SEQ ID NO: 11787 - protein, 250 aa, Homo sapiens; identical to SEQ ID NO: 11786

SEQ ID NO: 11788 - protein, 61 aa, Homo sapiens
MSVIFFACVVRVRDGLPLSASTDFYHTQDFLEWRRRLKSLALRLAQYPGRGSAEGCDFSIQ

SEQ ID NO: 11789 - protein, 72 aa, Homo sapiens
MSVIFFACVVRVRDGLPLSASTDFYHTQDFLEWRRRLKSLALRLAQYPGRGSAEGCDFSIQDKVLPCCPGWS

SEQ ID NO: 11790 - protein, 72 aa, Homo sapiens; identical to SEQ ID NO: 11789

SEQ ID NO: 11791 - protein, 143 aa, Homo sapiens
MSVIFFACVVRVRDGLPLSASTDFYHTQDFLEWRRRLKSLALRLAQYPGRGSAEGCDFSIQHFKGSGRKTVSGIGRTEETIYLQQTATGLFKAKQVQNSVFLLSGTWPAWLSAPASVQQPWPSASWRPCGGNSQLPMTLPALA

SEQ ID NO: 11792 - protein, 75 aa, Homo sapiens
MSVIFFACVVRVRDGLPLSASTDFYHTQDFLEWRRRLKSLALRLAQYPGRGSAEGCDFSIQLLDILKEAEERQSQ

SEQ ID NO: 11793 - protein, 225 aa, Homo sapiens
  SITE 1: note = misc_feature - Xaa can be any naturally occurring amino acid
XAAMAFCFLETLWWEFTASYDTTCIGLASRPYAFLEFDSIIQKVKWHFNYVSSSQMECSLEKIQEELKLQPPAVLTLEDTDVANGVMNGHTPMHLEPAPNFRMEPVTALGILSLILNIMCAALNLIRGVHLAEHSLQVAHEEIGNILAFLVPFVACIFQCYLYLFYSPARTMKVVLMLLFICLGNMYLHGLRNLWQILFHIGVAFLSSYQILTRQLQEKQSDCGV

SEQ ID NO: 11794 - protein, 286 aa, Homo sapiens
FGGKLVTFENVRMPSHQGAEQQQQQHHVFISQVVTEKEFLSRSDQLQQAVQSQGFINYCQKKIDASQTEFEKNVWSFLKVNFEDDSRGKYLELLGYRKEDLGKKALKDSDQVAQSDGEESPAAEEQLLGEHIKEEKEESEFLPSSGGTFNISVSGDIDGLITQALLTGNFESAVDLCLHDNRMADAIILAIAGGQELLARTQKKYFAKSQSKITRLITAVVMKNWKEIVESCDLKNWREALAAVLTYAKPDEFSALCDLLGTRLENEGDSLLQTQACLCYICAGNV

SEQ ID NO: 11795 - protein, 11 aa, Homo sapiens
MKLKEVDRTAM

SEQ ID NO: 11796 - protein, 27 aa, Homo sapiens
MKLKEVDRTAMQAWSPAQNHPIYLATG

SEQ ID NO: 11797 - protein, 65 aa, Homo sapiens
MKLKEVDRTAMQAWSPAQNHPIYLATGTSAQQLDATFSTNASLEIFELDLSDPSLDMKSCATFSS

SEQ ID NO: 11798 - protein, 66 aa, Homo sapiens
MKLKEVDRTAMQAWSPAQNHPIYLATGTSAQQLDATFSTNASLEIFELDLSDPSLDMKSCATFSSS

SEQ ID NO: 11799 - protein, 81 aa, Homo sapiens
MKLKEVDRTAMQAWSPAQNHPIYLATGTSAQQLDATFSTNASLEIFELDLSDPSLDMKSCATFSSSHRYHKLIWGPYKMDS

SEQ ID NO: 11800 - protein, 92 aa, Homo sapiens
MKLKEVDRTAMQAWSPAQNHPIYLATGTSAQQLDATFSTNASLEIFELDLSDPSLDMKSCATFSSSHRYHKLIWGPYKMDSKGDVSGVLIAD

SEQ ID NO: 11801 - protein, 165 aa, Homo sapiens
MKLKEVDRTAMQAWSPAQNHPIYLATGTSAQQLDATFSTNASLEIFELDLSDPSLDMKSCATFSSSHRYHKLIWGPYKMDSKGDVSGVLIAGGENGNIILYDPSKIIAGDKEVVIAQNDKHTGPVRALDVNIFQTNLVASGANESEIYIWDLNNFATPMTPGAKT

SEQ ID NO: 11802 - protein, 166 aa, Homo sapiens
MKLKEVDRTAMQAWSPAQNHPIYLATGTSAQQLDATFSTNASLEIFELDLSDPSLDMKSCATFSSSHRYHKLIWGPYKMDSKGDVSGVLIAGGENGNIILYDPSKIIAGDKEVVIAQNDKHTGPVRALDVNIFQTNLVASGANESEIYIWDLNNFATPMTPGAKTQ

SEQ ID NO: 11803 - protein, 1106 aa, Homo sapiens
MKLKEVDRTAMQAWSPAQNHPIYLATGTSAQQLDATFSTNASLEIFELDLSDPSLDMKSCATFSSSHRYHKLIWGPYKMDSKGDVSGVLIAGGENGNIILYDPSKIIAGDKEVVIAQNDKHTGPVRALDVNIFQTNLVASGANESEIYIWDLNNFATPMTPGAKTQPPEDISCIAWNRQVQHILASASPSGRATVWDLRKNEPIIKVSDHSNRMHCSGLAWHPDVATQMVLASEDDRLPVIQMWDLRFASSPLRVLENHARGILAIAWSMADPELLLSCGKDAKILCSNPNTGEVLYELPTNTQWCFDIQWCPRNPAVLSAASFDGRISVYSIMGGSTDGLRQKQVDKLSSSFGNLDPFGTGQPLPPLQIPQQTAQHSIVLPLKKPPKWIRRPVGASFSFGGKLVTFENVRMPSHQGAEQQQQQHHVFISQVVTEKEFLSRSDQLQQAVQSQGFINYCQKKIDASQTEFEKNVWSFLKVNFEDDSRGKYLELLGYRKEDLGKKIALALNKVDGANVALKDSDQVAQSDGEESPAAEEQLLGEHIKEEKEESEFLPSSGGTFNISVSGDIDGLITQALLTGNFESAVDLCLHDNRMADAIILAIAGGQELLARTQKKYFAKSQSKITRLITAVVMKNWKEIVESCDLKNWREALAAVLTYAKPDEFSALCDLLGTRLENEGDSLLQTQACLCYICAGNVEKLVACWTKAQDGSHPLSLQDLIEKVVILRKAVQLTQAMDTSTVGVLLAAKMSQYANLLAAQGSIAAALAFLPDNTNQPNIMQLRDRLCRAQGEPVAGHESPKIPYEKQQLPKGRPGPVAGHHQMPRVQTQQYYPHGENPPPPGFIMHGNVNPNAAGQLPTSPGHMHTQVPPYPQPQRPQNGWNDPPALNRVPKKKKMPENFMPPVPITSPIMNPLGDPQSQMLQQQPSAPVPLSSQSSFPQPHLPGGQPFHGVQQPLGQTGMPPSFSKPNIEGAPGAPIGNTFQHVQSLPTKKITKKPIPDEHLILKTTFEDLIQRCLSSATDPQTKRKLDDASKRLEFLYDKLREQTLSPTITSGLHNIARSIETRNYSEGLTMHTHIVSTSNFSETSAFMPVLKVVLTQANKLGV

SEQ ID NO: 11804 - protein, 1181 aa, Homo sapiens
MKLKEVDRTAMQAWSPAQNHPIYLATGTSAQQLDATFSTNASLEIFELDLSDPSLDMKSCATFSSSHRYHKLIWGPYKMDSKGDVSGVLIAGGENGNIILYDPSKIIAGDKEVVIAQNDKHTGPVRALDVNIFQTNLVASGANESEIYIWDLNNFATPMTPGAKTQPPEDISCIAWNRQVQHILASASPSGRATVWDLRKNEPIIKVSDHSNRMHCSGLAWHPDVATQMVLASEDDRLPVIQMWDLRFASSPLRVLENHARGILAIAWSMADPELLLSCGKDAKILCSNPNTGEVLYELPTNTQWCFDIQWCPRNPAVLSAASFDGRISVYSIMGGSTDGLRQKQVDKLSSSFGNLDPFGTGQPLPPLQIPQQTAQHSIVLPLKKPPKWIRRPVGASFSFGGKLVTFENVRMPSHQGAEQQQQQHHVFISQVVTEKEFLSRSDQLQQAVQSQGFINYCQKKIDASQTEFEKNVWSFLKVNFEDDSRGKYLELLGYRKEDLGKKHIKEEKEESEFLPSSGGTFNISVSGDIDGLITQALLTGNFESAVDLCLHDNRMADAIILAIAGGQELLARTQKKYFAKSQSKITRLITAVVMKNWKEIVESCDLKNWREALAAVLTYAKPDEFSALCDLLGTRLENEGDSLLQTQACLCYICAGNVEKLVACWTKAQDGSHPLSLQDLIEKVVILRKAVQLTQAMDTSTVGVLLAAKMSQYANLLAAQGSIAAALAFLPDNTNQPNIMQLRDRLCRAQGEPVAGHESPKIPYEKQQLPKGRPGPVAGHHQMPRVQTQQYYPHGENPPPPGFIMHGNVNPNAAGQLPTSPGHMHTQVPPYPQPQPYQPAQPYPFGTGGSAMYRPQQPVAPPTSNAYPNTPYISSASSYTGQSQLYAAQHQASSPTSSPATSFPPPPSSGASFQHGGPGAPPSSSAYALPPGTTGTLPAASELPASQRTGPQNGWNDPPALNRVPKKKKMPENFMPPVPITSPIMNPLGDPQSQMLQQQPSAPVPLSSQSSFPQPHLPGGQPFHGVQQPLGQTGMPPSFSKPNIEGAPGAPIGNTFQHVQSLPTKKITKKPIPDEHLILKTTFEDLIQRCLSSATDPQTKRKLDDASKRLEFLYDKLREQTLSPTITSGLHNIARSIETRNYSEGLTMHTHIVSTSNFSETSAFMPVLKVVLTQANKLGV

SEQ ID NO: 11805 - protein, 1220 aa, Homo sapiens
MKLKEVDRTAMQAWSPAQNHPIYLATGTSAQQLDATFSTNASLEIFELDLSDPSLDMKSCATFSSSHRYHKLIWGPYKMDSKGDVSGVLIAGGENGNIILYDPSKIIAGDKEVVIAQNDKHTGPVRALDVNIFQTNLVASGANESEIYIWDLNNFATPMTPGAKTQPPEDISCIAWNRQVQHILASASPSGRATVWDLRKNEPIIKVSDHSNRMHCSGLAWHPDVATQMVLASEDDRLPVIQMWDLRFASSPLRVLENHARGILAIAWSMADPELLLSCGKDAKILCSNPNTGEVLYELPTNTQWCFDIQWCPRNPAVLSAASFDGRISVYSIMGGSTDGLRQKQVDKLSSSFGNLDPFGTGQPLPPLQIPQQTAQHSIVLPLKKPPKWIRRPVGASFSFGGKLVTFENVRMPSHQGAEQQQQQHHVFISQVVTEKEFLSRSDQLQQAVQSQGFINYCQKKIDASQTEFEKNVWSFLKVNFEDDSRGKYLELLGYRKEDLGKKIALALNKVDGANVALKDSDQVAQSDGEESPAAEEQLLGEHIKEEKEESEFLPSSGGTFNISVSGDIDGLITQALLTGNFESAVDLCLHDNRMADAIILAIAGGQELLARTQKKYFAKSQSKITRLITAVVMKNWKEIVESCDLKNWREALAAVLTYAKPDEFSALCDLLGTRLENEGDSLLQTQACLCYICAGNVEKLVACWTKAQDGSHPLSLQDLIEKVVILRKAVQLTQAMDTSTVGVLLAAKMSQYANLLAAQGSIAAALAFLPDNTNQPNIMQLRDRLCRAQGEPVAGHESPKIPYEKQQLPKGRPGPVAGHHQMPRVQTQQYYPHGENPPPPGFIMHGNVNPNAAGQLPTSPGHMHTQVPPYPQPQPYQPAQPYPFGTGGSAMYRPQQPVAPPTSNAYPNTPYISSASSYTGQSQLYAAQHQASSPTSSPATSFPPPPSSGASFQHGGPGAPPSSSAYALPPGTTGTLPAASELPASQRTGPQNGWNDPPALNRVPKKKKMPENFMPPVPITSPIMNPLGDPQSQMLQQQPSAPVPLSSQSSFPQPHLPGGQPFHGVQQPLGQTGMPPSFSKPNIEGAPGAPIGNTFQHVQSLPTKKITKKPIPDEHLILKTTFEDLIQRCLSSATDPQTKRKLDDASKRLEFLYDKLREQTLSPTITSGLHNIARSIETRNYSEGLTMHTHIVSTSNFSETSAFMPVLKVVLTQANKLGV

SEQ ID NO: 11806 - protein, 1220 aa, Homo sapiens; identical to SEQ ID NO: 11805

SEQ ID NO: 11807 - protein, 1220 aa, Homo sapiens; identical to SEQ ID NO: 11805

SEQ ID NO: 11808 - protein, 1251 aa, Homo sapiens
MKLKEVDRTAMQAWSPAQNHPIYLATGTSAQQLDATFSTNASLEIFELDLSDPSLDMKSCATFSSSHRYHKLIWGPYKMDSKGDVSGVLIAGGENGNIILYDPSKIIAGDKEVVIAQNDKHTGPVRALDVNIFQTNLVASGANESEIYIWDLNNFATPMTPGAKTQPPEDISCIAWNRQVQHILASASPSGRATVWDLRKNEPIIKVSDHSNRMHCSGLAWHPDVATQMVLASEDDRLPVIQMWDLRFASSPLRVLENHARGILAIAWSMADPELLLSCGKDAKILCSNPNTGEVLYELPTNTQWCFDIQWCPRNPAVLSAASFDGRISVYSIMGGSTDGLRQKQVDKLSSSFGNLDPFGTGQPLPPLQIPQQTAQHSIVLPLKKPPKWIRRPVGASFSFGGKLVTFENVRMPSHQGAEQQQQQHHVFISQVVTEKEFLSRSDQLQQAVQSQGFINYCQKKIDASQTEFEKNVWSFLKVNFEDDSRGKYLELLGYRKEDLGKKIALALNKVDGANVALKDSDQVAQSDGEESPAAEEQLLGEHIKEEKEESEFLPSSGGTFNISVSGDIDGLITQALLTGNFESAVDLCLHDNRMADAIILAIAGGQELLARTQKKYFAKSQSKITRLITAVVMKNWKEIVESCDLKNWREALAAVLTYAKPDEFSALCDLLGTRLENEGDSLLQTQACLCYICAGNVEKLVACWTKAQDGSHPLSLQDLIEKVVILRKAVQLTQAMDTSTVGVLLAAKMSQYANLLAAQGSIAAALAFLPDNTNQPNIMQLRDRLCRAQGEPVAGHESPKIPYEKQQLPKGRPGPVAGHHQMPRVQTQQYYPHVRIAPTVTTWSNKTPTALPSHPPAASPSDTQGENPPPPGFIMHGNVNPNAAGQLPTSPGHMHTQVPPYPQPQPYQPAQPYPFGTGGSAMYRPQQPVAPPTSNAYPNTPYISSASSYTGQSQLYAAQHQASSPTSSPATSFPPPPSSGASFQHGGPGAPPSSSAYALPPGTTGTLPAASELPASQRTGPQNGWNDPPALNRVPKKKKMPENFMPPVPITSPIMNPLGDPQSQMLQQQPSAPVPLSSQSSFPQPHLPGGQPFHGVQQPLGQTGMPPSFSKPNIEGAPGAPIGNTFQHVQSLPTKKITKKPIPDEHLILKTTFEDLIQRCLSSATDPQTKRKLDDASKRLEFLYDKLREQTLSPTITSGLHNIARSIETRNYSEGLTMHTHIVSTSNFSETSAFMPVLKVVLTQANKLGV

SEQ ID NO: 11809 - protein, 1067 aa, Homo sapiens
MKLKEVDRTAMQAWSPAQNHPIYLATGTSAQQLDATFSTNASLEIFELDLSDPSLDMKSCATFSSSHRYHKLIWGPYKMDSKGDVSGVLIAGGENGNIILYDPSKIIAGDKEVVIAQNDKHTGPVRALDVNIFQTNLVASGANESEIYIWDLNNFATPMTPGAKTQPPEDISCIAWNRQVQHILASASPSGRATVWDLRKNEPIIKVSDHSNRMHCSGLAWHPDVATQMVLASEDDRLPVIQMWDLRFASSPLRVLENHARGILAIAWSMADPELLLSCGKDAKILCSNPNTGEVLYELPTNTQWCFDIQWCPRNPAVLSAASFDGRISVYSIMGGSTDGLRQKQVDKLSSSFGNLDPFGTGQPLPPLQIPQQTAQHSIVLPLKKPPKWIRRPVGASFSFGGKLVTFENVRMPSHQGAEQQQQQHHVFISQVVTEKEFLSRSDQLQQAVQSQGFINYCQKKIDASQTEFEKNVWSFLKVNFEDDSRGKYLELLGYRKEDLGKKHIKEEKEESEFLPSSGGTFNISVSGDIDGLITQALLTGNFESAVDLCLHDNRMADAIILAIAGGQELLARTQKKYFAKSQSKITRLITAVVMKNWKEIVESCDLKNWREALAAVLTYAKPDEFSALCDLLGTRLENEGDSLLQTQACLCYICAGNVEKLVACWTKAQDGSHPLSLQDLIEKVVILRKAVQLTQAMDTSTVGVLLAAKMSQYANLLAAQGSIAAALAFLPDNTNQPNIMQLRDRLCRAQGEPVAGHESPKIPYEKQQLPKGRPGPVAGHHQMPRVQTQQYYPHGENPPPPGFIMHGNVNPNAAGQLPTSPGHMHTQVPPYPQPQRPQNGWNDPPALNRVPKKKKMPENFMPPVPITSPIMNPLGDPQSQMLQQQPSAPVPLSSQSSFPQPHLPGGQPFHGVQQPLGQTGMPPSFSKPNIEGAPGAPIGNTFQHVQSLPTKKITKKPIPDEHLILKTTFEDLIQRCLSSATDPQTKRKLDDASKRLEFLYDKLREQTLSPTITSGLHNIARSIETRNYSEGLTMHTHIVSTSNFSETSAFMPVLKVVLTQANKLGV

SEQ ID NO: 11810 - protein, 1106 aa, Homo sapiens; identical to SEQ ID NO: 11803

SEQ ID NO: 11811 - protein, 1067 aa, Homo sapiens; identical to SEQ ID NO: 11809

SEQ ID NO: 11812 - protein, 1166 aa, Homo sapiens
MKLKEVDRTAMQAWSPAQNHPIYLATGTSAQQLDATFSTNASLEIFELDLSDPSLDMKSCATFSSSHRYHKLIWGPYKMDSKGDVSGVLIAGGENGNIILYDPSKIIAGDKEVVIAQNDKHTGPVRALDVNIFQTNLVASGANESEIYIWDLNNFATPMTPGAKTQPPEDISCIAWNRQVQHILASASPSGRATVWDLRKNEPIIKVSDHSNRMHCSGLAWHPDVATQMVLASEDDRLPVIQMWDLRFASSPLRVLENHARGILAIAWSMADPELLLSCGKDAKILCSNPNTGEVLYELPTNTQWCFDIQWCPRNPAVLSAASFDGRISVYSIMGGSTDGLRQKQVDKLSSSFGNLDPFGTGQPLPPLQIPQQTAQHSIVLPLKKPPKWIRRPVGASFSFGGKLVTFENVRMPSHQGAEQQQQQHHVFISQVVTEKEFLSRSDQLQQAVQSQGFINYCQKKIDASQTEFEKNVWSFLKVNFEDDSRGKYLELLGYRKEDLGKKHIKEEKEESEFLPSSGGTFNISVSGDIDGLITQALLTGNFESAVDLCLHDNRMADAIILAIAGGQELLARTQKKYFAKSQSKITRLITAVVMKNWKEIVESCDLKNWREALAAVLTYAKPDEFSALCDLLGTRLENEGDSLLQTQACLCYICAGNVEKLVACWTKAQDGSHPLSLQDLIEKVVILRKAVQLTQAMDTSTVGVLLAAKMSQYANLLAAQGSIAAALAFLPDNTNQPNIMQLRDRLCRAQGEPVAGHESPKIPYEKQQLPKGRPGPVAGHHQMPRVQTQQYYPHGENPPPPGFIMHGNVNPNAAGQLPTSPGHMHTQVPPYPQPQPYQPAQPYPFGTGGSAMYRPQQPVAPPTSNAYPNTPYISSASSYTGQSQLYAAQHQASSPTSSPATSFPPPPSSGASFQHGGPGAPPSSSAYALPPGTTGPQNGWNDPPALNRVPKKKKMPENFMPPVPITSPIMNPLGDPQSQMLQQQPSAPVPLSSQSSFPQPHLPGGQPFHGVQQPLGQTGMPPSFSKPNIEGAPGAPIGNTFQHVQSLPTKKITKKPIPDEHLILKTTFEDLIQRCLSSATDPQTKRKLDDASKRLEFLYDKLREQTLSPTITSGLHNIARSIETRNYSEGLTMHTHIVSTSNFSETSAFMPVLKVVLTQANKLGV

SEQ ID NO: 11813 - protein, 1205 aa, Homo sapiens
MKLKEVDRTAMQAWSPAQNHPIYLATGTSAQQLDATFSTNASLEIFELDLSDPSLDMKSCATFSSSHRYHKLIWGPYKMDSKGDVSGVLIAGGENGNIILYDPSKIIAGDKEVVIAQNDKHTGPVRALDVNIFQTNLVASGANESEIYIWDLNNFATPMTPGAKTQPPEDISCIAWNRQVQHILASASPSGRATVWDLRKNEPIIKVSDHSNRMHCSGLAWHPDVATQMVLASEDDRLPVIQMWDLRFASSPLRVLENHARGILAIAWSMADPELLLSCGKDAKILCSNPNTGEVLYELPTNTQWCFDIQWCPRNPAVLSAASFDGRISVYSIMGGSTDGLRQKQVDKLSSSFGNLDPFGTGQPLPPLQIPQQTAQHSIVLPLKKPPKWIRRPVGASFSFGGKLVTFENVRMPSHQGAEQQQQQHHVFISQVVTEKEFLSRSDQLQQAVQSQGFINYCQKKIDASQTEFEKNVWSFLKVNFEDDSRGKYLELLGYRKEDLGKKIALALNKVDGANVALKDSDQVAQSDGEESPAAEEQLLGEHIKEEKEESEFLPSSGGTFNISVSGDIDGLITQALLTGNFESAVDLCLHDNRMADAIILAIAGGQELLARTQKKYFAKSQSKITRLITAVVMKNWKEIVESCDLKNWREALAAVLTYAKPDEFSALCDLLGTRLENEGDSLLQTQACLCYICAGNVEKLVACWTKAQDGSHPLSLQDLIEKVVILRKAVQLTQAMDTSTVGVLLAAKMSQYANLLAAQGSIAAALAFLPDNTNQPNIMQLRDRLCRAQGEPVAGHESPKIPYEKQQLPKGRPGPVAGHHQMPRVQTQQYYPHGENPPPPGFIMHGNVNPNAAGQLPTSPGHMHTQVPPYPQPQPYQPAQPYPFGTGGSAMYRPQQPVAPPTSNAYPNTPYISSASSYTGQSQLYAAQHQASSPTSSPATSFPPPPSSGASFQHGGPGAPPSSSAYALPPGTTGPQNGWNDPPALNRVPKKKKMPENFMPPVPITSPIMNPLGDPQSQMLQQQPSAPVPLSSQSSFPQPHLPGGQPFHGVQQPLGQTGMPPSFSKPNIEGAPGAPIGNTFQHVQSLPTKKITKKPIPDEHLILKTTFEDLIQRCLSSATDPQTKRKLDDASKRLEFLYDKLREQTLSPTITSGLHNIARSIETRNYSEGLTMHTHIVSTSNFSETSAFMPVLKVVLTQANKLGV

SEQ ID NO: 11814 - protein, 877 aa, Homo sapiens
MKLKEVDRTAMQAWSPAQNHPIYLATGTSAQQLDATFSTNASLEIFELDLSDPSLDMKSCATFSSSHRYHKLIWGPYKMDSKGDVSGVLIAGGENGNIILYDPSKIIAGDKEVVIAQNDKHTGPVRALDVNIFQTNLVASGANESEIYIWDLNNFATPMTPGAKTQPPEDISCIAWNRQVQHILASASPSGRATVWDLRKNEPIIKVSDHSNRMHCSGLAWHPDVATQMVLASEDDRLPVIQMWDLRFASSPLRVLENHARGILAIAWSMADPELLLSCGKDAKILCSNPNTGEVLYELPTNTQWCFDIQWCPRNPAVLSAASFDGRISVYSIMGGSTDGLRQKQVDKLSSSFGNLDPFGTGQPLPPLQIPQQTAQHSIVLPLKKPPKWIRRPVGASFSFGGKLVTFENVRMPSHQGAEQQQQQHHVFISQVVTEKEFLSRSDQLQQAVQSQGFINYCQKKIDASQTEFEKNVWSFLKVNFEDDSRGKYLELLGYRKEDLGKKIALALNKVDGANVALKDSDQVAQSDGEESPAAEEQLLGEHIKEEKEESEFLPSSGGTFNISVSGDIDGLITQALLTGNFESAVDLCLHDNRMADAIILAIAGGQELLARTQKKYFAKSQSKITRLITAVVMKNWKEIVESCDLKNWREALAAVLTYAKPDEFSALCDLLGTRLENEGDSLLQTQACLCYICAGNVEKLVACWTKAQDGSHPLSLQDLIEKVVILRKAVQLTQAMDTSTVGVLLAAKMSQYANLLAAQGSIAAALAFLPDNTNQPNIMQLRDRLCRAQGEPVAGHESPKIPYEKQQLPKGRPGPVAGHHQMPRVQTQQYYPHGENPPPPGFIMHGNVNPNAAGQLPTSPGHMHTQVPPYPQPQRK

SEQ ID NO: 11815 - protein, 68 aa, Homo sapiens
MKLKEVDRTAMQAWSPAQNHPIYLATGTSAQQLDATFSTNASLEIFELDLSDPSLDMKSCATFSSSHS

SEQ ID NO: 11816 - protein, 1200 aa, Homo sapiens
MLGESDERCTNAGSGCRRSSPGTSAQQLDATFSTNASLEIFELDLSDPSLDMKSCATFSSSHRYHKLIWGPYKMDSKGDVSGVLIAGGENGNIILYDPSKIIAGDKEVVIAQNDKHTGPVRALDVNIFQTNLVASGANESEIYIWDLNNFATPMTPGAKTQPPEDISCIAWNRQVQHILASASPSGRATVWDLRKNEPIIKVSDHSNRMHCSGLAWHPDVATQMVLASEDDRLPVIQMWDLRFASSPLRVLENHARGILAIAWSMADPELLLSCGKDAKILCSNPNTGEVLYELPTNTQWCFDIQWCPRNPAVLSAASFDGRISVYSIMGGSTDGLRQKQVDKLSSSFGNLDPFGTGQPLPPLQIPQQTAQHSIVLPLKKPPKWIRRPVGASFSFGGKLVTFENVRMPSHQGAEQQQQQHHVFISQVVTEKEFLSRSDQLQQAVQSQGFINYCQKKIDASQTEFEKNVWSFLKVNFEDDSRGKYLELLGYRKEDLGKKIALALNKVDGANVALKDSDQVAQSDGEESPAAEEQLLGEHIKEEKEESEFLPSSGGTFNISVSGDIDGLITQALLTGNFESAVDLCLHDNRMADAIILAIAGGQELLARTQKKYFAKSQSKITRLITAVVMKNWKEIVESCDLKNWREALAAVLTYAKPDEFSALCDLLGTRLENEGDSLLQTQACLCYICAGNVEKLVACWTKAQDGSHPLSLQDLIEKVVILRKAVQLTQAMDTSTVGVLLAAKMSQYANLLAAQGSIAAALAFLPDNTNQPNIMQLRDRLCRAQGEPVAGHESPKIPYEKQQLPKGRPGPVAGHHQMPRVQTQQYYPHGENPPPPGFIMHGNVNPNAAGQLPTSPGHMHTQVPPYPQPQPYQPAQPYPFGTGGSAMYRPQQPVAPPTSNAYPNTPYISSASSYTGQSQLYAAQHQASSPTSSPATSFPPPPSSGASFQHGGPGAPPSSSAYALPPGTTGPQNGWNDPPALNRVPKKKKMPENFMPPVPITSPIMNPLGDPQSQMLQQQPSAPVPLSSQSSFPQPHLPGGQPFHGVQQPLGQTGMPPSFSKPNIEGAPGAPIGNTFQHVQSLPTKKITKKPIPDEHLILKTTFEDLIQRCLSSATDPQTKRKLDDASKRLEFLYDKLREQTLSPTITSGLHNIARSIETRNYSEGLTMHTHIVSTSNFSETSAFMPVLKVVLTQANKLGV

SEQ ID NO: 11817 - protein, 969 aa, Homo sapiens
MVKLVLLSIVLLKVTVPKLSNDLLQLDFMPIHRGILAIAWSMADPELLLSCGKDAKILCSNPNTGEVLYELPTNTQWCFDIQWCPRNPAVLSAASFDGRISVYSIMGGSTDGLRQKQVDKLSSSFGNLDPFGTGQPLPPLQIPQQTAQHSIVLPLKKPPKWIRRPVGASFSFGGKLVTFENVRMPSHQGAEQQQQQHHVFISQVVTEKEFLSRSDQLQQAVQSQGFINYCQKKIDASQTEFEKNVWSFLKVNFEDDSRGKYLELLGYRKEDLGKKHIKEEKEESEFLPSSGGTFNISVSGDIDGLITQALLTGNFESAVDLCLHDNRMADAIILAIAGGQELLARTQKKYFAKSQSKITRLITAVVMKNWKEIVESCDLKNWREALAAVLTYAKPDEFSALCDLLGTRLENEGDSLLQTQACLCYICAGNVEKLVACWTKAQDGSHPLSLQDLIEKVVILRKAVQLTQAMDTSTVGVLLAAKMSQYANLLAAQGSIAAALAFLPDNTNQPNIMQLRDRLCRAQGEPVAGHESPKIPYEKQQLPKGRPGPVAGHHQMPRVQTQQYYPHVRIAPTVTTWSNKTPTALPSHPPAASPSDTQGENPPPPGFIMHGNVNPNAAGQLPTSPGHMHTQVPPYPQPQPYQPAQPYPFGTGGSAMYRPQQPVAPPTSNAYPNTPYISSASSYTGQSQLYAAQHQASSPTSSPATSFPPPPSSGASFQHGGPGAPPSSSAYALPPGTTGPQNGWNDPPALNRVPKKKKMPENFMPPVPITSPIMNPLGDPQSQMLQQQPSAPVPLSSQSSFPQPHLPGGQPFHGVQQPLGQTGMPPSFSKPNIEGAPGAPIGNTFQHVQSLPTKKITKKPIPDEHLILKTTFEDLIQRCLSSATDPQTKRKLDDASKRLEFLYDKLREQTLSPTITSGLHNIARSIETRNYSEGLTMHTHIVSTSNFSETSAFMPVLKVVLTQANKLGV

SEQ ID NO: 11818 - protein, 235 aa, Homo sapiens
TQDPAAEGPRQQDEVKGSRSYSHAGMEPCPESPHLPSNRYHKLIWGPYKMDSKGDVSGVLIAGGENGNIILYDPSKIIAGDKEVVIAQNDKHTGPVRALDVNIFQTNLVASGANESEIYIWDLNNFATPMTPGAKTQPPEDISCIAWNRQVQHILASASPSGRATVWDLRKNEPIIKVSDHSNRMHCSGLAWHPDVATQMVLASEDDRLPVIQMWDLRFASSPLRVLENHARYRA

SEQ ID NO: 11819 - protein, 237 aa, Homo sapiens
  SITE 1: note = misc_feature - Xaa can be any naturally occurring amino acid
XAVQSQGFINYCQKKIDASQTEFEKNVWSFLKVNFEDDSRGKYLELLGYRKEDLGKKHIKEEKEESEFLPSSGGTFNISVSGDIDGLITQALLTGNFESAVDLCLHDNRMADAIILAIAGGQELLARTQKKYFAKSQSKITRLITAVVMKNWKEIVESCDLKNWREALAAVLTYAKPDEFSALCGNVEKLVACWTKAQDGSHPLSLQDLIEKVVILRKAVQLTQAMDTSTVGVLLAA

SEQ ID NO: 11820 - protein, 443 aa, Homo sapiens
  SITE 1: note = misc_feature - Xaa can be any naturally occurring amino acid
XFGTGQPLPPLQIPQQTAQHSIVLPLKKPPKWIRRPVGASFSFGGKLVTFENVRMPSHQGAEQQQQQHHVFISQVVTEKEFLSRSDQLQQAVQSQGFINYCQKKIDASQTEFEKNVWSFLKVNFEDDSRGKYLELLGYRKEDLGKKIALALNKVDGANVHIKEEKEESEFLPSSGGTFNISVSGDIDGLITQALLTGNFESAVDLCLHDNRMADAIILAIAGGQELLARTQKKYFAKSQSKITRLITAVVMKNWKEIVESCDLKNWREALAAVLTYAKPDEFSALCDLLGTRLENEGDSLLQTQACLCYICAGNVEKLVACWTKAQDGSHPLSLQDLIEKVVILRKAVQLTQAMDTSTVGVLLAAKMSQYANLLAAQGSIAAALAFLPDNTNQPNIMQLRDRLCRAQGEPVAGHESPKIPYEKQQLPKGRPGPVAGHHQMPRV

SEQ ID NO: 11821 - protein, 383 aa, Homo sapiens
  SITE 1: note = misc_feature - Xaa can be any naturally occurring amino acid
XNAAGQLPTSPGHMHTQVPPYPQPQPYQPAQPYPFGTGGSAMYRPQQPVAPPTSNAYPNTPYISSASSYTGQSQLYAAQHQASSPTSSPATSFPPPPSSGASFQHGGPGAPPSSSAYALPPGTTGTLPAASELPASQRTENQSIQDQAPMLEGPQNGWNDPPALNRVPKKKKMPENFMPPVPITSPIMNPLGDPQSQMLQQQPSAPVPLSSQSSFPQPHLPGGQPFHGVQQPLGQTGMPPSFSKPNIEGAPGAPIGNTFQHVQSLPTKKITKKPIPDEHLILKTTFEDLIQRCLSSATDPQTKRKLDDASKRLEFLYDKLREQTLSPTITSGLHNIARSIETRNYSEGLTMHTHIVSTSNFSETSAFMPVLKVVLTQANKLGV

SEQ ID NO: 11822 - protein, 181 aa, Homo sapiens
  SITE 1: note = misc_feature - Xaa can be any naturally occurring amino acid
XPVPITSPIMNPLGDPQSQMLQQQPSAPVPLSSQSSFPQPHLPGGQPFHGVQQPLGQTGMPPSFSKPNIEGAPGAPIGNTFQHVQSLPTKKITKKPIPDEHLILKTTFEDLIQRCLSSATDPLSPTITSGLHNIARSIETRNYSEGLTMHTHIVSTSNFSETSAFMPVLKVVLTQANKLGV

SEQ ID NO: 11823 - protein, 219 aa, Homo sapiens
  SITE 1: note = misc_feature - Xaa can be any naturally occurring amino acid
XQMPRVQTQQYYPHVRIAPTVTTWSNKTPTALPSHPPAASPSDTQGENPPPPGFIMHGNVNPNAAGQLPTSPGHMHTQVPPYPQPQRPQNGWNDPPALNRVPKKKKMPENFMPPVPITSPIMNPLGDPQSQMLQQQPSAPVPLSSQSSFPQPHLPGGQPFHGVQQPLGQTGMPPSFSKPNIEGAPGAPIGNTFQHVQSLPTKKITKKPIPDEHLILKTT

SEQ ID NO: 11824 - protein, 275 aa, Homo sapiens
GTISSEIKSARGSHHLSIYAENSLKSDGYHKRTDRKSRIIAKNVSTSKPEFEFTTLDFPELQGAENNMSEIQKQPKWGPVHSVSTDISLLREVVKPAAVLSKGEIVVKNNPNESVTANAATNSPSCTRADPKNVSIPSSEALSSDPSYNKEKHIIHPTQKSKASQGSDLEQNEASRKNKKKKEKSTSKYEVLTVQEPPRIEDAEEFPNLAVASERRDRIETPKFQSKQQPQDNFKNNVKKSQLPVQLDLGGMLTALEKKQHSQHAKQSSKPVVVS

SEQ ID NO: 11825 - protein, 786 aa, Homo sapiens
MAFGASTFPPQYLSSEITLHPYAYSPYTLDSTQNVYSVPGSQYLYNQPSCYRGFQTVKHRNENTCPLPQEMKALFKKKTYDEKKTYDQQKFDSERADGTISSEIKSARGSHHLSIYAENSLKSDGYHKRTDRKSRIIAKNVSTSKPEFEFTTLDFPELQGAENNMSEIQKQPKWGPVHSVSTDISLLREVVKPAAVLSKGEIVVKNNPNESVTANAATNSPSCTRELSWTPMGYVVRQTLSTELSAAPKNVTSMINLKTIASSADPKNVSIPSSEALSSDPSYNKEKHIIHPTQKSKASQGSDLEQNEASRKNKKKKEKSTSKYEVLTVQEPPRIEDAEEFPNLAVASERRDRIETPKFQSKQQPQDNFKNNVKKSQLPVQLDLGGMLTALEKKQHSQHAKQSSKPVVVSVGAVPVLSKECASGERGRRMSQMKTPHNPLDSSAPLMKKGKQREIPKAKKPTSLKKIILKERQERKQRLQENAVSPAFTSDDTQDGESGGDDQFPEQAELSGPEGMDELISTPSVEDKSEEPPGTELQRDTEASHLAPNHTTFPKIHSRRFRDYCSQMLSKEVDACVTDLLKELVRFQDRMYQKDPVKAKTKRRLVLGLREVLKHLKLKKLKCVIISPNCEKIQSKGGLDDTLHTIIDYACEQNIPFVFALNRKALGRSLNKAVPVSVVGIFSYDGAQDQFHKMVELTVAARQAYKTMLENVQQELVGEPRPQAPPSLPTQGPSCPAEDGPPALKEKEEPHYIEIWKKHLEAYSGCTLELEESLEASTSQMMNLNL

SEQ ID NO: 11826 - protein, 854 aa, Homo sapiens
MASEGPREPESEGIKLSADVKPFVPRFAGLNVAWLESSEACVFPSSAATYYPFVQEPPVTEQKIYTEDMAFGASTFPPQYLSSEITLHPYAYSPYTLDSTQNVYSVPGSQYLYNQPSCYRGFQTVKHRNENTCPLPQEMKALFKKKTYDEKKTYDQQKFDSERADGTISSEIKSARGSHHLSIYAENSLKSDGYHKRTDRKSRIIAKNVSTSKPEFEFTTLDFPELQGAENNMSEIQKQPKWGPVHSVSTDISLLREVVKPAAVLSKGEIVVKNNPNESVTANAATNSPSCTRELSWTPMGYVVRQTLSTELSAAPKNVTSMINLKTIASSADPKNVSIPSSEALSSDPSYNKEKHIIHPTQKSKASQGSDLEQNEASRKNKKKKEKSTSKYEVLTVQEPPRIEDAEEFPNLAVASERRDRIETPKFQSKQQPQDNFKNNVKKSQLPVQLDLGGMLTALEKKQHSQHAKQSSKPVVVSVGAVPVLSKECASGERGRRMSQMKTPHNPLDSSAPLMKKGKQREIPKAKKPTSLKKIILKERQERKQRLQENAVSPAFTSDDTQDGESGGDDQFPEQAELSGPEGMDELISTPSVEDKSEEPPGTELQRDTEASHLAPNHTTFPKIHSRRFRDYCSQMLSKEVDACVTDLLKELVRFQDRMYQKDPVKAKTKRRLVLGLREVLKHLKLKKLKCVIISPNCEKIQSKGGLDDTLHTIIDYACEQNIPFVFALNRKALGRSLNKAVPVSVVGIFSYDGAQDQFHKMVELTVAARQAYKTMLENVQQELVGEPRPQAPPSLPTQGPSCPAEDGPPALKEKEEPHYIEIWKKHLEAYSGCTLELEESLEASTSQMMNLNL

SEQ ID NO: 11827 - protein, 60 aa, Homo sapiens
MPLPILLHVQEQILKMLVYHLLKLYLRILPTTKKNTLFILPKSLKHHKVVTLNKMKPQER

SEQ ID NO: 11828 - protein, 781 aa, Homo sapiens
MVRVLRSMCLPQLCSHILSVCSGTTSDRNVYSVPGSQYLYNQPSCYRGFQTVKHRNENTCPLPQEMKALFKKKTYDEKKTYDQQKFDSERADGTISSEIKSARGSHHLSIYAENSLKSDGYHKRTDRKSRIIAKNVSTSKPEFEFTTLDFPELQGAENNMSEIQKQPKWGPVHSVSTDISLLREVVKPAAVLSKGEIVVKNNPNESVTANAATNSPSCTRELSWTPMGYVVRQTLSTELSAAPKNVTSMINLKTIASSADPKNVSIPSSEALSSDPSYNKEKHIIHPTQKSKASQGSDLEQNEASRKNKKKKEKSTSKYEVLTVQEPPRIEDAEEFPNLAVASERRDRIETPKFQSKQQPQDNFKNNVKKSQLPVQLDLGGMLTALEKKQHSQHAKQSSKPVVVSVGAVPVLSKECASGERGRRMSQMKTPHNPLDSSAPLMKKGKQREIPKAKKPTSLKKIILKERQERKQRLQENAVSPAFTSDDTQDGESGGDDQFPEQAELSGPEGMDELISTPSVEDKSEEPPGTELQRDTEASHLAPNHTTFPKIHSRRFRDYCSQMLSKEVDACVTDLLKELVRFQDRMYQKDPVKAKTKRRLVLGLREVLKHLKLKKLKCVIISPNCEKIQSKGGLDDTLHTIIDYACEQNIPFVFALNRKALGRSLNKAVPVSVVGIFSYDGAQDQFHKMVELTVAARQAYKTMLENVQQELVGEPRPQAPPSLPTQGPSCPAEDGPPALKEKEEPHYIEIWKKHLEAYSGCTLELEESLEASTSQMMNLNL

SEQ ID NO: 11829 - protein, 43 aa, Homo sapiens
MQTCPLAFPGHVSQALGTLLFLAASLSAQNEAACPRAGERHLQ

SEQ ID NO: 11830 - protein, 44 aa, Homo sapiens
MQTCPLAFPGHVSQALGTLLFLAASLSAQNEGWDSPICTEGVVS

SEQ ID NO: 11831 - protein, 85 aa, Homo sapiens
MQTCPLAFPGHVSQALGTLLFLAASLSAQNEGWDSPICTEGVVSVSWGENTVMSCNISNAFSHVNIKLRAHGQESAIFNEVAPGY

SEQ ID NO: 11832 - protein, 147 aa, Homo sapiens
MQTCPLAFPGHVSQALGTLLFLAASLSAQNEGWDSPICTEGVVSVSWGENTVMSCNISNAFSHVNIKLRAHGQESAIFNEVAPGYFSRDGWQLQVQGGVAQLVIKGARDSHAGLYMWHLVGHQRNNRQVTLEVSEPRGLKDRASAQL

SEQ ID NO: 11833 - protein, 170 aa, Homo sapiens
MQTCPLAFPGHVSQALGTLLFLAASLSAQNEGWDSPICTEGVVSVSWGENTVMSCNISNAFSHVNIKLRAHGQESAIFNEVAPGYFSRDGWQLQVQGGVAQLVIKGARDSHAGLYMWHLVGHQRNNRQVTLEVSEPRGLKDRASAQLLGPGTSRGAEPQSAPDTGFWPVP

SEQ ID NO: 11834 - protein, 149 aa, Homo sapiens
MQTCPLAFPGHVSQALGTLLFLAASLSAQNEGWDSPICTEGVVSVSWGENTVMSCNISNAFSHVNIKLRAHGQESAIFNEVAPGYFSRDGWQLQVQGGVAQLVIKGARDSHAGLYMWHLVGHQRNNRQVTLEVSGAAVPSNAGRRSSSS

SEQ ID NO: 11835 - protein, 178 aa, Homo sapiens
MQTCPLAFPGHVSQALGTLLFLAASLSAQNEGWDSPICTEGVVSVSWGENTVMSCNISNAFSHVNIKLRAHGQESAIFNEVAPGYFSRDGWQLQVQGGVAQLVIKGARDSHAGLYMWHLVGHQRNNRQVTLEVSGAEPQSAPDTGFWPVPAVVTAVFILLVALVMFAWYRCRCSQQRR

SEQ ID NO: 11836 - protein, 248 aa, Homo sapiens
MQTCPLAFPGHVSQALGTLLFLAASLSAQNEGWDSPICTEGVVSVSWGENTVMSCNISNAFSHVNIKLRAHGQESAIFNEVAPGYFSRDGWQLQVQGGVAQLVIKGARDSHAGLYMWHLVGHQRNNRQVTLEVSGAEPQSAPDTGFWPVPAVVTAVFILLVALVMFAWYRCRCSQQRREKKFFLLEPQMKVAALRAGAQQGLSRASAELWTPDSEPTPRPLALVFKPSPLGALELLSPQPLFPYAADP

SEQ ID NO: 11837 - protein, 794 aa, Homo sapiens
MRVRIGLTLLLCAVLLSLASASSDEEGSQDESLDSKTTLTSDESVKDHTTAGRVVAGQIFLDSEESELESSIQEEEDSLKSQEGESVTEDISFLESPNPENKDYEEPKKVRKPALTAIEGTAHGEPCHFPFLFLDKEYDECTSDGREDGRLWCATTYDYKADEKWGFCETEEEAAKRRQMQEAEMMYQTGMKILNGSNKKSQKREAYRYLQKAASMNHTKALERVSYALLFGDYLPQNIQAAREMFEKLTEEGSPKGQTALGFLYASGLGVNSSQAKALVYYTFGALGGNLIAHMVLGYRYWAGIGVLQSCESALTHYRLVANHVASDISLTGGSVVQRIRLPDEVENPGMNSGMLEEDLIQYYQFLAEKGDVQAQVGLGQLHLHGGRGVEQNHQRAFDYFNLAANAGNSHAMAFLGKMYSEGSDIVPQSNETALHYFKKAADMGNPVGQSGLGMAYLYGRGVQVNYDLALKYFQKAAEQGWVDGQLQLGSMYYNGIGVKRDYKQALKYFNLASQGGHILAFYNLAQMHASGTGVMRSCHTAVELFKNVCERGRWSERLMTAYNSYKDGDYNAAVIQYLLLAEQGYEVAQSNAAFILDQREASIVGENETYPRALLHWNRAASQGYTVARIKLGDYHFYGFGTDVDYETAFIHYRLASEQQHSAQAMFNLGYMHEKGLGIKQDIHLAKRFYDMAAEASPDAQVPVFLALCKLGVVYFLQYIRETNIRDMFTQLDMDQLLGPEWDLYLMTIIALLLGTVIAYRQRQHQDMPAPRPPGPRPAPPQQEGPPEQQPPQ

SEQ ID NO: 11838 - protein, 301 aa, Homo sapiens
MRVRIGLTLLLCAVLLSLASASSDEEGSQDESLDSKTTLTSDESVKDHTTAGRVVAGQIFLDSEESELESSIQEEEDSLKSQEGESVTEDISFLESPNPENKDYEEPKKVRKPALTAIEGTAHGEPCHFPFLFLDKEYDECTSDGREDGRLWCATTYDYKADEKWGFCETEEEAAKRRQMQEAEMMYQTGMKILNGSNKKSQKREAYRYLQKAASMNHTKALERVSYALLFGDYLPQNIQAAREMFEKLTEEGSPKGQTALGFLYASGLGVNSSQAKALVYYTFGALGGNLIAHMVLVSRL

SEQ ID NO: 11839 - protein, 163 aa, Homo sapiens
MRVRIGLTLLLCAVLLSLASASSDEEGSQDESLDSKTTLTSDESVKDHTTAGRVVAGQIFLDSEESELESSIQEEEDSLKSQEGESVTEDISFLESPNPENKDYEEPKKVRKPDKEYDECTSDGREDGRLWCATTYDYKADEKWGFCETEEEAAKRRQMQEAE

SEQ ID NO: 11840 - protein, 88 aa, Homo sapiens
FNLLQLDPDCRGCCQEEAQFETKKYSSIVSKQECHHSNCMQELFLKFVDENWEGSLKSKYVRGSDPVLKLLDDNGNIAEELSILKWNT

SEQ ID NO: 11841 - protein, 164 aa, Homo sapiens
MVAMAAGPSGCLVPAFGLRLLLATVLQAVSAFGAEFSSEACRELGFSSNLLCSSCDLLGQFNLLQLDPDCRGCCQEEAQFETKKLYAGAILEVCGKLGRFPQVQAFVRSDKPKLFRGLQIKYVRGSDPVLKLLDDNGNIAEELSILKWNTDSVEEFLSEKLERI

SEQ ID NO: 11842 - protein, 123 aa, Homo sapiens
MVAMAAGPSGCLVPAFGLRLLLATVLQAVSAFGAEFSSEACRELGFSSNLLCSSCDLLGQFNLLQLDPDCRGCCQEEAQFETKKLYAGAILEVCGKLGRFPQVQVCPWFRPCIKAFGRQWEHC

SEQ ID NO: 11843 - protein, 164 aa, Homo sapiens; identical to SEQ ID NO: 11841

SEQ ID NO: 11844 - protein, 123 aa, Homo sapiens; identical to SEQ ID NO: 11842

SEQ ID NO: 11845 - protein, 144 aa, Homo sapiens
MVAMAAGPSGCLVPAFGLRLLLATVLQAVSAFGAEFSSEACRELGFSSNLLCSSCDLLGQFNLLQLDPDCRGCCQEEAQFETKKYSSIVSKQECHHSNCMQELFLKFVDENWEGSLKSKLLLGVINPNCSEDCKSSMSVVQTLY

SEQ ID NO: 11846 - protein, 31 aa, Homo sapiens
  SITE 1: note = misc_feature - Xaa can be any naturally occurring amino acid
XGLRLLLATVLQAVSVDHLRSCHRESRSDCS

SEQ ID NO: 11847 - protein, 144 aa, Homo sapiens
MSLLLPPLALLLLLAALVAPATAATAYRPDWNRLSGLTRARVETCGGQLNRLKEVKAFVTQDIPFYHNLVMKHLPGADPELVLLGRRYEELERIPLSEMTREEINALVQELGFYRKAAPDAQVPPEYVWAPAKPPEETSDHADL

SEQ ID NO: 11848 - protein, 144 aa, Homo sapiens; identical to SEQ ID NO: 11847

SEQ ID NO: 11849 - protein, 144 aa, Homo sapiens; identical to SEQ ID NO: 11847

SEQ ID NO: 11850 - protein, 588 aa, Homo sapiens
MGRARPGQRGPPSPGPAAQPPAPPRRRARSLALLGALLAAAAAAAVRVCARHAEAQAAARQELALKTLGTDGLFLFSSLDTDGDMYISPEEFKPIAEKLTGSCSVTQTGVQWCSHSSLQPQLPWLNSSCLSLLRSTPAASCEEEELPPDPSEETLTIEARFQPLLPETMTKSKDGFLGVSRLALSGLRNWTAAASPSAVFATRHFQPFLPPPGQELGEPWWIIPSELSMFTGYLSNNRFYPPPPKGKEVIIHRLLSMFHPRPFVKTRFAPQGAVACLTAISDFYYTVMFRIHAEFQLSEPPDFPFWFSPAQFTGHIILSKDATHVRDFRLFVPNHRSLNVDMEWLYGASESSNMEVDIGYIPQMELEATGPSVPSVILDEDGSMIDSHLPSGEPLQFVFEEIKWQQELSWEEAARRLEVAMYPFKKVSYLPFTEAFDRAKAENKLVHSILLWGALDDQSCGSGRTLRETVLESSPILTLLNESFISTWSLVKELEELQNNQENSSHQKLAGLHLEKYSFPVEMMICLPNGTVVHHINANYFLDITSVKPEEIESNLFSFSSTFEDPSTATYMQFLKEGLRRGLPLLQP

SEQ ID NO: 11851 - protein, 555 aa, Homo sapiens
MGRARPGQRGPPSPGPAAQPPAPPRRRARSLALLGALLAAAAAAAVRVCARHAEAQAAARQELALKTLGTDGLFLFSSLDTDGDMYISPEEFKPIAEKLTGSTPAASCEEEELPPDPSEETLTIEARFQPLLPETMTKSKDGFLGVSRLALSGLRNWTAAASPSAVFATRHFQPFLPPPGQELGEPWWIIPSELSMFTGYLSNNRFYPPPPKGKEVIIHRLLSMFHPRPFVKTRFAPQGAVACLTAISDFYYTVMFRIHAEFQLSEPPDFPFWFSPAQFTGHIILSKDATHVRDFRLFVPNHRSLNVDMEWLYGASESSNMEVDIGYIPQMELEATGPSVPSVILDEDGSMIDSHLPSGEPLQFVFEEIKWQQELSWEEAARRLEVAMYPFKKVSYLPFTEAFDRAKAENKLVHSILLWGALDDQSCGSGRTLRETVLESSPILTLLNESFISTWSLVKELEELQNNQENSSHQKLAGLHLEKYSFPVEMMICLPNGTVVHHINANYFLDITSVKPEEIESNLFSFSSTFEDPSTATYMQFLKEGLRRGLPLLQP

SEQ ID NO: 11852 - protein, 556 aa, Homo sapiens
MGRARPGQRGPPSPGPAAQPPAPPRRRARSLALLGALLAAAAAAAVRVCARHAEAQAAARQELALKTLGTDGLFLFSSLDTDGDMYISPEEFKPIAEKLTGSTPAASCEEEELPPDPSEETLTIEARFQPLLPETMTKSKDGFLGVSRLALSGLRNWTAAASPSAVFATRHFQPFLPPPGQELGEPWWIIPSELSMFTGYLSNNRFYPPPPKGKEVIIHRLLSMFHPRPFVKTRFAPQGAVACLTAISDFYYTVMFRIHAEFQLSEPPDFPFWFSPAQFTGHIILSKDATHVRDFRLFVPNHRSLNVDMEWLYGASESSNMEVDIGYIPQMELEATGPSVPSVILDEDGSMIDSHLPSGEPLQFVFEEIKWQQELSWEEAARRLEVAMYPFKKVSYLPFTEAFDRAKAENKLVHSILLWGALDDQSCHCSGRTLRETVLESSPILTLLNESFISTWSLVKELEELQNNQENSSHQKLAGLHLEKYSFPVEMMICLPNGTVVHHINANYFLDITSVKPEEIESNLFSFSSTFEDPSTATYMQFLKEGLRRGLPLLQP

SEQ ID NO: 11853 - protein, 66 aa, Homo sapiens
MMICLPNGTVVHHINANYFLDITSVKPEEIESNLFSFSSTFEDPSTATYMQFLKEGLRRGLPLLQP

SEQ ID NO: 11854 - protein, 668 aa, Homo sapiens
MAVYRAALGASLAAARLLPLGRCSPSPAPRSTLSGAAMEPAPRWLAGLRFDNRALRALPVEAPPPGPEGAPSAPRPVPGACFTRVQPTPLRQPRLVALSEPALALLGLGAPPAREAEAEAALFFSGNALLPGAEPAAHCYCGHQFGQFAGQLGDGAAMYLGEVCTATGERWELQLKGAGPTPFSRQADGRKVLRSSIREFLCSEAMFHLGVPTTRAGACVTSESTVVRDVFYDGNPKYEQCTVVLRVASTFIRFGSFEIFKSADEHTGRAGPSVGRNDIRVQLLDYVISSFYPEIQAAHASDSVQRNAAFFREVTRRTARMVAEWQCVGFCHGVLNTDNMSILGLTIDYGPFGFLDRYDPDHVCNASDNTGRYAYSKQPEVCRWNLRKLAEALQPELPLELGEAILAEEFDAEFQRHYLQKMRRKLGLVQVELEEDGALVSKLLETMHLTGADFTNTFYLLSSFPVELESPGLAEFLARLMEQCASLEELRLAFRPQMDPRQLSMMLMLAQSNPQLFALMGTRAGIARELERVEQQSRLEQLSAAELQSRNQGHWADWLQAYRARLDKDLEGAGDAAAWQAEHVRVMHANNPKYVLRNYIAQNAIEAAERGDFSEVRRVLKLLETPYHCEAGAATDAEATEADGADGRQRSYSSKPPLWAAELCVTSS

SEQ ID NO: 11855 - protein, 668 aa, Homo sapiens; identical to SEQ ID NO: 11854

SEQ ID NO: 11856 - protein, 208 aa, Homo sapiens
MWRSLGLALALCLLPSGGTESQDQSSLCKQPPAWSIRDQDPMLNSNGSVTVVALLQASYLCILQASKLEDLRVKLKKEGYSNISYIVVNHQGISSRLKYTHLKNKVSEHIPVYQQEENQTDVWTLLNGSKDDFLIYDRCGRLVYHLGLPFSFLTFPYVEEAIKIAYCEKKCGNCSLTTLKDEDFCKRVSLATVDKTVETPSPHYHHEH

SEQ ID NO: 11857 - protein, 371 aa, Homo sapiens
MWRSLGLALALCLLPSGGTESQDQSSLCKQPPAWSIRDQDPMLNSNGSVTVVALLQASYLCILQASKLEDLRVKLKKEGYSNISYIVVNHQGISSRLKYTHLKNKVSEHIPVYQQEENQTDVWTLLNGSKDDFLIYDRCGRLVYHLGLPFSFLTFPYVEEAIKIAYCEKKCGNCSLTTLKDEDFCKRVSLATVDKTVETPSPHYHHEHHHNHGHQHLGSSELSENQQPGAPNAPTHPAPPGLHHHHKHKGQHRQGHPENRDMPASEDLQDLQKKLCRKRCINQLLCKLPTDSELAPRSCCHCRHLIFEKTGSAITQCKENLPSLCSQGLRAEENITESCQRLPPAAQISQQLIPTEASASRKNQAKKEPSN

SEQ ID NO: 11858 - protein, 371 aa, Homo sapiens; identical to SEQ ID NO: 11857

SEQ ID NO: 11859 - protein, 371 aa, Homo sapiens; identical to SEQ ID NO: 11857

SEQ ID NO: 11860 - protein, 308 aa, Homo sapiens
MWRSLGLALALCLLPSGGTESQDQSSLCKQPPAWSIRDQDPMLNSNGSVTVVALLQASYLCILQASKLEDLRVKLKKEGYSNISYIVVNHQGISSRLKYTHLKNKVSEHIPVYQQEENQTDVWTLLNGSKDDFLIYDRCGRLVYHLGLPFSFLTFPYVEEAIKIAYCEKKCGNCSLTTLKDEDFCKRVSLATVDKTVETPSPHYHHEHHHNHGHQHLGSSELSENQQPGAPNAPTHPAPPGLHHHHKHKGQHRQGHPENRDMPASEDLQDLQKKLCRKRCINQLLCKLPTDSELAPRSCCHCRHLIFE

SEQ ID NO: 11861 - protein, 170 aa, Homo sapiens
MWRSLGLALALCLLPSGGTESQDQSSLCKQPPAWSIRDQDPMLNSNGSVTVVALLQASYLCILQASKLSKMKTFVNVYLWLLWIKQLKLHRLITIMSIITIMDISTLAAVSFQRISNQEHQMLLLILLLQAFITTISTRVSIGRVTQRTEICQQVKIYKIYKRSSVERDV

SEQ ID NO: 11862 - protein, 19 aa, Homo sapiens
MGWLTRIVCLFWGVLLTAR

SEQ ID NO: 11863 - protein, 37 aa, Homo sapiens
MGWLTRIVCLFWGVLLTARANYQNGKNNVPRLKLSYK

SEQ ID NO: 11864 - protein, 149 aa, Homo sapiens
MGWLTRIVCLFWGVLLTARANYQNGKNNVPRLKLSYKEMLESNNVITFNGLANSSSYHTFLLDEERSRLYVGAKDHIFSFDLVNIKDFQKIVWPVSYTRRDECKWAGKDILKECANFIKVLKAYNQTHLYACGTGAFHPICTYIEIGHH

SEQ ID NO: 11865 - protein, 771 aa, Homo sapiens [sequence omitted]

SEQ ID NO: 11866 - protein, 771 aa, Homo sapiens [sequence omitted]

SEQ ID NO: 11867 - protein, 214 aa, Homo sapiens
MGRAGAAAVIPGLALLWAVGLGSAAPSPPRLRLSFQELQAWHGLQTFSLERTCCYQALLVDEERGRLFVGAENHVASLNLDNISKRAKKLAWPAPVEWREECNWAGKDIGTECMNFVKLLHAYNRTHLLACGTGAFHPTCAFVEVGHRAEEPVLRLDPGRIEDGKGKSPYDPRHRAASVLVGEELYSGVAADLMGRDFTIFRSLGQRPSLRTEP

SEQ ID NO: 11868 - protein, 748 aa, Homo sapiens
MGRAGAAAVIPGLALLWAVGLGSAAPSPPRLRLSFQELQAWHGLQTFSLERTCCYQALLVDEERGRLFVGAENHVASLNLDNISKRAKKLAWPAPVEWREECNWAGKDIGTECMNFVKLLHAYNRTHLLACGTGAFHPTCAFVEVGHRAEEPVLRLDPGRIEDGKGKSPYDPRHRAASVLVGEELYSGVAADLMGRDFTIFRSLGQRPSLRTEPHDSRWLNEPKFVKVFWIPESENPDDDKIYFFFRETAVEAAPALGRLSVSRVGQICRNDVGGQRSLVNKWTTFLKARLVCSVPGVEGDTHFDQLQDVFLLSSRDHRTPLLYAVFSTSSIFQGSAVCVYSMNDVRRAFLGPFAHKEGPMHQWVSYQGRVPYPRPGMCPSKTFGTFSSTKDFPDDVIQFARNHPLMYNSVLPTGGRPLFLQVGANYTFTQIAADRVAAADGHYDVLFIGTDVGTVLKVISVPKGSRPSAEGLLLEELHVFEDSAAVTSMQISSKRHQLYVASRSAVAQIALHRCAAHGRVCTECCLARDPYCAWDGVACTRFQPSAKRRFRRQDVRNGDPSTLCSGDSSRPALLEHKVFGVEGSSAFLECEPRSLQARVEWTFQRAGVTAHTQVLAEERTERTARGLLLRRLRRRDSGVYLCAAVEQGFTQPLRRLSLHVLSATQAERLARAEEAAPAAPPGPKLWYRDFLQLVEPGGGGSANSLRMCRPQPALQSLPLESRRKGRNRRTHAPEPRAERGPRSATHW

SEQ ID NO: 11869 - protein, 754 aa, Homo sapiens
MGRAGAAAVIPGLALLWAVGLGSAAPSPPRLRLSFQELQAWHGLQTFSLERTCCYQALLVDEERGRLFVGAENHVASLNLDNISKRAKKLAWPAPVEWREECNWAGKDIGTECMNFVKLLHAYNRTHLLACGTGAFHPTCAFVEVGHRAEEPVLRLDPGRIEDGKGKSPYDPRHRAASVLVGEELYSGVAADLMGRDFTIFRSLGQRPSLRTEPHDSRWLNEPKFVKVFWIPESENPDDDKIYFFFRETAVEAAPALGRLSVSRVGQICRNDVGGQRSLVNKWTTFLKARLVCSVPGVEGDTHFDQLRPFPAEDVFLLSSRDHRTPLLYAVFSTSSSIFQGSAVCVYSMNDVRRAFLGPFAHKEGPMHQWVSYQGRVPYPRPGMCPSKTFGTFSSTKDFPDDVIQFARNHPLMYNSVLPTGGRPLFLQVGANYTFTQIAADRVAAADGHYDVLFIGTDVGTVLKVISVPKGSRPSAEGLLLEELHVFEDSAAVTSMQISSKRHQLYVASRSAVAQIALHRCAAHGRVCTECCLARDPYCAWDGVACTRFQPSAKRRFRRQDVRNGDPSTLCSGDSSRPALLEHKVFGVEGSSAFLECEPRSLQARVEWTFQRAGVTAHTQVLAEERTERTARGLLLRRLRRRDSGVYLCAAVEQGFTQPLRRLSLHVLSATQAERLARAEEAAPAAPPGPKLWYRDFLQLVEPGGGGSANSLRMCRPQPALQSLPLESRRKGRNRRTHAPEPRAERGPRSATHW

SEQ ID NO: 11870 - protein, 749 aa, Homo sapiens
MGRAGAAAVIPGLALLWAVGLGSAAPSPPRLRLSFQELQAWHGLQTFSLERTCCYQALLVDEERGRLFVGAENHVASLNLDNISKRAKKLAWPAPVEWREECNWAGKDIGTECMNFVKLLHAYNRTHLLACGTGAFHPTCAFVEVGHRAEEPVLRLDPGRIEDGKGKSPYDPRHRAASVLVGEELYSGVAADLMGRDFTIFRSLGQRPSLRTEPHDSRWLNEPKFVKVFWIPESENPDDDKIYFFFRETAVEAAPALGRLSVSRVGQICRNDVGGQRSLVNKWTTFLKARLVCSVPGVEGDTHFDQLQDVFLLSSRDHRTPLLYAVFSTSSSIFQGSAVCVYSMNDVRRAFLGPFAHKEGPMHQWVSYQGRVPYPRPGMCPSKTFGTFSSTKDFPDDVIQFARNHPLMYNSVLPTGGRPLFLQVGANYTFTQIAADRVAAADGHYDVLFIGTDVGTVLKVISVPKGSRPSAEGLLLEELHVFEDSAAVTSMQISSKRHQLYVASRSAVAQIALHRCAAHGRVCTECCLARDPYCAWDGVACTRFQPSAKRRFRRQDVRNGDPSTLCSGDSSRPALLEHKVFGVEGSSAFLECEPRSLQARVEWTFQRAGVTAHTQVLAEERTERTARGLLLRRLRRRDSGVYLCAAVEQGFTQPLRRLSLHVLSATQAERLARAEEAAPAAPPGPKLWYRDFLQLVEPGGGGSANSLRMCRPQPALQSLPLESRRKGRNRRTHAPEPRAERGPRSATHW

SEQ ID NO: 11871 - protein, 749 aa, Homo sapiens; identical to SEQ ID NO: 11870

SEQ ID NO: 11872 - protein, 406 aa, Homo sapiens
MNDVRRAFLGPFAHKEGPMHQWVSYQGRVPYPRPGMCPSKTFGTFSSTKDFPDDVIQFARNHPLMYNSVLPTGGRPLFLQVGANYTFTQIAADRVAAADGHYDVLFIGTDVGTVLKVISVPKGSRPSAEGLLLEELHVFEDSAAVTSMQISSKRHQLYVASRSAVAQIALHRCAAHGRVCTECCLARDPYCAWDGVACTRFQPSAKRRFRRQDVRNGDPSTLCSGDSSRPALLEHKVFGVEGSSAFLECEPRSLQARVEWTFQRAGVTAHTQVLAEERTERTARGLLLRRLRRRDSGVYLCAAVEQGFTQPLRRLSLHVLSATQAERLARAEEAAPAAPPGPKLWYRDFLQLVEPGGGGSANSLRMCRPQPALQSLPLESRRKGRNRRTHAPEPRAERGPRSATHW

SEQ ID NO: 11873 - protein, 406 aa, Homo sapiens; identical to SEQ ID NO: 11872

SEQ ID NO: 11874 - protein, 751 aa, Homo sapiens
MAFRTICVLVGVFICSICVKGSSQPQARVYLTFDELRETKTSEYFSLSHHPLDYRILLMDEDQDRIYVGSKDHILSLNINNISQEALSVFWPASTIKVEECKMAGKDPTHGCGNFVRVIQTFNRTHLYVCGSGAFSPVCTYLNRGRRSEDQVFMIDSKCESGKGRCSFNPNVNTVSVMINEELFSGMYIDFMGTDAAIFRSLTKRNAVRTDQHNSKWLSEPMFVDAHVIPDGTDPNDAKVYFFFKEKLTDNNRSTKQIHSMIARICPNDTGGLRSLVNKWTTFLKARLVCSVTDEDGPETHFDELEDVFLLETDNPRTTLVYGIFTTSSSVFKGSAVCVYHLSDIQTVFNGPFAHKEGPNHQLISYQGRIPYPRPGTCPGGAFTPNMRTTKEFPDDVVTFIRNHPLMYNSIYPIHKRPLIVRIGTDYKYTKIAVDRVNAADGRYHVLFLGTDRGTVQKVVVLPTNNSVSGELILEELEVFKNHAPITTMKISSKKQQLYVSSNEGVSQVSLHRCHIYGTACADCCLARDPYCAWDGHSCSRFYPTGKRRSRRQDVRHGNPLTQCRGFNLKAYRNAAEIVQYGVKNNTTFLECAPKSPQASIKWLLQKDKDRRKEVKLNERIIATSQGLLIRSVQGSDQGLYHCIATENSFKQTIAKINFKVLDSEMVAVVTDKWSPWTWASSVRALPFHPKDIMGAFSHSEMQMINQYCKDTRQQHQQGDESQKMRGDYGKLKALINSRKSRNRRNQLPES

SEQ ID NO: 11875 - protein, 751 aa, Homo sapiens; identical to SEQ ID NO: 11874

SEQ ID NO: 11876 - protein, 63 aa, Homo sapiens
MAFRTICVLVGVFICSICVKGSSQPQARVYLTFDEPTLYNAVCYICGYKKKCGVNLVLSNHLL

SEQ ID NO: 11877 - protein, 63 aa, Homo sapiens; identical to SEQ ID NO: 11876

SEQ ID NO: 11878 - protein, 40 aa, Homo sapiens
MAFRTICVLVGVFICSICVKGSSQPQARVYLTFDGPSFHD

SEQ ID NO: 11879 - protein, 39 aa, Homo sapiens
MASAGHIITLLLWGYLLELWTGGHTADTTHPRLRLSHKE

SEQ ID NO: 11880 - protein, 775 aa, Homo sapiens
MASAGHIITLLLWGYLLELWTGGHTADTTHPRLRLSHKELLNLNRTSIFHSPFGFLDLHTMLLDEYQERLFVGGRDLVYSLSLERISDGYKEIHWPSTALKMEECIMKGKDAGECANYVRVLHHYNRTHLLTCGTGAFDPVCAFIRVGYHLEDPLFHLESPRSERGRGRCPFDPSSSFISTLIGSELFAGLYSDYWSRDAAIFRSMGRLAHIRTEHDDERLLKEPKFVGSYMIPDNEDRDDNKVYFFFTEKALEAENNAHAIYTRVGRLCVNDVGGQRILVNKWSTFLKARLVCSVPGMNGIDTYFDELEDVFLLPTRDHKNPVIFGLFNTTSNIFRGHAICVYHMSSIRAAFNGPYAHKEGPEYHWSVYEGKVPYPRPGSCASKVNGGRYGTTKDYPDDAIRFARSHPLMYQAIKPAHKKPILVKTDGKYNLKQIAVDRVEAEDGQYDVLFIGTDNGIVLKVITIYNQEMESMEEVILEELQIFKDPVPIISMEISSKRQQLYIGSASAVAQVRFHHCDMYGSACADCCLARDPYCAWDGISCSRYYPTGTHAKRRFRRQDVRHGNAAQQCFGQQFVGDALDKTEEHLAYGIENNSTLLECTPRSLQAKVIWFVQKGRETRKEEVKTDDRVVKMDLGLLFLRLHKSDAGTYFCQTVEHSFVHTVRKITLEVVEEEKVEDMFNKDDEEDRHHRMPCPAQSSISQGAKPWYKEFLQLIGYSNFQRVEEYCEKVWCTDRKRKKLKMSPSKWKYANPQEKKLRSKPEHYRLPRHTLDS

SEQ ID NO: 11881 - protein, 630 aa, Homo sapiens
MASAGHIITLLLWGYLLELWTGGHTADTTHPRLRLSHKELLNLNRTSIFHSPFGFLDLHTMLLDEYQERLFVGGRDLVYSLSLERISDGYKEIHWPSTALKMEECIMKGKDAGECANYVRVLHHYNRTHLLTCGTGAFDPVCAFIRVGYHLEDPLFHLESPRSERGRGRCPFDPSSSFISTLIGSELFAGLYSDYWSRDAAIFRSMGRLAHIRTEHDDERLLKEPKFVGSYMIPDNEDRDDNKVYFFFTEKALEAENNAHAIYTRVGRLCVNDVGGQRILVNKWSTFLKARLVCSVPGMNGIDTYFDELEDVFLLPTRDHKNPVIFGLFNTTSNIFRGHAICVYHMSSIRAAFNGPYAHKEGPEYHWSVYEGKVPYPRPGSCASKVNGGRYGTTKDYPDDAIRFARSHPLMYQAIKPAHKKPILVKTDGKYNLKQIAVDRVEAEDGQYDVLFIGTDNGIVLKVITIYNQEMESMEEVILEELQIFKDPVPIISMEISSKRQQLYIGSASAVAQVRFHHCDMYGSACADCCLARDPYCAWDGISCSRYYPTGTHAKRRFRRQDVRHGNAAQQCFGQQFVGDALDKTEEHLAYGIENNSTLLECTPRSLQAKVIWFVQKGRETRKEEVKAMS

SEQ ID NO: 11882 - protein, 775 aa, Homo sapiens; identical to SEQ ID NO: 11880

SEQ ID NO: 11883 - protein, 715 aa, Homo sapiens
MLLDEYQERLFVGGRDLVYSLSLERISDGYKEIHWPSTALKMEECIMKGKDAGECANYVRVLHHYNRTHLLTCGTGAFDPVCAFIRVGYHLEDPLFHLESPRSERGRGRCPFDPSSSFISTLIGSELFAGLYSDYWSRDAAIFRSMGRLAHIRTEHDDERLLKEPKFVGSYMIPDNEDRDDNKVYFFFTEKALEAENNAHAIYTRVGRLCVNDVGGQRILVNKWSTFLKARLVCSVPGMNGIDTYFDELEDVFLLPTRDHKNPVIFGLFNTTSNIFRGHAICVYHMSSIRAAFNGPYAHKEGPEYHWSVYEGKVPYPRPGSCASKVNGGRYGTTKDYPDDAIRFARSHPLMYQAIKPAHKKPILVKTDGKYNLKQIAVDRVEAEDGQYDVLFIGTDNGIVLKVITIYNQEMESMEEVILEELQIFKDPVPIISMEISSKRQQLYIGSASAVAQVRFHHCDMYGSACADCCLARDPYCAWDGISCSRYYPTGTHAKRRFRRQDVRHGNAAQQCFGQQFVGDALDKTEEHLAYGIENNSTLLECTPRSLQAKVIWFVQKGRETRKEEVKTDDRVVKMDLGLLFLRLHKSDAGTYFCQTVEHSFVHTVRKITLEVVEEEKVEDMFNKDDEEDRHHRMPCPAQSSISQGAKPWYKEFLQLIGYSNFQRVEEYCEKVWCTDRKRKKLKMSPSKWKYANPQEKKLRSKPEHYRLPRHTLDS

SEQ ID NO: 11884 - protein, 147 aa, Homo sapiens
GTAHFFNFLLNTTDYRILLKDEDHDRMYVGSKDYVLSLDLHDINREPLIIHWAASPQRIEECVLSGKDVNPSLWPQGECGNFVRLIQPWNRTHLYVCGTGAYNPMCTYVNRGRRAQDYIFYLEPERLESGKGKCPYDPKLDTASALI

SEQ ID NO: 11885 - protein, 785 aa, Homo sapiens
MLVAGLLLWASLLTGAWPSFPTQDHLPATPRVRLSFKELKATGTAHFFNFLLNTTDYRILLKDEDHDRMYVGSKDYVLSLDLHDINREPLIIHWAASPQRIEECVLSGKDVNGECGNFVRLIQPWNRTHLYVCGTGAYNPMCTYVNRGRRAQATPWTQTQAVRGRGSRATDGALRPMPTAPRQDYIFYLEPERLESGKGKCPYDPKLDTASALINEELYAGVYIDFMGTDAAIFRTLGKQTAMRTDQYNSRWLNDPSFIHAELIPDSAERNDDKLYFFFRERSAEAPQSPAVYARIGRICLNDDGGHCCLVNKWSTFLKARLVCSVPGEDGIETHFDELQDVFVQQTQDVRNPVIYAVFTSSGSVFRGSAVCVYSMADIRMVFNGPFAHKEGPNYQWMPFSGKMPYPRPGTCPGGTFTPSMKSTKDYPDEVINFMRSHPLMYQAVYPLQRRPLVVRTGAPYRLTTIAVDQVDAADGRYEVLFLGTDRGTVQKVIVLPKDDQELEELMLEEVEVFKDPAPVKTMTISSKRQQLYVASAVGVTHLSLHRCQAYGAACADCCLARDPYCAWDGQACSRYTASSKRRSRRQDVRHGNPIRQCRGFNSNANKNAVESVQYGVAGSAAFLECQPRSPQATVKWLFQRDPGDRRREIRAEDRFLRTEQGLLLRALQLSDRGLYSCTATENNFKHVVTRVQLHVLGRDAVHAALFPPLSMSAPPPPGAGPPTPPYQELAQLLAQPEVGLIHQYCQGYWRHVPPSPREAPGAPRSPEPQDQKKPRNRRHHPPDT

SEQ ID NO: 11886 - protein, 264 aa, Homo sapiens
MLVAGLLLWASLLTGAWPSFPTQDHLPATPRVRLSFKELKATGTAHFFNFLLNTTDYRILLKDEDHDRMYVGSKDYVLSLDLHDINREPLIIHWAASPQRIEECVLSGKDVNGECGNFVRLIQPWNRTHLYVCGTGAYNPMCTYVNRGRRAQDYIFYLEPERLESGKGKCPYDPKLDTASALINEELYAGVYIDFMGTDAAIFRTLGKQTAMRTDQYNSRWLNDPSFIHAELIPDSAERNDDKLYFFFRERSAEAPQSPAVYAR

SEQ ID NO: 11887 - protein, 754 aa, Homo sapiens
MLVAGLLLWASLLTGAWPSFPTQDHLPATPRVRLSFKELKATGTAHFFNFLLNTTDYRILLKDEDHDRMYVGSKDYVLSLDLHDINREPLIIHWAASPQRIEECVLSGKDVNGECGNFVRLIQPWNRTHLYVCGTGAYNPMCTYVNRGRRAQDYIFYLEPERLESGKGKCPYDPKLDTASALINEELYAGVYIDFMGTDAAIFRTLGKQTAMRTDQYNSRWLNDPSFIHAELIPDSAERNDDKLYFFFRERSAEAPQSPAVYARIGRICLNDDGGHCCLVNKWSTFLKARLVCSVPGEDGIETHFDELQDVFVQQTQDVRNPVIYAVFTSSGSVFRGSAVCVYSMADIRMVFNGPFAHKEGPNYQWMPFSGKMPYPRPGTCPGGTFTPSMKSTKDYPDEVINFMRSHPLMYQAVYPLQRRPLVVRTGAPYRLTTIAVDQVDAADGRYEVLFLGTDRGTVQKVIVLPKDDQELEELMLEEVEVFKDPAPVKTMTISSKRQQLYVASAVGVTHLSLHRCQAYGAACADCCLARDPYCAWDGQACSRYTASSKRRSRRQDVRHGNPIRQCRGFNSNANKNAVESVQYGVAGSAAFLECQPRSPQATVKWLFQRDPGDRRREIRAEDRFLRTEQGLLLRALQLSDRGLYSCTATENNFKHVVTRVQLHVLGRDAVHAALFPPLSMSAPPPPGAGPPTPPYQELAQLLAQPEVGLIHQYCQGYWRHVPPSPREAPGAPRSPEPQDQKKPRNRRHHPPDT

SEQ ID NO: 11888 - protein, 380 aa, Homo sapiens
MLVAGLLLWASLLTGAWPSFPTQDHLPATPRVRLSFKELKATGTAHFFNFLLNTTDYRILLKDEDHDRMYVGSKDYVLSLDLHDINREPLIIHWAASPQRIEECVLSGKDVNGECGNFVRLIQPWNRTHLYVCGTGAYNPMCTYVNRGRRAQDYIFYLEPERLESGKGKCPYDPKLDTASALINEELYAGVYIDFMGTDAAIFRTLGKQTAMRTDQYNSRWLNDPSFIHAELIPDSAERNDDKLYFFFRERSAEAPQSPAVYARIGRICLNDDGGHCCLVNKWSTFLKARLVCSVPGEDGIETHFDELQDVFVQQTQDVRNPVIYAVFTSSGSVFRGSAVCVYSMADIRMVFNGPFAHKEGPNYQWMPFSGKMPYPRPGT

SEQ ID NO: 11889 - protein, 92 aa, Homo sapiens
MLVAGLLLWASLLTGAWPSFPTQDHLPATPRVRLSFKELKATGTAHFFNFLLNTTDYRILLKDEDHDRMYVGSKDYVLSLDLHDINREPLIV

SEQ ID NO: 11890 - protein, 686 aa, Homo sapiens
MYVGSKDYVLSLDLHDINREPLIIHWAASPQRIEECVLSGKDVNGECGNFVRLIQPWNRTHLYVCGTGAYNPMCTYVNRGRRAQDYIFYLEPERLESGKGKCPYDPKLDTASALINEELYAGVYIDFMGTDAAIFRTLGKQTAMRTDQYNSRWLNDPSFIHAELIPDSAERNDDKLYFFFRERSAEAPQSPAVYARIGRICLNDDGGHCCLVNKWSTFLKARLVCSVPGEDGIETHFDELQDVFVQQTQDVRNPVIYAVFTSSGSVFRGSAVCVYSMADIRMVFNGPFAHKEGPNYQWMPFSGKMPYPRPGTCPGGTFTPSMKSTKDYPDEVINFMRSHPLMYQAVYPLQRRPLVVRTGAPYRLTTIAVDQVDAADGRYEVLFLGTDRGTVQKVIVLPKDDQELEELMLEEVEVFKDPAPVKTMTISSKRQQLYVASAVGVTHLSLHRCQAYGAACADCCLARDPYCAWDGQACSRYTASSKRRSRRQDVRHGNPIRQCRGFNSNANKNAVESVQYGVAGSAAFLECQPRSPQATVKWLFQRDPGDRRREIRAEDRFLRTEQGLLLRALQLSDRGLYSCTATENNFKHVVTRVQLHVLGRDAVHAALFPPLSMSAPPPPGAGPPTPPYQELAQLLAQPEVGLIHQYCQGYWRHVPPSPREAPGAPRSPEPQDQKKPRNRRHHPPDT

SEQ ID NO: 11891 - protein, 782 aa, Homo sapiens
MAPSAWAICWLLGGLLLHGGSSGPSPGPSVPRLRLSYRDLLSANRSAIFLGPQGSLNLQAMYLDEYRDRLFLGGLDALYSLRLDQAWPDPREVLWPPQPGQREECVRKGRDPLTECANFVRVLQPHNRTHLLACGTGAFQPTCALITVGHRGEHVLHLEPGSVESGRGRCPHEPSRPFASTFIDGELYTGLTADFLGREAMIFRSGGPRPALRSDSDQSLLHDPRFVMAARIPENSDQDNDKVYFFFSETVPSPDGGSNHVTVSRVGRVCVNDAGGQRVLVNKWSTFLKARLVCSVPGPGGAETHFDQLEDVFLLWPKAGKSLEVYALFSTVSAVFQGFAVCVYHMADIWEVFNGPFAHRDGPQHQWGPYGGKVPFPRPGVCPSKMTAQPGRPFGSTKDYPDEVLQFARAHPLMFWPVRPRHGRPVLVKTHLAQQLHQIVVDRVEAEDGTYDVIFLGTDSGSVLKVIALQAGGSAEPEEVVLEELQVFKVPTPITEMEISVKRQMLYVGSRLGVAQLRLHQCETYGTACAECCLARDPYCAWDGASCTHYRPSLGKRRFRRQDIRHGNPALQCLGQSQEEEAVGLVAATMVYGTEHNSTFLECLPKSPQAAVRWLLQRPGDEGPDQVKTDERVLHTERGLLFRRLSRFDAGTYTCTTLEHGFSQTVVRLALVVIVASQLDNLFPPEPKPEEPPARGGLASTPPKAWYKDILQLIGFANLPRVDEYCERVWCRGTTECSGCFRSRSRGKQARGKSWAGLELGKKMKSRVHAEHNRTPREVEAT

SEQ ID NO: 11892 - protein, 186 aa, Homo sapiens
MAPSAWAICWLLGGLLLHGGSSGPSPGPSVPRLRLSYRGAMVRKPSSTMWMETFSRYLLSANRSAIFLGPQGSLNLQAMYLDEYRDRLFLGGLDALYSLRLDQAWPDPREVLWPPQPGQREECVRKGRDPLTECANFVRVLQPHNRTHLLACGTGAFQPTCALITVGHRGEHVLHLEPGSVESGRG

SEQ ID NO: 11893 - protein, 99 aa, Homo sapiens
  SITE 1: note = misc_feature - Xaa can be any naturally occurring amino acid
XSSGPSPGPSVPRLRLSYRDRVRQLRAGATASQPDPPASLWHWGLPAHLCPHHSWPPWGACAPPGAWQCGKWPGAVPSRAQPSLCQHLHRRGAVHGSHC

SEQ ID NO: 11894 - protein, 100 aa, Homo sapiens
MALPALGLDPWSLLGLFLFQLLQLLLPTTTAGGGGQGPMPRVRYYAGDERRALSFFHQKGLQDFDTLLLSGDGNTLYVGAREAILALDIQDPGVPRLKNM

SEQ ID NO: 11895 - protein, 236 aa, Homo sapiens
MALPALGLDPWSLLGLFLFQLLQLLLPTTTAGGGGQGPMPRVRYYAGDERRALSFFHQKGLQDFDTLLLSGDGNTLYVGAREAILALDIQDPGVPRLKNMIPWPASDRKKSECAFKKKSNEELQDSYLLPISEDKVMEGKGQSPFDPAHKHTAVLVDGMLYSGTMNNFLGSEPILMRTLGSQPVLKTDNFLRWLHHDASFVAAIPSTQVVYFFFEETASEFDFFERLHTSRVARVC

SEQ ID NO: 11896 - protein, 761 aa, Homo sapiens
MALPALGLDPWSLLGLFLFQLLQLLLPTTTAGGGGQGPMPRVRYYAGDERRALSFFHQKGLQDFDTLLLSGDGNTLYVGAREAILALDIQDPGVPRLKNMIPWPASDRKKSECAFKKKSNETQCFNFIRVLVSYNVTHLYTCGTFAFSPACTFIELQDSYLLPISEDKVMEGKGQSPFDPAHKHTAVLVDGMLYSGTMNNFLGSEPILMRTLGSQPVLKTDNFLRWLHHDASFVAAIPSTQVVYFFFEETASEFDFFERLHTSRVARVCKNDVGGEKLLQKKWTTFLKAQLLCTQPGQLPFNVIRHAVLLPADSPTAPHIYAVFTSQWQVGGTRSSAVCAFSLLDIERVFKGKYKELNKETSRWTTYRGPETNPRPGSCSVGPSSDKALTFMKDHFLMDEQVVGTPLLVKSGVEYTRLAVETAQGLDGHSHLVMYLGTTTGSLHKAVVSGDSSAHLVEEIQLFPDPEPVRNLQLAPTQGAVFVGFSGGVWRVPRANCSVYESCVDCVLARDPHCAWDPESRTCCLLSAPNLNSWKQDMERGNPEWACASGPMSRSLRPQSRPQIIKEVLAVPNSILELPCPHLSALASYYWSHGPAAVPEASSTVYNGSLLLIVQDGVGGLYQCWATENGFSYPVISYWVDSQDQTLALDPELAGIPREHVKVPLTRVSGGAALAAQQSYWPHFVTVTVLFALVLSGALIILVASPLRALRARGKVQGCETLRPGEKAPLSREQHLQSPKECRTSASDVDADNNCLGTEVA

SEQ ID NO: 11897 - protein, 761 aa, Homo sapiens; identical to SEQ ID NO: 11896

SEQ ID NO: 11898 - protein, 761 aa, Homo sapiens; identical to SEQ ID NO: 11896

SEQ ID NO: 11899 - protein, 321 aa, Homo sapiens
MALPALGLDPWSLLGLFLFQLLQLLLPTTTAGGGGQGPMPRVRYYAGDERRALSFFHQKGLQDFDTLLLSGDGNTLYVGAREAILALDIQDPGVPRLKNMIPWPASDRKKSECAFKKKSNETQCFNFIRVLVSYNVTHLYTCGTFAFSPACTFIELQDSYLLPISEDKVMEGKGQSPFDPAHKHTAVLVDGMLYSGTMNNFLGSEPILMRTLGSQPVLKTDNFLRWLHHDASFVAAIPSTQVVYFFFEETASEFDFFERLHTSRVARVCKNDVGGEKLLQKKWTTFLKAQLLCTQPGQLPFNVIRHAVLLPADSPTAPHIY

SEQ ID NO: 11900 - protein, 629 aa, Homo sapiens
MIPWPASDRKKSECAFKKKSNEELQDSYLLPISEDKVMEGKGQSPFDPAHKHTAVLVDGMLYSGTMNNFLGSEPILMRTLGSQPVLKTDNFLRWLHHDASFVAAIPSTQVVYFFFEETASEFDFFERLHTSRVARVCKNDVGGEKLLQKKWTTFLKAQLLCTQPGQLPFNVIRHAVLLPADSPTAPHIYAVFTSQWQVGGTRSSAVCAFSLLDIERVFKGKYKELNKETSRWTTYRGPETNPRPGSCSVGPSSDKALTFMKDHFLMDEQVVGTPLLVKSGVEYTRLAVETAQGLDGHSHLVMYLGTTTGSLHKAVVSGDSSAHLVEEIQLFPDPEPVRNLQLAPTQGAVFVGFSGGVWRVPRANCSVYESCVDCVLARDPHCAWDPESRTCCLLSAPNLNSWKQDMERGNPEWACASGPMSRSLRPQSRPQIIKEVLAVPNSILELPCPHLSALASYYWSHGPAAVPEASSTVYNGSLLLIVQDGVGGLYQCWATENGFSYPVISYWVDSQDQTLALDPELAGIPREHVKVPLTRVSGGAALAAQQSYWPHFVTVTVLFALVLSGALIILVASPLRALRARGKVQGCETLRPGEKAPLSREQHLQSPKECRTSASDVDADNNCLGTEVA

SEQ ID NO: 11901 - protein, 220 aa, Homo sapiens
MIPWPASDRKKSECAFKKKSNETQCFNFIRVLVSYNVTHLYTCGTFAFSPACTFIELQDSYLLPISEDKVMEGKGQSPFDPAHKHTAVLVDGMLYSGTMNNFLGSEPILMRTLGSQPVLKTDNFLRWLHHDASFVAAIPSTQVVYFFFEETASEFDFFERLHTSRVARVCKNDVGGEKLLQKKWTTFLKAQLLCTQPGQLPFNVIRHAVLLPADSPTAPH

SEQ ID NO: 11902 - protein, 723 aa, Homo sapiens
MPRVRYYAGDERRALSFFHQKGLQDFDTLLLSGDGNTLYVGAREAILALDIQDPGVPRLKNMIPWPASDRKKSECAFKKKSNETQCFNFIRVLVSYNVTHLYTCGTFAFSPACTFIELQDSYLLPISEDKVMEGKGQSPFDPAHKHTAVLVDGMLYSGTMNNFLGSEPILMRTLGSQPVLKTDNFLRWLHHDASFVAAIPSTQVVYFFFEETASEFDFFERLHTSRVARVCKNDVGGEKLLQKKWTTFLKAQLLCTQPGQLPFNVIRHAVLLPADSPTAPHIYAVFTSQWQVGGTRSSAVCAFSLLDIERVFKGKYKELNKETSRWTTYRGPETNPRPGSCSVGPSSDKALTFMKDHFLMDEQVVGTPLLVKSGVEYTRLAVETAQGLDGHSHLVMYLGTTTGSLHKAVVSGDSSAHLVEEIQLFPDPEPVRNLQLAPTQGAVFVGFSGGVWRVPRANCSVYESCVDCVLARDPHCAWDPESRTCCLLSAPNLNSWKQDMERGNPEWACASGPMSRSLRPQSRPQIIKEVLAVPNSILELPCPHLSALASYYWSHGPAAVPEASSTVYNGSLLLIVQDGVGGLYQCWATENGFSYPVISYWVDSQDQTLALDPELAGIPREHVKVPLTRVSGGAALAAQQSYWPHFVTVTVLFALVLSGALIILVASPLRALRARGKVQGCETLRPGEKAPLSREQHLQSPKECRTSASDVDADNNCLGTEVA

SEQ ID NO: 11903 - protein, 51 aa, Homo sapiens
MAGPCTWVLERPSLHSVATSASCQAGSTRSCFGVQTQRRNSSAASRARTHR

SEQ ID NO: 11904 - protein, 115 aa, Homo sapiens
MAGPCTWVLERPSLHSVATSASCQAGSTRSCFGVQTQRRNSSAASRARTHSATVKTTSRSSCRSAAVTCSPVAQQPSAPCVPTSTWRTSPWQGTRRGMSSWKMARAVVPSTRISS

SEQ ID NO: 11905 - protein, 91 aa, Homo sapiens
MLRTAMGLRSWLAAPWGALPPRPPLLLLLLLLLLLQPPPPTWALSPRISLPLGSEERPFLRFEAEHISNYTALLLSRDGRTLYVGAREALF

SEQ ID NO: 11906 - protein, 114 aa, Homo sapiens
MLRTAMGLRSWLAAPWGALPPRPPLLLLLLLLLLLQPPPPTWALSPRISLPLGSEERPFLRFEAEHISNYTALLLSRDGRTLYVGAREALFALSSNLSFLPGGEYQELLWGADA

SEQ ID NO: 11907 - protein, 121 aa, Homo sapiens
MLRTAMGLRSWLAAPWGALPPRPPLLLLLLLLLLLQPPPPTWALSPRISLPLGSEERPFLRFEAEHISNYTALLLSRDGRTLYVGAREALFALSSNLSFLPGGEYQELLWGADAEKKQQCS

SEQ ID NO: 11908 - protein, 837 aa, Homo sapiens
MLRTAMGLRSWLAAPWGALPPRPPLLLLLLLLLLLQPPPPTWALSPRISLPLGSEERPFLRFEAEHISNYTALLLSRDGRTLYVGAREALFALSSNLSFLPGGEYQELLWGADAEKKQQCSFKGKDPQRDCQNYIKILLPLSGSHLFTCGTAAFSPMCTYINMENFTLARDEKGNVLLEDGKGRCPFDPNFKSTALVVDGELYTGTVSSFQGNDPAISRSQSLRPTKTESSLNWLQDPAFVASAYIPESLGSLQGDDDKIYFFFSETGQEFEFFENTIVSRIARICKGDEGGERVLQQRWTSFLKAQLLCSRPDDGFPFNVLQDVFTLSPSPQDWRDTLFYGVFTSQWHRGTTEGSAVCVFTMKDVQRVFSGLYKEVNRETQQWYTVTHPVPTPRPGACITNSARERKINSSLQLPDRVLNFLKDHFLMDGQVRSRMLLLQPQARYQRVAVHRVPGLHHTYDVLFLGTGDGRLHKAVSVGPRVHIIEELQIFSSGQPVQNLLLDTHRGLLYAASHSGVVQVPMANCSLYRSCGDCLLARDPYCAWSGSSCKHVSLYQPQLATRPWIQDIEGASAKDLCSASSVVSPSFVPTGEKPCEQVQFQPNTVNTLACPLLSNLATRLWLRNGAPVNASASCHVLPTGDLLLVGTQQLGEFQCWSLEEGFQQLVASYCPEVVEDGVADQTDEGGSVPVIISTSRVSAPAGGKASWGADRSYWKEFLVMCTLFVLAVLLPVLFLLYRHRNSMKVFLKQGECASVHPKTCPVVLPPETRPLNGLGPPSTPLDHRGYQSLSDSPPGSRVFTESEKRPLSIQDSFVEVSPVCPRPRVRLGSEIRDSVV

SEQ ID NO: 11909 - protein, 837 aa, Homo sapiens; identical to SEQ ID NO: 11908

SEQ ID NO: 11910 - protein, 63 aa, Homo sapiens
MLRTAMGLRSWLAAPWGALPPRPPLLLLLLLLLLLQPPPPTWALSPRISLPLGWGYVKTLHRL

SEQ ID NO: 11911 - protein, 461 aa, Homo sapiens
  SITE 1: note = misc_feature - Xaa can be any naturally occurring amino acid
XARICKGDEGGERVLQQRWTSFLKAQLLCSRPDDGFPFNVLQDVFTLSPSPQDWRDTLFYGVFTSQWHRGTTEGSAVCVFTMKDVQRVFSGLYKEVNRETQQWYTVTHPVPTPRPGACITNSARERKINSSLQLPDRVLNFLKDHFLMDGQVRSRMLLLQPQARYQRVAVHRVPGLHHTYDVLFLGTGDGRLHKAVSVGPRVHIIEELQIFSSGQPVQNLLLDTHRGLLYAASHSGVVQVPMANCSLYRSCGDCLLARDPYCAWSGSSCKHVSLYQPQLATRPWIQDIEGASAKDLCSASSVVSPSFVPTGEKPCEQVQFQPNTVNTLACPLLSNLATRLWLRNGAPVNASASCHVLPTGDLLLVGTQQLGEFQCWSLEEGFQQLVASYCPEVVEDGVADQTDEGGSVPVIISTSRVSAPAGGKASWGADRSWARTQLLDLSSLYQAVATREDSASSGEIS

SEQ ID NO: 11912 - protein, 120 aa, Homo sapiens
  SITE 1: note = misc_feature - Xaa can be any naturally occurring amino acid
XHIIEELQIFSSGQPVQNLLLDTHRGLLYAASHSGVVQVPMANCSLYRSCGDCLLARDPYCAWSGSSCKHVSLYQPQLATRILSGPQAVDPGHRGSQRQGPLQRVFGCVPVFCTNRGEAM

SEQ ID NO: 11913 - protein, 253 aa, Homo sapiens
  SITE 1: note = misc_feature - Xaa can be any naturally occurring amino acid
XRSRMLLLQPQARYQRVAVHRVPGLHHTYDVLFLGTGDGRLHKAVSVGPRVHIIEELQIFSSGQPVQNLLLDTHRVSRPTRNPGRGLLYAASHSGVVQVPMANCSLYRSCGDCLLARDPYCAWSGSSCKHVSLYQPQLATRPWIQDIEGASAKDLCSASSVVSPSFVPTGEKPCEQVQFQPNTVNTLACPLLSNLATRLWLRNGAPVNASASCHVLPTGDLLLVGTQQLGEFQCWSLEEGFQQLVASYCPEVV

SEQ ID NO: 11914 - protein, 140 aa, Homo sapiens
MAPHWAVWLLAARLWGLGIGAEVWWNLVPRKTVSSGELATVVRRFSQTGIQDFLTLTLTEPTGLLYVGAREALFAFSMEALELQGAISWEAPVEKKTECIQKGKNNQTECFNFIRFLQPYNASHLYVCGTYAFQPKCTYV

SEQ ID NO: 11915 - protein, 201 aa, Homo sapiens
MAPHWAVWLLAARLWGLGIGAEVWWNLVPRKTVSSGELATVVRRFSQTGIQDFLTLTLTEPTGLLYVGAREALFAFSMEALELQGAISWEAPVEKKTECIQKGKNNQTECFNFIRFLQPYNASHLYVCGTYAFQPKCTYVNMLTFTLEHGEFEDGKGKCPYDPAKGHAGLLVDGELYSATLNNFLGTEPIILRNMGPHHSM

SEQ ID NO: 11916 - protein, 833 aa, Homo sapiens
MAPHWAVWLLAARLWGLGIGAEVWWNLVPRKTVSSGELATVVRRFSQTGIQDFLTLTLTEPTGLLYVGAREALFAFSMEALELQGAISWEAPVEKKTECIQKGKNNQTECFNFIRFLQPYNASHLYVCGTYAFQPKCTYVNMLTFTLEHGEFEDGKGKCPYDPAKGHAGLLVDGELYSATLNNFLGTEPIILRNMGPHHSMKTEYLAFWLNEPHFVGSAYVPESVGSFTGDDDKVYFFFRERAVESDCYAEQVVARVARVCKGDMGGARTLQRKWTTFLKARLACSAPNWQLYFNQLQAMHTLQDTSWHNTTFFGVFQAQWGDMYLSAICEYQLEEIQRVFEGPYKEYHEEAQKWDRYTDPVPSPRPGSCINNWHRRHGYTSSLELPDNILNFVKKHPLMEEQVGPRWSRPLLVKKGTNFTHLVADRVTGLDGATYTVLFIGTGDGWLLKAVSLGPWVHLIEELQLFDQEPMRSLVLSQSKKLLFAGSRSQLVQLPVADCMKYRSCADCVLARDPYCAWSVNTSRCVAVGGHSGSLLIQHVMTSDTSGICNLRGSKKVRPTPKNITVVAGTDLVLPCHLSSNLAHARWTFGGRDLPAEQPGSFLYDARLQALVVMAAQPRHAGAYHCFSEEQGARLAAEGYLVAVVAGPSVTLEARAPLENLGLVWLAVVALGAVCLVLLLLVLSLRRRLREELEKGAKATERTLVYPLELPKEPTSPPFRPCPEPDEKLWDPVGYYYSDGSLKIVPGHARCQPGGGPPSPPPGIPGQPLPSPTRLHLGGGRNSNANGYVRLQLGGEDRGGLGHPLPELADELRRKLQQRQPLPDSNPEESSV

SEQ ID NO: 11917 - protein, 59 aa, Homo sapiens
MRMCTPIRGLLMALAVMFGTAMAFAPIPRITWEHREVHLVQFHEPDIYNYSALLLSEDK

SEQ ID NO: 11918 - protein, 66 aa, Homo sapiens
MRMCTPIRGLLMALAVMFGTAMAFAPIPRITWEHREVHLVQFHEPDIYNYSALLLSEDKDTLYIGA

SEQ ID NO: 11919 - protein, 76 aa, Homo sapiens
MRMCTPIRGLLMALAVMFGTAMAFAPIPRITWEHREVHLVQFHEPDIYNYSALLLSEDKDTLYIGAREAVFAVNAL

SEQ ID NO: 11920 - protein, 146 aa, Homo sapiens
MRMCTPIRGLLMALAVMFGTAMAFAPIPRITWEHREVHLVQFHEPDIYNYSALLLSEDKDTLYIGAREAVFAVNALNISEKQHEVYWKVSEDKKAKCAEKGKSKQTECLNYIRVLQPLSATSLYVCGTNAFQPACDHLNLTSFKFL

SEQ ID NO: 11921 - protein, 862 aa, Homo sapiens
MRMCTPIRGLLMALAVMFGTAMAFAPIPRITWEHREVHLVQFHEPDIYNYSALLLSEDKDTLYIGAREAVFAVNALNISEKQHEVYWKVSEDKKAKCAEKGKSKQTECLNYIRVLQPLSATSLYVCGTNAFQPACDHLNLTSFKFLGKNEDGKGRCPFDPAHSYTSVMVDGELYSGTSYNFLGSEPIISRNSSHSPLRTEYAIPWLNEPSFVFADVIRKSPDSPDGEDDRVYFFFTEVSVEYEFVFRVLIPRIARVCKGDQGGLRTLQKKWTSFLKARLICSRPDSGLVFNVLRDVFVLRSPGLKVPVFYALFTPQLNNVGLSAVCAYNLSTAEEVFSHGKYMQSTTVEQSHTKWVRYNGPVPKPRPGACIDSEARAANYTSSLNLPDKTLQFVKDHPLMDDSVTPIDNRPRLIKKDVNYTQIVVDRTQALDGTVYDVMFVSTDRGALHKAISLEHAVHIIEETQLFQDFEPVQTLLLSSKKGNRFVYAGSNSGVVQAPLAFCGKHGTCEDCVLARDPYCAWSPPTATCVALHQTESPSRGLIQEMSGDASVCPDKSKGSYRQHFFKHGGTAELKCSQKSNLARVFWKFQNGVLKAESPKYGLMGRKNLLIFNLSEGDSGVYQCLSEERVKNKTVFQVVAKHVLEVKVVPKPVVAPTLSVVQTEGSRIATKVLVASTQGSSPPTPAVQATSSGAITLPPKPAPTGTSCEPKIVINTVPQLHSEKTMYLKSSDNRLLMSLFLFFFVLFLCLFFYNCYKGYLPRQCLKFRSALLIGKKKPKSDFCDREQSLKETLVEPGSFSQQNGEHPKPALDTGYETEQDTITSKVPTDREDSQRIDDLSARDKPFDVKCELKFADSDADGD

SEQ ID NO: 11922 - protein, 738 aa, Homo sapiens
MRMCTPIRGLLMALAVMFGTAMAFAPIPRITWEHREVHLVQFHEPDIYNYSALLLSEDKDTLYIGAREAVFAVNALNISEKQHEVYWKVSEDKKAKCAEKGKSKQTECLNYIRVLQPLSATSLYVCGTNAFQPACDHLNLTSFKFLGKNEDGKGRCPFDPAHSYTSVMVDGELYSGTSYNFLGSEPIISRNSSHSPLRTEYAIPWLNEPSFVFADVIRKSPDSPDGEDDRVYFFFTEVSVEYEFVFRVLIPRIARVCKGDQGGLRTLQKKWTSFLKARLICSRPDSGLVFNVLRDVFVLRSPGLKVPVFYALFTPQLNNVGLSAVCAYNLSTAEEVFSHGKYMQSTTVEQSHTKWVRYNGPVPKPRPGACIDSEARAANYTSSLNLPDKTLQFVKDHPLMDDSVTPIDNRPRLIKKDVNYTQIVVDRTQALDGTVYDVMFVSTDRGALHKAISLEHAVHIIEETQLFQDFEPVQTLLLSSKKGNRFVYAGSNSGVVQAPLAFCGKHGTCEDCVLARDPYCAWSPPTATCVALHQTESPSRGLIQEMSGDASVCPASSPKPLPPPGSSSLSCLGHVGDRRLSSPWTPWPASGAGPDSSSRVSLLPPFLSDQAQHVHALGNFYLFCQATGPADIRFVWEKNGRALETCVPVQTHALPDGRAHALSWLQDAIRESAEYRCSVLSSAGNKTSKVQVAVMRPEVTHQERWTRELSAWRAVAGEHDRMMQSWRKAWESCSKDTL

SEQ ID NO: 11923 - protein, 738 aa, Homo sapiens; identical to SEQ ID NO: 11922

SEQ ID NO: 11924 - protein, 862 aa, Homo sapiens; identical to SEQ ID NO: 11921

SEQ ID NO: 11925 - protein, 862 aa, Homo sapiens; identical to SEQ ID NO: 11921

SEQ ID NO: 11926 - protein, 548 aa, Homo sapiens
MRMCTPIRGLLMALAVMFGTAMAFAPIPRITWEHREVHLVQFHEPDIYNYSALLLSEDKDTLYIGAREAVFAVNALNISEKQHEVYWKVSEDKKAKCAEKGKSKQTECLNYIRVLQPLSATSLYVCGTNAFQPACDHLNLTSFKFLGKNEDGKGRCPFDPAHSYTSVMVDGELYSGTSYNFLGSEPIISRNSSHSPLRTEYAIPWLNEPSFVFADVIRKSPDSPDGEDDRVYFFFTEVSVEYEFVFRVLIPRIARVCKGDQGGLRTLQKKWTSFLKARLICSRPDSGLVFNVLRDVFVLRSPGLKVPVFYALFTPQLNNVGLSAVCAYNLSTAEEVFSHGKYMQSTTVEQSHTKWVRYNGPVPKPRPGACIDSEARAANYTSSLNLPDKTLQFVKDHPLMDDSVTPIDNRPRLIKKDVNYTQIVVDRTQALDGTVYDVMFVSTDRGALHKAISLEHAVHIIEETQLFQDFEPVQTLLLSSKKVLQTFALSGRRMGELWRPVSLCRPMHCPMAGPMHSAGCRTPSGKALSIAALSSPQQGTRLRRCRLL

SEQ ID NO: 11927 - protein, 738 aa, Homo sapiens; identical to SEQ ID NO: 11922

SEQ ID NO: 11928 - protein, 862 aa, Homo sapiens; identical to SEQ ID NO: 11921

SEQ ID NO: 11929 - protein, 548 aa, Homo sapiens; identical to SEQ ID NO: 11926

SEQ ID NO: 11930 - protein, 123 aa, Homo sapiens
MWTQRWKRSVSPGPADIRFVWEKNGRALETCVPVQTHALPDGRAHALSWLQDAIRESAEYRCSVLSSAGNKTSKVQVAVMRPEVTHQERWTRELSAWRAVAGEHDRMMQSWRKAWESCSKDTL

SEQ ID NO: 11931 - protein, 49 aa, Homo sapiens
MPASAARPRPGPGQPTASPFPLLLLAVLSGPVSGRVPRSVPRTSLPISD

SEQ ID NO: 11932 - protein, 770 aa, Homo sapiens
MPASAARPRPGPGQPTASPFPLLLLAVLSGPVSGRVPRSVPRTSLPISEADSCLTRFAVPHTYNYSVLLVDPASHTLYVGARDTIFALSLPFSGERPRRIDWMVPEAHRQNCRKKGKKEDECHNFVQILAIANASHLLTCGTFAFDPKCGVIDVSRFQQVERLESGRGKCPFEPAQRSAAVMAGGVLYAATVKNYLGTEPIITRAVGRAEDWIRTDTLPSWLNAPAFVAAVALSPAEWGDEDGDDEIYFFFTETSRAFDSYERIKVPRVARVCAGDLGGRKTLQQRWTTFLKADLLCPGPEHGRASSVLQDVAVLRPELGAGTPIFYGIFSSQWEGATISAVCAFRPQDIRTVLNGPFRELKHDCNRGLPVVDNDVPQPRPGECITNNMKLRHFGSSLSLPDRVLTFIRDHPLMDRPVFPADGHPLLVTTDTAYLRVVAHRVTSLSGKEYDVLYLGTEDGHLHRAVRIGAQLSVLEDLALFPEPQPVENMKLYHSWLLVGSRTEVTQVNTTNCGRLQSCSECILAQDPVCAWSFRLDECVAHAGEHRGLVQDIESADVSSLCPKEPGERPVVFEVPVATAAHVVLPCSPSSAWASCVWHQPSGVTALTPRRDGLEVVVTPGAMGAYACECQEGGAAHVVAAYSLVWGSQRDAPSRAHTVGAGLAGFFLGILAASLTLILIGRRQQRRRQRELLARDKVGLDLGAPPSGTTSYSQDPPSPSPEDERLPLALAKRGSGFGGFSPPFLLDPCPSPAHIRLTGAPLATCDETSI

SEQ ID NO: 11933 - protein, 160 aa, Homo sapiens
MPASAARPRPGPGQPTASPFPLLLLAVLSGPVSGRVPRSVPRTSLPISEADSCLTRFAVPHTYNYSVLLVDPASHTLYVGARDTIFALSLPFSGERPRRIDWMVPEAHRQNCRKKGKKEDECHNFVQILAIANASHLLTCGTFAFDPKCGVIGGSSMLPL

SEQ ID NO: 11934 - protein, 165 aa, Homo sapiens
MPASAARPRPGPGQPTASPFPLLLLAVLSGPVSGRVPRSVPRTSLPISEADSCLTRFAVPHTYNYSVLLVDPASHTLYVGARDTIFALSLPFSGERPRRIDWMVPEAHRQNCRKKGKKEDVSRFQQVERLESGRGKCPFEPAQRSAAVMAGGVLYAATVKNYLGT

SEQ ID NO: 11935 - protein, 737 aa, Homo sapiens
MPASAARPRPGPGQPTASPFPLLLLAVLSGPVSGRVPRSVPRTSLPISEADSCLTRFAVPHTYNYSVLLVDPASHTLYVGARDTIFALSLPFSGERPRRIDWMVPEAHRQNCRKKGKKEDVSRFQQVERLESGRGKCPFEPAQRSAAVMAGGVLYAATVKNYLGTEPIITRAVGRAEDWIRTDTLPSWLNAPAFVAAVALSPAEWGDEDGDDEIYFFFTETSRAFDSYERIKVPRVARVCAGDLGGRKTLQQRWTTFLKADLLCPGPEHGRASSVLQDVAVLRPELGAGTPIFYGIFSSQWEGATISAVCAFRPQDIRTVLNGPFRELKHDCNRGLPVVDNDVPQPRPGECITNNMKLRHFGSSLSLPDRVLTFIRDHPLMDRPVFPADGHPLLVTTDTAYLRVVAHRVTSLSGKEYDVLYLGTEDGHLHRAVRIGAQLSVLEDLALFPEPQPVENMKLYHSWLLVGSRTEVTQVNTTNCGRLQSCSECILAQDPVCAWSFRLDECVAHAGEHRGLVQDIESADVSSLCPKEPGERPVVFEVPVATAAHVVLPCSPSSAWASCVWHQPSGVTALTPRRDGLEVVVTPGAMGAYACECQEGGAAHVVAAYSLVWGSQRDAPSRAHTVGAGLAGFFLGILAASLTLILIGRRQQRRRQRELLARDKVGLDLGAPPSGTTSYSQDPPSPSPEDERLPLALAKRGSGFGGFSPPFLLDPCPSPAHIRLTGAPLATCDETSI

SEQ ID NO: 11936 - protein, 178 aa, Homo sapiens
MPASAARPRPGPGQPTASPFPLLLLAVLSGPVSGRVPRSVPRTSLPISEADSCLTRFAVPHTYNYSVLLVDPASHTLYVGARDTIFALSLPFSGERPRRIDWMVPEAHRQNCRKKGKKEGDLGGRKTLQQRWTTFLKADLLCPGPEHGRASSVLQDVAVLRPELGAGTPIFYGIFSSQ

SEQ ID NO: 11937 - protein, 615 aa, Homo sapiens
MPASAARPRPGPGQPTASPFPLLLLAVLSGPVSGRVPRSVPRTSLPISEADSCLTRFAVPHTYNYSVLLVDPASHTLYVGARDTIFALSLPFSGERPRRIDWMVPEAHRQNCRKKGKKEGDLGGRKTLQQRWTTFLKADLLCPGPEHGRASSVLQDVAVLRPELGAGTPIFYGIFSSQWEGATISAVCAFRPQDIRTVLNGPFRELKHDCNRGLPVVDNDVPQPRPGECITNNMKLRHFGSSLSLPDRVLTFIRDHPLMDRPVFPADGHPLLVTTDTAYLRVVAHRVTSLSGKEYDVLYLGTEDGHLHRAVRIGAQLSVLEDLALFPEPQPVENMKLYHSWLLVGSRTEVTQVNTTNCGRLQSCSECILAQDPVCAWSFRLDECVAHAGEHRGLVQDIESADVSSLCPKEPGERPVVFEVPVATAAHVVLPCSPSSAWASCVWHQPSGVTALTPRRDGLEVVVTPGAMGAYACECQEGGAAHVVAAYSLVWGSQRDAPSRAHTVGAGLAGFFLGILAASLTLILIGRRQQRRRQRELLARDKVGLDLGAPPSGTTSYSQDPPSPSPEDERLPLALAKRGSGFGGFSPPFLLDPCPSPAHIRLTGAPLATCDETSI

SEQ ID NO: 11938 - protein, 127 aa, Homo sapiens
MPASAARPRPGPGQPTASPFPLLLLAVLSGPVSGRVPRSVPRTSLPISEADSCLTRFAVPHTYNYSVLLVDPASHTLYVGARDTIFALSLPFSGERPRRIDWMVPEAHRQNCRKKGKKEGGSSMLPL

SEQ ID NO: 11939 - protein, 68 aa, Homo sapiens
MPASAARPRPGPGQPTASPFPLLLLAVLSGPVSGRVPRSVPRTSLPISVFRRKNRGGGYDPLKRCGRS

SEQ ID NO: 11940 - protein, 127 aa, Homo sapiens
MGSMSPPSAWPCVLDGPETRQDLCQPPKPCVHSHAHMEECLSAGLQCPHPHLLLVHSCFIPASGLGVPSQLPHPIWSSSPAPCGDLFVKSLGTGQPGEVRLHHSPPLPSCVALVNQPPHSPWSFSRV

SEQ ID NO: 11941 - protein, 170 aa, Homo sapiens
MWGRLWPLLLSILTATAVPGPSLRRPSRELDATPRMTIPYEELSGTRHFKGQAQNYSTLLLEEASARLLVGARGALFSLSANDIGDGAHKEIHWEASPEMQSKCHQKGKNNQTECFNHVRFLQRLNSTHLYACGTHAFQPLCAAIDAEAFTLPTSFEEGKEKCPYDPARG

SEQ ID NO: 11942 - protein, 843 aa, Homo sapiens
MWGRLWPLLLSILTATAVPGPSLRRPSRELDATPRMTIPYEELSGTRHFKGQAQNYSTLLLEEASARLLVGARGALFSLSANDIGDGAHKEIHWEASPEMQSKCHQKGKNNQTECFNHVRFLQRLNSTHLYACGTHAFQPLCAAIDAEAFTLPTSFEEGKEKCPYDPARGFTGLIIDGGLYTATRYEFRSIPDIRRSRHPHSLRTEETPMHWLNDAEFVFSVLVRESKASAVGDDDKVYYFFTERATEEGSGSFTQSRSSHRVARVARVCKGDLGGKKILQKKWTSFLKARLICHIPLYETLRGVCSLDAETSSRTHFYAAFTLSTQWKTLEASAICRYDLAEIQAVFAGPYMEYQDGSRRWGRYEGGVPEPRPGSCITDSLRSQGYNSSQDLPSLVLDFVKLHPLMARPVVPTRGRPLLLKRNIRYTHLTGTPVTTPAGPTYDLLFLGTADGWIHKAVVLGSGMHIIEETQVFRESQSVENLVISLLQHSLYVGAPSGVIQLPLSSCSRYRSCYDCILARDPYCGWDPGTHACAAATTIANRSQGSRTALIQDIERGNRGCESSRDTGPPPPLKTRSVLRGDDVLLPCDQPSNLARALWLLNGSMGLSDGQGGYRVGVDGLLVTDAQPEHSGNYGCYAEENGLRTLLASYSLTVRPATPAPAPKAPATPGAQLAPDVRLLYVLAIAALGGLCLILASSLLYVACLREGRRGRRRKYSLGRASRAGGSAVQLQTVSGQCPGEEDEGDDEGAGGLEGSCLQIIPGEGAPAPPPPPPPPPPAELTNGLVALPSRLRRMNGNSYVLLRQSNNGVPAGPCSFAEELSRILEKRKHTQLVEQLDESSV

SEQ ID NO: 11943 - protein, 838 aa, Homo sapiens
MWGRLWPLLLSILTATAVPGPSLRRPSRELDATPRMTIPYEELSGTRHFKGQAQNYSTLLLEEASARLLVGARGALFSLSANDIGDGAHKEIHWEASPEMQSKCHQKGKNNQTECFNHVRFLQRLNSTHLYACGTHAFQPLCAAIDAEAFTLPTSFEEGKEKCPYDPARGFTGLIIDGGLYTATRYEFRSIPDIRRSRHPHSLRTEETPMHWLNDAEFVFSVLVRESKASAVGDDDKVYYFFTERATEEGSGSFTQSRSSHRVARVARVCKGDLGGKKILQKKWTSFLKARLICHIPLYETLRGVCSLDAETSSRTHFYAAFTLSTQWKTLEASAICRYDLAEIQAVFAGPYMEYQDGSRRWGRYEGGVPEPRPGSCITDSLRSQGYNSSQDLPSLVLDFVKLHPLMARPVVPTRGRPLLLKRNIRYTHLTGTPVTTPAGPTYDLLFLGTADGWIHKAVVLGSGMHIIEETQVFRESQSVENLVISLLQHSLYVGAPSGVIQLPLSSCSRYRSCYDCILARDPYCGWDPGTHACAAATTIANRTALIQDIERGNRGCESSRDTGPPPPLKTRSVLRGDDVLLPCDQPSNLARALWLLNGSMGLSDGQGGYRVGVDGLLVTDAQPEHSGNYGCYAEENGLRTLLASYSLTVRPATPAPAPKAPATPGAQLAPDVRLLYVLAIAALGGLCLILASSLLYVACLREGRRGRRRKYSLGRASRAGGSAVQLQTVSGQCPGEEDEGDDEGAGGLEGSCLQIIPGEGAPAPPPPPPPPPPAELTNGLVALPSRLRRMNGNSYVLLRQSNNGVPAGPCSFAEELSRILEKRKHTQLVEQLDESSV

SEQ ID NO: 11944 - protein, 702 aa, Homo sapiens
MWGRLWPLLLSILTATAVPGPSLRRPSRELDATPRMTIPYEELSGTRHFKGQAQNYSTLLLEEASARLLVGARGALFSLSANDIGDGAHKEIHWEASPEMQSKCHQKGKNNQTECFNHVRFLQRLNSTHLYACGTHAFQPLCAAIDAEAFTLPTSFEEGKEKCPYDPARGFTGLIIDGGLYTATRYEFRSIPDIRRSRHPHSLRTEETPMHWLNDAEFVFSVLVRESKASAVGDDDKVYYFFTERATEEGSGSFTQSRSSHRVARVARVCKGDLGGKKILQKKWTSFLKARLICHIPLYETLRGVCSLDAETSSRTHFYAAFTLSTQWKTLEASAICRYDLAEIQAVFAGPYMEYQDGSRRWGRYEGGVPEPRPGSCITDSLRSQGYNSSQDLPSLVLDFVKLHPLMARPVVPTRGRPLLLKRNIRYTHLTGTPVTTPAGPTYDLLFLGTADGWIHKAVVLGSGMHIIEETQVFRESQSVENLVISLLQHSLYVGAPSGVIQLPLSSCSRYRSCYDCILARDPYCGWDPGTHACAAATTIANRSQGSRTALIQDIERGNRGCESSRDTGRALQVHMGSMSPPSAWPCVLDGPETRQDLCQPPKPCVHSHAHMEECLSAGLQCPHPHLLLVHSCFIPASGLGVPSQLPHPIWSSSPAPCGDLFVKSLGTGQPGEVRLHHSPPLPSCVALVNQPPHSPWSFSRV

SEQ ID NO: 11945 - protein, 522 aa, Homo sapiens
MWGRLWPLLLSILTATAVPGPSLRRPSRELDATPRMTIPYEELSGTRHFKGQAQNYSTLLLEEASARLLVGARGALFSLSANDIGDGAHKEIHWEASPEMQSKCHQKGKNNQTECFNHVRFLQRLNSTHLYACGTHAFQPLCAAIDAEAFTLPTSFEEGKEKCPYDPARGFTGLIIDGGLYTATRYEFRSIPDIRRSRHPHSLRTEETPMHWLNDAEFVFSVLVRESKASAVGDDDKVYYFFTERATEEGSGSFTQSRSSHRVARVARVCKGDLGGKKILQKKWTSFLKARLICHIPLYETLRGVCSLDAETSSRTHFYAAFTLSTQWKTLEASAICRYDLAEIQAVFAGPYMEYQDGSRRWGRYEGGVPEPRPGSCITDSLRSQGYNSSQDLPSLVLDFVKLHPLMARPVVPTRGRPLLLKRNIRYTHLTGTPVTTPAGPTYDLLFLGTADGWIHKAVVLGSGMHIIEETQVFRESQSVENLVISLLQHSLYVGAPSGVIQLPLSSCSRYRSCYDCILARD

SEQ ID NO: 11946 - protein, 838 aa, Homo sapiens; identical to SEQ ID NO: 11943

SEQ ID NO: 11947 - protein, 132 aa, Homo sapiens
  SITE 1: note = misc_feature - Xaa can be any naturally occurring amino acid
XREGRRGRRRKYSLGRASRAGGSAVQLQTVSGRALQVHMGSMSPPSAWPCVLDGPETRQDLCQPPKPCVHSHAHMEECLSAGLQCPHPHLLLVHSCFIPASGLGVPSQLPHPIWSSSPAPCGDLFVKSLGTG

SEQ ID NO: 11948 - protein, 254 aa, Homo sapiens
MKGTCVIAWLFSSLGLWRLAHPEAQGTTQCQRTEHPVISYKEIGPWLREFRAKNAVDFSQLTFDPGQKELVVGARNYLFRLQLEDLSLIQAVEWECDEATKKACYSKGKSKEECQNYIRVLLVGGDRLFTCGTNAFTPVCTNRSLSNLTEIHDQISGMARCPYSPQHNSTALLTAGGELYAATAMDFPGRDPAIYRSLGILPPLRTAQYNSKWLNEPNFVSSYDIGNFTYFFFRENAVEHDCGKTVFSRAARVC

SEQ ID NO: 11949 - protein, 1074 aa, Homo sapiens
MKGTCVIAWLFSSLGLWRLAHPEAQGTTQCQRTEHPVISYKEIGPWLREFRAKNAVDFSQLTFDPGQKELVVGARNYLFRLQLEDLSLIQAVEWECDEATKKACYSKGKSKEECQNYIRVLLVGGDRLFTCGTNAFTPVCTNRSLSNLTEIHDQISGMARCPYSPQHNSTALLTAGGELYAATAMDFPGRDPAIYRSLGILPPLRTAQYNSKWLNEPNFVSSYDIGNFTYFFFRENAVEHDCGKTVFSRAARVCKNDIGGRFLLEDTWTTFMKARLNCSRPGEVPFYYNELQSTFFLPELDLIYGIFTTNVNSIAASAVCVFNLSAIAQAFSGPFKYQENSRSAWLPYPNPNPHFQCGTVDQGLYVNLTERNLQDAQKFILMHEVVQPVTTVPSFMEDNSRFSHVAVDVVQGREALVHIIYLATDYGTIKKVRVPLNQTSSSCLLEEIELFPERRREPIRSLQILHSQSVLFVGLREHVVKIPLKRCQFYRTRSTCIGAQDPYCGWDVVMKKCTSLEESLSMTQWEQSISACPTRNLTVDGHFGVWSPWTPCTHTDGSAVGSCLCRTRSCDSPAPQCGGWQCEGPGMEIANCSRNGGWTPWTSWSPCSTTCGIGFQVRQRSCSNPTPRHGGRVCVGQNREERYCNEHLLCPPHMFWTGWGPWERCTAQCGGGIQARRRICENGPDCAGCNVEYQSCNTNPCPELKKTTPWTPWTPVNISDNGGHYEQRFRYTCKARLADPNLLEVGRQRIEMRYCSSDGTSGCSTDGLSGDFLRAGRYSAHTVNGAWSAWTSWSQCSRDCSRGIRNRKRVCNNPEPKYGGMPCLGPSLEYQECNILPCPVDGVWSCWSPWTKCSATCGGGHYMRTRSCSNPAPAYGGDICLGLHTEEALCNTQPCPESWSEWSDWSECEASGVQVRARQCILLFPMGSQCSGNTTESRPCVFDSNFIPEVSVARSSSVEEKRCGEFNMFHMIAVGLSSSILGCLLTLLVYTYCQRYQQQSHDATVIHPVSPAPLNTSITNHINKLDKYDSVEAIKAFNKNNLILEERNKYFNPHLTGKTYSNAYFTDLNNYDEY

SEQ ID NO: 11950 - protein, 409 aa, Homo sapiens
MKNASPETREGVIRESYLKGHDQLVPVTLLAIAVILAFVMGAVFSGITVYCVCDHRRKDVAVVQRKEKELTHSRRGSMSSVTKLSGLFGDTQSKDPKPEAILTPLMHNGKLATPGNTAKMLIKADQHHLDLTALPTPESTPTLQQKRKPSRGSREWERNQNLINACTKDMPPMGSPVIPTDLPLRASPSHIPSVVVLPITQQGYQHEYVDQPKMSEVAQMALEDQAATLEYKTIKEHLSSKSPNHGVNLVENLDSLPPKVPQREASLGPPGASLSQTGLSKRLEMHHSSSYGVDYKRSYPTNSLTRSHQATTLKRNNTNSSNSSHLSRNQSFGRGDNPPPAPQRVDSIQVHSSQPSGQAVTVSRQPSLNAYNSLTRSGLKRTPSLKPDVPPKPSFAPLSTSMKPNDACT

SEQ ID NO: 11951 - protein, 457 aa, Homo sapiens
MKTGHSSSLLPSTTTSDSTAQEGYESRGGMLDWKHLLDSPDSTDPLGAVSSHNHQDKKGVIRESYLKGHDQLVPVTLLAIAVILAFVMGAVFSGITVYCVCDHRRKDVAVVQRKEKELTHSRRGSMSSVTKLSGLFGDTQSKDPKPEAILTPLMHNGKLATPGNTAKMLIKADQHHLDLTALPTPESTPTLQQKRKPSRGSREWERNQNLINACTKDMPPMGSPVIPTDLPLRASPSHIPSVVVLPITQQGYQHEYVDQPKMSEVAQMALEDQAATLEYKTIKEHLSSKSPNHGVNLVENLDSLPPKVPQREASLGPPGASLSQTGLSKRLEMHHSSSYGVDYKRSYPTNSLTRSHQATTLKRNNTNSSNSSHLSRNQSFGRGDNPPPAPQRVDSIQVHSSQPSGQAVTVSRQPSLNAYNSLTRSGLKRTPSLKPDVPPKPSFAPLSTSMKPNDACT

SEQ ID NO: 11952 - protein, 114 aa, Homo sapiens
MRSEALLLYFTLLHFAGAGFPEDSEPISISHGNYTKQYPVFVGHKPGRNTTQRHRLDIQMIMIMNGTLYIAARDHIYTVDIDTSHTEEIYCSKKLTWKSRQADVDTCRMKGKHK

SEQ ID NO: 11953 - protein, 159 aa, Homo sapiens
MRSEALLLYFTLLHFAGAGFPEDSEPISISHGNYTKQYPVFVGHKPGRNTTQRHRLDIQMIMIMNGTLYIAARDHIYTVDIDTSHTEEIYCSKKLTWKSRQADVDTCRMKGKHKDECHNFIKVLLKKNDDALFVCGTNAFNPSCRNYKMDTLEPFGDEF

SEQ ID NO: 11954 - protein, 1047 aa, Homo sapiens
MRSEALLLYFTLLHFAGAGFPEDSEPISISHGNYTKQYPVFVGHKPGRNTTQRHRLDIQMIMIMNGTLYIAARDHIYTVDIDTSHTEEIYCSKKLTWKSRQADVDTCRMKGKHKDECHNFIKVLLKKNDDALFVCGTNAFNPSCRNYKMDTLEPFGDEFSGMARCPYDAKHANVALFADGKLYSATVTDFLAIDAVIYRSLGESPTLRTVKHDSKWLKEPYFVQAVDYGDYIYFFFREIAVEYNTMGKVVFPRVAQVCKNDMGGSQRVLEKQWTSFLKARLNCSVPGDSHFYFNILQAVTDVIRINGRDVVLATFSTPYNSIPGSAVCAYDMLDIASVFTGRFKEQKSPDSTWTPVPDERVPKPRPGCCAGSSSLERYATSNEFPDDTLNFIKTHPLMDEAVPSIFNRPWFLRTMVRYRLTKIAVDTAAGPYQNHTVVFLGSEKGIILKFLARIGNSGFLNDSLFLEEMSVYNSEKCSYDGVEDKRIMGMQLDRASSSLYVAFSTCVIKVPLGRCERHGKCKKTCIASRDPYCGWIKEGGACSHLSPNSRLTFEQDIERGNTDGLGDCHNSFVALNDISTPLPDNEMSYNTVYGHSSSLLPSTTTSDSTAQEGYESRGGMLDWKHLLDSPDSTDPLGAVSSHNHQDKKGVIRESYLKGHDQLVPVTLLAIAVILAFVMGAVFSGITVYCVCDHRRKDVAVVQRKEKELTHSRRGSMSSVTKLSGLFGDTQSKDPKPEAILTPLMHNGKLATPGNTAKMLIKADQHHLDLTALPTPESTPTLQQKRKPSRGSREWERNQNLINACTKDMPPMGSPVIPTDLPLRASPSHIPSVVVLPITQQGYQHEYVDQPKMSEVAQMALEDQAATLEYKTIKEHLSSKSPNHGVNLVENLDSLPPKVPQREASLGPPGASLSQTGLSKRLEMHHSSSYGVDYKRSYPTNSLTRSHQATTLKRNNTNSSNSSHLSRNQSFGRGDNPPPAPQRVDSIQVHSSQPSGQAVTVSRQPSLNAYNSLTRSGLKRTPSLKPDVPPKPSFAPLSTSMKPNDACT

SEQ ID NO: 11955 - protein, 1030 aa, Homo sapiens
MRSEALLLYFTLLHFAGAGFPEDSEPISISHGNYTKQYPVFVGHKPGRNTTQRHRLDIQMIMIMNGTLYIAARDHIYTVDIDTSHTEEIYCSKKLTWKSRQADVDTCRMKGKHKDECHNFIKVLLKKNDDALFVCGTNAFNPSCRNYKMDTLEPFGDEFSGMARCPYDAKHANVALFADGKLYSATVTDFLAIDAVIYRSLGESPTLRTVKHDSKWLKEPYFVQAVDYGDYIYFFFREIAVEYNTMGKVVFPRVAQVCKNDMGGSQRVLEKQWTSFLKARLNCSVPGDSHFYFNILQAVTDVIRINGRDVVLATFSTPYNSIPGSAVCAYDMLDIASVFTGRFKEQKSPDSTWTPVPDERVPKPRPGCCAGSSSLERYATSNEFPDDTLNFIKTHPLMDEAVPSIFNRPWFLRTMVRYRLTKIAVDTAAGPYQNHTVVFLGSEKGIILKFLARIGNSGFLNDSLFLEEMSVYNSEKCSYDGVEDKRIMGMQLDRASSSLYVAFSTCVIKVPLGRCERHGKCKKTCIASRDPYCGWIKEGGACSHLSPNSRLTFEQDIERGNTDGLGDCHNSFVALNGHSSSLLPSTTTSDSTAQEGYESRGGMLDWKHLLDSPDSTDPLGAVSSHNHQDKKGVIRESYLKGHDQLVPVTLLAIAVILAFVMGAVFSGITVYCVCDHRRKDVAVVQRKEKELTHSRRGSMSSVTKLSGLFGDTQSKDPKPEAILTPLMHNGKLATPGNTAKMLIKADQHHLDLTALPTPESTPTLQQKRKPSRGSREWERNQNLINACTKDMPPMGSPVIPTDLPLRASPSHIPSVVVLPITQQGYQHEYVDQPKMSEVAQMALEDQAATLEYKTIKEHLSSKSPNHGVNLVENLDSLPPKVPQREASLGPPGASLSQTGLSKRLEMHHSSSYGVDYKRSYPTNSLTRSHQATTLKRNNTNSSNSSHLSRNQSFGRGDNPPPAPQRVDSIQVHSSQPSGQAVTVSRQPSLNAYNSLTRSGLKRTPSLKPDVPPKPSFAPLSTSMKPNDACT

SEQ ID NO: 11956 - protein, 1030 aa, Homo sapiens; identical to SEQ ID NO: 11955

SEQ ID NO: 11957 - protein, 545 aa, Homo sapiens
  SITE 1: note = misc_feature - Xaa can be any naturally occurring amino acid
XYQNHTVVFLGSEKGIILKFLARIGNSGFLNDSLFLEEMSVYNSEKCSYDGVEDKRIMGMQLDRASSSLYVAFSTCVIKVPLGRCERHGKCKKTCIASRDPYCGWIKEGGACSHLSPNSRLTFEQDIERGNTDGLGDCHNSFVALNGVIRESYLKGHDQLVPVTLLAIAVILAFVMGAVFSGITVYCVCDHRRKDVAVVQRKEKELTHSRRGSMSSVTKLSGLFGDTQSKDPKPEAILTPLMHNGKLATPGNTAKMLIKADQHHLDLTALPTPESTPTLQQKRKPSRGSREWERNQNLINACTKDMPPMGSPVIPTDLPLRASPSHIPSVVVLPITQQGYQHEYVDQPKMSEVAQMALEDQAATLEYKTIKEHLSSKSPNHGVNLVENLDSLPPKVPQREASLGPPGASLSQTGLSKRLEMHHSSSYGVDYKRSYPTNSLTRSHQATTLKRNNTNSSNSSHLSRNQSFGRGDNPPPAPQRVDSIQVHSSQPSGQAVTVSRQPSLNAYNSLTRSGLKRTPSLKPDVPPKPSFAPLSTSMKPNDACT

SEQ ID NO: 11958 - protein, 930 aa, Homo sapiens
MPRAPHFMPLLLLLLLLSLPHTQAAFPQDPLPLLISDLQGTSPLSWFRGLEDDAVAAELGLDFQRFLTLNRTLLVAARDHVFSFDLQAEEEGEGLVPNKYLTWRSQDVENCAVRGKLTDECYNYIRVLVPWDSQTLLACGTNSFSPVCRSYGITSLQQEGEELSGQARCPFDATQSNVAIFAEGSLYSATAADFQASDAVVYRSLGPQPPLRSAKYDSKWLREPHFVQALEHGDHVYFFFREVSVEDARLGRVQFSRVARVCKRDMGGSPRALDRHWTSFLKLRLNCSVPGDSTFYFDVLQALTGPVNLHGRSALFGVFTTQTNSIPGSAVCAFYLDEIERGFEGKFKEQRSLDGAWTPVSEDRVPSPRPGSCAGVGGAALFSSSRDLPDDVLTFIKAHPLLDPAVPPVTHQPLLTLTSRALLTQVAVDGMAGPHSNITVMFLGSNDGTVLKVLTPGGRSGGPEPILLEEIDAYSPARCSGKRTAQTARRIIGLELDTEGHRLFVAFSGCIVYLPLSRCARHGACQRSCLASQDPYCGWHSSRGCVDIRGSGGTDVDQAGNQESMEHGDCQDGATGSQSGPGDSAYGVRRDLPPASASRSVPIPLLLASVAAAFALGASVSGLLVSCACRRAHRRRGKDIETPGLPRPLSLRSLARLHGGGPEPPPPSKDGDAVQTPQLYTTFLPPPEGVPPPELACLPTPESTPELPVKHLRAAGDPWEWNQNRNNAKEGPGRSRGGHAAGGPAPRVLVRPPPPGCPGQAVEVTTLEELLRYLHGPQPPRKGAEPPAPLTSRALPPEPAPALLGGPSPRPHECASPLRLDVPPEGRCASAPARPALSAPAPRLGVGGGRRLPFSGHRAPPALLTRVPSGGPSRYSGGPGKHLLYLGRPEGYRGRALKRVDVEKPQLSLKPPLVGPSSRQAVPNGGRFNF

SEQ ID NO: 11959 - protein, 930 aa, Homo sapiens; identical to SEQ ID NO: 11958

SEQ ID NO: 11960 - protein, 962 aa, Homo sapiens
MPRAPHFMPLLLLLLLLSLPHTQAAFPQDPLPLLISDLQGTSPLSWFRGLEDDAVAAELGLDFQRFLTLNRTLLVAARDHVFSFDLQAEEEGEGLVPNKYLTWRSQDVENCAVRGKLTDECYNYIRVLVPWDSQTLLACGTNSFSPVCRSYGITSLQQEGEELSGQARCPFDATQSNVAIFAEGSLYSATAADFQASDAVVYRSLGPQPPLRSAKYDSKWLREPHFVQALEHGDHVYFFFREVSVEDARLGRVQFSRVARVCKRDMGGSPRALDRHWTSFLKLRLNCSVPGDSTFYFDVLQALTGPVNLHGRSALFGVFTTQTNSIPGSAVCAFYLDEIERGFEGKFKEQRSLDGAWTPVSEDRVPSPRPGSCAGVGGAALFSSSRDLPDDVLTFIKAHPLLDPAVPPVTHQPLLTLTSRALLTQVAVDGMAGPHSNITVMFLGSNDGTVLKVLTPGGRSGGPEPILLEEIDAYSPARCSGKRTAQTARRIIGLELDTEGHRLFVAFSGCIVYLPLSRCARHGACQRSCLASQDPYCGWHSSRGCVDIRGSGGTDVDQAGNQESMEHGDCQDGATGSQSGPGDSAYVLPGPGPSPGTPSPPSDAHPRPQSSTLGVHTRGVRRDLPPASASRSVPIPLLLASVAAAFALGASVSGLLVSCACRRAHRRRGKDIETPGLPRPLSLRSLARLHGGGPEPPPPSKDGDAVQTPQLYTTFLPPPEGVPPPELACLPTPESTPELPVKHLRAAGDPWEWNQNRNNAKEGPGRSRGGHAAGGPAPRVLVRPPPPGCPGQAVEVTTLEELLRYLHGPQPPRKGAEPPAPLTSRALPPEPAPALLGGPSPRPHECASPLRLDVPPEGRCASAPARPALSAPAPRLGVGGGRRLPFSGHRAPPALLTRVPSGGPSRYSGGPGKHLLYLGRPEGYRGRALKRVDVEKPQLSLKPPLVGPSSRQAVPNGGRFNF

SEQ ID NO: 11961 - protein, 537 aa, Homo sapiens [sequence omitted]

SEQ ID NO: 11962 - protein, 537 aa, Homo sapiens
MPRAPHFMPLLLLLLLLSLPHTQAAFPQDPLPLLISDLQGTSPLSWFRGLEDDAVAAELGLDFQRFLTLNRTLLVAARDHVFSFDLQAEEEGEGLVPNKYLTWRSQDVENCAVRGKLTDECYNYIRVLVPWDSQTLLACGTNSFSPVCRSYGITSLQQEGEELSGQARCPFDATQSNVAIFAEGSLYSATAADFQASDAVVYRSLGPQPPLRSAKYDSKWLREPHFVQALEHGDHVYFFFREVSVEDARLGRVQFSRVARVCKRDMGGSPRALDRHWTSFLKLRLNCSVPGDSTFYFDVLQALTGPVNLHGRSALFGVFTTQTNSIPGSAVCAFYLDEIERGFEGKFKEQRSLDGAWTPVSEDRVPSPRPGSCPAHSSPLGRSLQVLRGSREAPPVPGPARGLPGPRPEKGGRREAPVVPEASPRRALLPPGRPERRPFQLLKGAAHGLQRGERPSPLGHELDALQDVSPPPRPAPPAFPTRRVSRGPFSPRVYLLTVFPPVLDRRVGGEKPVSSVSQHFRGSWRTPTPRSLPAKLP

SEQ ID NO: 11963 - protein, 922 aa, Homo sapiens
MPRAPHFMPLLLLLLLLSLPHTQAAFPQDPLPLLISDLQGTSPLSWFRGLEDDAVAAELGLDFQRFLTLNRTLLVAARDHVFSFDLQAEEEGEGLVPNKYLTWRSQDVENCAVRGKLTDECYNYIRVLVPWDSQTLLACGTNSFSPVCRSYGITSLQQEGEELSGQARCPFDATQSNVAIFAEPHFVQALEHGDHVYFFFREVSVEDARLGRVQFSRVARVCKRDMGGSPRALDRHWTSFLKLRLNCSVPGDSTFYFDVLQALTGPVNLHGRSALFGVFTTQTNSIPGSAVCAFYLDEIERGFEGKFKEQRSLDGAWTPVSEDRVPSPRPGSCAGVGGAALFSSSRDLPDDVLTFIKAHPLLDPAVPPVTHQPLLTLTSRALLTQVAVDGMAGPHSNITVMFLGSNDGTVLKVLTPGGRSGGPEPILLEEIDAYSPARCSGKRTAQTARRIIGLELDTEGHRLFVAFSGCIVYLPLSRCARHGACQRSCLASQDPYCGWHSSRGCVDIRGSGGTDVDQAGNQESMEHGDCQDGATGSQSGPGDSAYVLPGPGPSPGTPSPPSDAHPRPQSSTLGVHTRGVRRDLPPASASRSVPIPLLLASVAAAFALGASVSGLLVSCACRRAHRRRGKDIETPGLPRPLSLRSLARLHGGGPEPPPPSKDGDAVQTPQLYTTFLPPPEGVPPPELACLPTPESTPELPVKHLRAAGDPWEWNQNRNNAKEGPGRSRGGHAAGGPAPRVLVRPPPPGCPGQAVEVTTLEELLRYLHGPQPPRKGAEPPAPLTSRALPPEPAPALLGGPSPRPHECASPLRLDVPPEGRCASAPARPALSAPAPRLGVGGGRRLPFSGHRAPPALLTRVPSGGPSRYSGGPGKHLLYLGRPEGYRGRALKRVDVEKPQLSLKPPLVGPSSRQAVPNGGRFNF

SEQ ID NO: 11964 - protein, 22 aa, Homo sapiens
MRVFLLCAYILLLMVSQLRAVS

SEQ ID NO: 11965 - protein, 148 aa, Homo sapiens
MRVFLLCAYILLLMVSQLRAVSFPEDDEPLNTVDYHYSRQYPVFRGRPSGNESQHRLDFQLMLKIRDTLYIAGRDQVYTVNLNEMPKTEVIPNKKLTWRSRQQDRENCAMKGKHKDECHNFIKVFVPRNDEMVFVCGTNAFNPMCRYY

SEQ ID NO: 11966 - protein, 219 aa, Homo sapiens
MRVFLLCAYILLLMVSQLRAVSFPEDDEPLNTVDYHYSRQYPVFRGRPSGNESQHRLDFQLMLKIRDTLYIAGRDQVYTVNLNEMPKTEVIPNKKLTWRSRQQDRENCAMKGKHKDECHNFIKVFVPRNDEMVFVCGTNAFNPMCRYYRLSTLEYDGEEISGLARCPFDARQTNVALFADGKLYSATVADFLASDAVIYRSMGDGSALRTIKYDSKWIK

SEQ ID NO: 11967 - protein, 1073 aa, Homo sapiens
MRVFLLCAYILLLMVSQLRAVSFPEDDEPLNTVDYHYSRQYPVFRGRPSGNESQHRLDFQLMLKIRDTLYIAGRDQVYTVNLNEMPKTEVIPNKKLTWRSRQQDRENCAMKGKHKDECHNFIKVFVPRNDEMVFVCGTNAFNPMCRYYRLSTLEYDGEEISGLARCPFDARQTNVALFADGKLYSATVADFLASDAVIYRSMGDGSALRTIKYDSKWIKEPHFLHAIEYGNYVYFFFREIAVEHNNLGKAVYSRVARICKNDMGGSQRVLEKHWTSFLKARLNCSVPGDSFFYFDVLQSITDIIQINGIPTVVGVFTTQLNSIPGSAVCAFSMDDIEKVFKGRFKEQKTPDSVWTAVPEDKVPKPRPGCCAKHGLAEAYKTSIDFPDETLSFIKSHPLMDSAVPPIADEPWFTKTRVRYRLTAISVDHSAGPYQNYTVIFVGSEAGMVLKVLAKTSPFSLNDSVLLEEIEAYNHAKCSAENEEDKKVISLQLDKDHHALYVAFSSCIIRIPLSRCERYGSCKKSCIASRDPYCGWLSQGSCGRVTPGMLAEGYEQDTEFGNTAHLGDCHEILPTSTTPDYKIFGGPTSDMEVSSSSVTTMASIPEITPKVIDTWRPKLTSSRKFVVQDDPNTSDFTDPLSGIPKGVRWEVQSGESNQMVHMNVLITCVFAAFVLGAFIAGVAVYCYRDMFVRKNRKIHKDAESAQSCTDSSGSFAKLNGLFDSPVKEYQQNIDSPKLYSNLLTSRKELPPNGDTKSMVMDHRGQPPELAALPTPESTPVLHQKTLQAMKSHSEKAHGHGASRKETPQFFPSSPPPHSPLSHGHIPSAIVLPNATHDYNTSFSNSNAHKAEKKLQNIDHPLTKSSSKRDHRRSVDSRNTLNDLLKHLNDPNSNPKAIMGDIQMAHQNLMLDPMGSMSEVPPKVPNREASLYSPPSTLPRNSPTKRVDVPTTPGVPMTSLERQRGYHKNSSQRHSISAMPKNLNSPNGVLLSRQPSMNRGGYMPTPTGAKVDYIQGTPVSVHLQPSLSRQSSYTSNGTLPRTGLKRTPSLKPDVPPKPSFVPQTPSVRPLNKYTY

SEQ ID NO: 11968 - protein, 597 aa, Homo sapiens
MRVFLLCAYILLLMVSQLRAVSFPEDDEPLNTVDYHYSRQYPVFRGRPSGNESQHRLDFQLMLKIRDTLYIAGRDQVYTVNLNEMPKTEVIPNKKLTWRSRQQDRENCAMKGKHKDECHNFIKVFVPRNDEMVFVCGTNAFNPMCRYYRLSTLEYDGEEISGLARCPFDARQTNVALFADGKLYSATVADFLASDAVIYRSMGDGSALRTIKYDSKWIKEPHFLHAIEYGNYVYFFFREIAVEHNNLGKAVYSRVARICKNDMGGSQRVLEKHWTSFLKARLNCSVPGDSFFYFDVLQSITDIIQINGIPTVVGVFTTQLNSIPGSAVCAFSMDDIEKVFKGRFKEQKTPDSVWTAVPEDKVPKPRPGCCAKHGLAEAYKTSIDFPDETLSFIKSHPLMDSAVPPIADEPWFTKTRVRYRLTAISVDHSAGPYQNYTVIFVGSEAGMVLKVLAKTSPFSLNDSVLLEEIEAYNHAKCSAENEEDKKVISLQLDKDHHALYVAFSSCIIRIPLSRCERYGSCKKSCIASRDPYCGWLSQGSCGRVTPGMLAEGYEQDTEFGNTAHLGDCHDMEVSSSSVTTMVYDGKSSLESPTRWST

SEQ ID NO: 11969 - protein, 1011 aa, Homo sapiens
MRVFLLCAYILLLMVSQLRAVSFPEDDEPLNTVDYHYSRQYPVFRGRPSGNESQHRLDFQLMLKIRDTLYIAGRDQVYTVNLNEMPKTEVIPNKKLTWRSRQQDRENCAMKGKHKDECHNFIKVFVPRNDEMVFVCGTNAFNPMCRYYRLSTLEYDGEEISGLARCPFDARQTNVALFADGKLYSATVADFLASDAVIYRSMGDGSALRTIKYDSKWIKEPHFLHAIEYGNYVYFFFREIAVEHNNLGKAVYSRVARICKNDMGGSQRVLEKHWTSFLKARLNCSVPGDSFFYFDVLQSITDIIQINGIPTVVGVFTTQLNSIPGSAVCAFSMDDIEKVFKGRFKEQKTPDSVWTAVPEDKVPKPRPGCCAKHGLAEAYKTSIDFPDETLSFIKSHPLMDSAVPPIADEPWFTKTRVRYRLTAISVDHSAGPYQNYTVIFVGSEAGMVLKVLAKTSPFSLNDSVLLEEIEAYNHAKCSAENEEDKKVISLQLDKDHHALYVAFSSCIIRIPLSRCERYGSCKKSCIASRDPYCGWLSQGSCGRVTPGMLLLTEDFFAFHNHSAEGYEQDTEFGNTAHLGDCHGVRWEVQSGESNQMVHMNVLITCVFAAFVLGAFIAGVAVYCYRDMFVRKNRKIHKDAESAQSCTDSSGSFAKLNGLFDSPVKEYQQNIDSPKLYSNLLTSRKELPPNGDTKSMVMDHRGQPPELAALPTPESTPVLHQKTLQAMKSHSEKAHGHGASRKETPQFFPSSPPPHSPLSHGHIPSAIVLPNATHDYNTSFSNSNAHKAEKKLQNIDHPLTKSSSKRDHRRSVDSRNTLNDLLKHLNDPNSNPKAIMGDIQMAHQNLMLDPMGSMSEVPPKVPNREASLYSPPSTLPRNSPTKRVDVPTTPGVPMTSLERQRGYHKNSSQRHSISAMPKNLNSPNGVLLSRQPSMNRGGYMPTPTGAKVDYIQGTPVSVHLQPSLSRQSSYTSNGTLPRTGLKRTPSLKPDVPPKPSFVPQTPSVRPLNKYTY

SEQ ID NO: 11970 - protein, 1017 aa, Homo sapiens
MRVFLLCAYILLLMVSQLRAVSFPEDDEPLNTVDYHYSRQYPVFRGRPSGNESQHRLDFQLMLKIRDTLYIAGRDQVYTVNLNEMPKTEVIPNKKLTWRSRQQDRENCAMKGKHKDECHNFIKVFVPRNDEMVFVCGTNAFNPMCRYYRLSTLEYDGEEISGLARCPFDARQTNVALFADGKLYSATVADFLASDAVIYRSMGDGSALRTIKYDSKWIKEPHFLHAIEYGNYVYFFFREIAVEHNNLGKAVYSRVARICKNDMGGSQRVLEKHWTSFLKARLNCSVPGDSFFYFDVLQSITDIIQINGIPTVVGVFTTQLNSIPGSAVCAFSMDDIEKVFKGRFKEQKTPDSVWTAVPEDKVPKPRPGCCAKHGLAEAYKTSIDFPDETLSFIKSHPLMDSAVPPIADEPWFTKTRVRYRLTAISVDHSAGPYQNYTVIFVGSEAGMVLKVLAKTSPFSLNDSVLLEEIEAYNHAKCSAENEEDKKVISLQLDKDHHALYVAFSSCIIRIPLSRCERYGSCKKSCIASRDPYCGWLSQGSCGRVTPGMLAEGYEQDTEFGNTAHLGDCHEILPTSTTPDYKIFGGPTSGVRWEVQSGESNQMVHMNVLITCVFAAFVLGAFIAGVAVYCYRDMFVRKNRKIHKDAESAQSCTDSSGSFAKLNGLFDSPVKEYQQNIDSPKLYSNLLTSRKELPPNGDTKSMVMDHRGQPPELAALPTPESTPVLHQKTLQAMKSHSEKAHGHGASRKETPQFFPSSPPPHSPLSHGHIPSAIVLPNATHDYNTSFSNSNAHKAEKKLQNIDHPLTKSSSKRDHRRSVDSRNTLNDLLKHLNDPNSNPKAIMGDIQMAHQNLMLDPMGSMSEVPPKVPNREASLYSPPSTLPRNSPTKRVDVPTTPGVPMTSLERQRGYHKNSSQRHSISAMPKNLNSPNGVLLSRQPSMNRGGYMPTPTGAKVDYIQGTPVSVHLQPSLSRQSSYTSNGTLPRTGLKRTPSLKPDVPPKPSFVPQTPSVRPLNKYTY

SEQ ID NO: 11971 - protein, 476 aa, Homo sapiens
MRVFLLCAYILLLMVSQLRAVSFPEDDEPLNTVDYHYSRQYPVFRGRPSGNESQHRLDFQLMLKIRDTLYIAGRDQVYTVNLNEMPKTEVIPNKKLTWRSRQQDRENCAMKGKHKDECHNFIKVFVPRNDEMVFVCGTNAFNPMCRYYRLSTLEYDGEEISGLARCPFDARQTNVALFADGKLYSATVADFLASDAVIYRSMGDGSALRTIKYDSKWIKEPHFLHAIEYGNYVYFFFREIAVEHNNLGKAVYSRVARICKNDMGGSQRVLEKHWTSFLKARLNCSVPGDSFFYFDVLQSITDIIQINGIPTVVGVFTTQLNSIPGSAVCAFSMDDIEKVFKGRFKEQKTPDSVWTAVPEDKVPKPRPGCCAKHGLAEAYKTSIDFPDETLSFIKSHPLMDSAVPPIADEPWFTKTRVRYRLTAISVDHSAGPYQNYTVIFVGSEAGMVLKVLAKTSPFSLNDSVLLEEIEAYNHAK

SEQ ID NO: 11972 - protein, 998 aa, Homo sapiens
MRVFLLCAYILLLMVSQLRAVSFPEDDEPLNTVDYHYSRQYPVFRGRPSGNESQHRLDFQLMLKIRDTLYIAGRDQVYTVNLNEMPKTEVIPNKKLTWRSRQQDRENCAMKGKHKDECHNFIKVFVPRNDEMVFVCGTNAFNPMCRYYRLSTLEYDGEEISGLARCPFDARQTNVALFADGKLYSATVADFLASDAVIYRSMGDGSALRTIKYDSKWIKEPHFLHAIEYGNYVYFFFREIAVEHNNLGKAVYSRVARICKNDMGGSQRVLEKHWTSFLKARLNCSVPGDSFFYFDVLQSITDIIQINGIPTVVGVFTTQLNSIPGSAVCAFSMDDIEKVFKGRFKEQKTPDSVWTAVPEDKVPKPRPGCCAKHGLAEAYKTSIDFPDETLSFIKSHPLMDSAVPPIADEPWFTKTRVRYRLTAISVDHSAGPYQNYTVIFVGSEAGMVLKVLAKTSPFSLNDSVLLEEIEAYNHAKCSAENEEDKKVISLQLDKDHHALYVAFSSCIIRIPLSRCERYGSCKKSCIASRDPYCGWLSQGSCGRVTPGMLAEGYEQDTEFGNTAHLGDCHGVRWEVQSGESNQMVHMNVLITCVFAAFVLGAFIAGVAVYCYRDMFVRKNRKIHKDAESAQSCTDSSGSFAKLNGLFDSPVKEYQQNIDSPKLYSNLLTSRKELPPNGDTKSMVMDHRGQPPELAALPTPESTPVLHQKTLQAMKSHSEKAHGHGASRKETPQFFPSSPPPHSPLSHGHIPSAIVLPNATHDYNTSFSNSNAHKAEKKLQNIDHPLTKSSSKRDHRRSVDSRNTLNDLLKHLNDPNSNPKAIMGDIQMAHQNLMLDPMGSMSEVPPKVPNREASLYSPPSTLPRNSPTKRVDVPTTPGVPMTSLERQRGYHKNSSQRHSISAMPKNLNSPNGVLLSRQPSMNRGGYMPTPTGAKVDYIQGTPVSVHLQPSLSRQSSYTSNGTLPRTGLKRTPSLKPDVPPKPSFVPQTPSVRPLNKYTY

SEQ ID NO: 11973 - protein, 1073 aa, Homo sapiens; identical to SEQ ID NO: 11967

SEQ ID NO: 11974 - protein, 597 aa, Homo sapiens; identical to SEQ ID NO: 11968

SEQ ID NO: 11975 - protein, 1011 aa, Homo sapiens; identical to SEQ ID NO: 11969

SEQ ID NO: 11976 - protein, 54 aa, Homo sapiens
  SITE 1: note = misc_feature - Xaa can be any naturally occurring amino acid
XLLTEDFFAFHNHSAEGYEQDTEFGNTAHLGDCHEILPTSTTPDYKIFGGPTSG

SEQ ID NO: 11977 - protein, 198 aa, Homo sapiens
  SITE 1: note = misc_feature - Xaa can be any naturally occurring amino acid
XLTEDFFAFHNHSAEGYEQDTEFGNTAHLGDCHEILPTSTTPDYKIFGGPTSDMEVSSSSVTTMASIPEITPKVIDTWRPKLTSSRKFVVQDDPNTSDFTDPLSGIPKGVRWEVQSGESNQMVHMNVLITCVFAAFVLGAFIAGVAVYCYRDMFVRKNRKIHKDAESAQSCTDSSGSFAKLNGLFDSPVKEYQQNIDS

SEQ ID NO: 11978 - protein, 462 aa, Homo sapiens
MKPNIIFVLSLLLILEKQAAVMGQKGGSKGRLPSEFSQFPHGQKGQHYSGQKGKQQTESKGSFSIQYTYHVDANDHDQSRKSQQYDLNALHKTTKSQRHLGGSQQLLHNKQEGRDHDKSKGHFHRVVIHHKGGKAHRGTQNPSQDQGNSPSGKGISSQYSNTEERLWVHGLSKEQTSVSGAQKGRKQGGSQSSYVLQTEELVANKQQRETKNSHQNKGHYQNVVEVREEHSSKVQTSLCPAHQDKLQHGSKDIFSTQDELLVYNKNQHQTKNLNQDQQHGRKANKISYQSSSTEERRLHYGENGVQKDVSQSSIYSQTEEKAQGKSQKQITIPSQEQEHSQKANKISYQSSSTEERRLHYGENGVQKDVSQRSIYSQTEKLVAGKSQIQAPNPKQEPWHGENAKGESGQSTNREQDLLSHEQKGRHQHGSHGGLDIVIIEQEDDSDRHLAQHLNNDRNPLFT

SEQ ID NO: 11979 - protein, 582 aa, Homo sapiens
MKSIILFVLSLLLILEKQAAVMGQKGGSKGQLPSGSSQFPHGQKGQHYFGQKDQQHTKSKGSFSIQHTYHVDINDHDWTRKSQQYDLNALHKATKSKQHLGGSQQLLNYKQEGRDHDKSKGHFHMIVIHHKGGQAHHGTQNPSQDQGNSPSGKGLSSQCSNTEKRLWVHGLSKEQASASGAQKGRTQGGSQSSYVLQTEELVVNKQQRETKNSHQNKGHYQNVVDVREEHSSKLQTSLHPAHQDRLQHGPKDIFTTQDELLVYNKNQHQTKNLSQDQEHGRKAHKISYPSSRTEERQLHHGEKSVQKDVSKGSISIQTEEKIHGKSQNQVTIHSQDQEHGHKENKISYQSSSTEERHLNCGEKGIQKGVSKGSISIQTEEQIHGKSQNQVRIPSQAQEYGHKENKISYQSSSTEERRLNSGEKDVQKGVSKGSISIQTEEKIHGKSQNQVTIPSQDQEHGHKENKMSYQSSSTEERRLNYGGKSTQKDVSQSSISFQIEKLVEGKSQIQTPNPNQDQWSGQNAKGKSGQSADSKQDLLSHEQKGRYKQESSESHNIVITEHEVAQDDHLTQQYNEDRNPIST

SEQ ID NO: 11980 - protein, 57 aa, Homo sapiens
MADTPRDAGLKQAPASRNEKAPVDFGYVGIDSILEQMRRKAMKQGFEFNIMVVERLG

SEQ ID NO: 11981 - protein, 104 aa, Homo sapiens
MADTPRDAGLKQAPASRNEKAPVDFGYVGIDSILEQMRRKAMKQGFEFNIMVVGQSGLGKSTLINTLFKSKISRKSVQPTSEERIPKTIEIKSITHDIEEKGVR

SEQ ID NO: 11982 - protein, 108 aa, Homo sapiens
MADTPRDAGLKQAPASRNEKAPVDFGYVGIDSILEQMRRKAMKQGFEFNIMVVGQSGLGKSTLINTLFKSKISRKSVQPTSEERIPKTIEIKSITHDIEEKGVRMKLT

SEQ ID NO: 11983 - protein, 116 aa, Homo sapiens
MADTPRDAGLKQAPASRNEKAPVDFGYVGIDSILEQMRRKAMKQGFEFNIMVVGQSGLGKSTLINTLFKSKISRKSVQPTSEERIPKTIEIKSITHDIEEKGVRMKLTVIDTPGFG

SEQ ID NO: 11984 - protein, 127 aa, Homo sapiens
MADTPRDAGLKQAPASRNEKAPVDFGYVGIDSILEQMRRKAMKQGFEFNIMVVGQSGLGKSTLINTLFKSKISRKSVQPTSEERIPKTIEIKSITHDIEEKGVRMKLTVIDTPGFGDHINNENCWQP

SEQ ID NO: 11985 - protein, 135 aa, Homo sapiens
MADTPRDAGLKQAPASRNEKAPVDFGYVGIDSILEQMRRKAMKQGFEFNIMVVGQSGLGKSTLINTLFKSKISRKSVQPTSEERIPKTIEIKSITHDIEEKGVRMKLTVIDTPGFGDHINNENCWQPIMKFINDQ

SEQ ID NO: 11986 - protein, 144 aa, Homo sapiens
MADTPRDAGLKQAPASRNEKAPVDFGYVGIDSILEQMRRKAMKQGFEFNIMVVGQSGLGKSTLINTLFKSKISRKSVQPTSEERIPKTIEIKSITHDIEEKGVRMKLTVIDTPGFGDHINNENCWQPIMKFINDQYEKYLQEEV

SEQ ID NO: 11987 - protein, 151 aa, Homo sapiens
MADTPRDAGLKQAPASRNEKAPVDFGYVGIDSILEQMRRKAMKQGFEFNIMVVGQSGLGKSTLINTLFKSKISRKSVQPTSEERIPKTIEIKSITHDIEEKGVRMKLTVIDTPGFGDHINNENCWQPIMKFINDQYEKYLQEEVNINRKKR

SEQ ID NO: 11988 - protein, 157 aa, Homo sapiens
MADTPRDAGLKQAPASRNEKAPVDFGYVGIDSILEQMRRKAMKQGFEFNIMVVGQSGLGKSTLINTLFKSKISRKSVQPTSEERIPKTIEIKSITHDIEEKGVRMKLTVIDTPGFGDHINNENCWQPIMKFINDQYEKYLQEEVNINRKKRIPDTRV

SEQ ID NO: 11989 - protein, 165 aa, Homo sapiens
MADTPRDAGLKQAPASRNEKAPVDFGYVGIDSILEQMRRKAMKQGFEFNIMVVGQSGLGKSTLINTLFKSKISRKSVQPTSEERIPKTIEIKSITHDIEEKGVRMKLTVIDTPGFGDHINNENCWQPIMKFINDQYEKYLQEEVNINRKKRIPDTRVHCCLYFIP

SEQ ID NO: 11990 - protein, 195 aa, Homo sapiens
MADTPRDAGLKQAPASRNEKAPVDFGYVGIDSILEQMRRKAMKQGFEFNIMVVGQSGLGKSTLINTLFKSKISRKSVQPTSEERIPKTIEIKSITHDIEEKGVRMKLTVIDTPGFGDHINNENCWQPIMKFINDQYEKYLQEEVNINRKKRIPDTRVHCCLYFIPATGHSLRPLDIEFMKRLSKVVNIVPVIAKA

SEQ ID NO: 11991 - protein, 209 aa, Homo sapiens
MADTPRDAGLKQAPASRNEKAPVDFGYVGIDSILEQMRRKAMKQGFEFNIMVVGQSGLGKSTLINTLFKSKISRKSVQPTSEERIPKTIEIKSITHDIEEKGVRMKLTVIDTPGFGDHINNENCWQPIMKFINDQYEKYLQEEVNINRKKRIPDTRVHCCLYFIPATGHSLRPLDIEFMKRLSKVVNIVPVIAKADTLTLEERVHFKQR

SEQ ID NO: 11992 - protein, 209 aa, Homo sapiens; identical to SEQ ID NO: 11991

SEQ ID NO: 11993 - protein, 335 aa, Homo sapiens
MADTPRDAGLKQAPASRNEKAPVDFGYVGIDSILEQMRRKAMKQGFEFNIMVVGQSGLGKSTLINTLFKSKISRKSVQPTSEERIPKTIEIKSITHDIEEKGVRMKLTVIDTPGFGDHINNENCWQPIMKFINDQYEKYLQEEVNINRKKRIPDTRVHCCLYFIPATGHSLRPLDIEFMKRLSKVVNIVPVIAKADTLTLEERVHFKQRITADLLSNGIDVYPQKEFDEDSEDRLVNEKFREMIPFAVVGSDHEYQVNGKRILGRKTKWGTIEVENTTHCEFAYLRDLLIRTHMQNIKDITSSIHFEAYRVKRLNEGSSAMANGMEEKEPEAPEM

SEQ ID NO: 11994 - protein, 335 aa, Homo sapiens; identical to SEQ ID NO: 11993

SEQ ID NO: 11995 - protein, 335 aa, Homo sapiens; identical to SEQ ID NO: 11993

SEQ ID NO: 11996 - protein, 362 aa, Homo sapiens
MAGAGCTGTWSWLWGTATEAAPSCVGDMADTPRDAGLKQAPASRNEKAPVDFGYVGIDSILEQMRRKAMKQGFEFNIMVVGQSGLGKSTLINTLFKSKISRKSVQPTSEERIPKTIEIKSITHDIEEKGVRMKLTVIDTPGFGDHINNENCWQPIMKFINDQYEKYLQEEVNINRKKRIPDTRVHCCLYFIPATGHSLRPLDIEFMKRLSKVVNIVPVIAKADTLTLEERVHFKQRITADLLSNGIDVYPQKEFDEDSEDRLVNEKFREMIPFAVVGSDHEYQVNGKRILGRKTKWGTIEVENTTHCEFAYLRDLLIRTHMQNIKDITSSIHFEAYRVKRLNEGSSAMANGMEEKEPEAPEM

SEQ ID NO: 11997 - protein, 35 aa, Homo sapiens
MEPPASKVPEVPTAPATDAAPKRVEIQMPKPAEAP

SEQ ID NO: 11998 - protein, 422 aa, Homo sapiens
MEPPASKVPEVPTAPATDAAPKRVEIQMPKPAEAPTAPSPAQTLENSEPAPVSQLQSRLEPKPQPPVAEATPRSQEATEAAPSCVGDMADTPRDAGLKQAPASRNEKAPVDFGYVGIDSILEQMRRKAMKQGFEFNIMVVGQSGLGKSTLINTLFKSKISRKSVQPTSEERIPKTIEIKSITHDIEEKGVRMKLTVIDTPGFGDHINNENCWQPIMKFINDQYEKYLQEEVNINRKKRIPDTRVHCCLYFIPATGHSLRPLDIEFMKRLSKVVNIVPVIAKADTLTLEERVHFKQRITADLLSNGIDVYPQKEFDEDSEDRLVNEKFREMIPFAVVGSDHEYQVNGKRILGRKTKWGTIEVENTTHCEFAYLRDLLIRTHMQNIKDITSSIHFEAYRVKRLNEGSSAMANGMEEKEPEAPEM

SEQ ID NO: 11999 - protein, 422 aa, Homo sapiens; identical to SEQ ID NO: 11998

SEQ ID NO: 12000 - protein, 422 aa, Homo sapiens; identical to SEQ ID NO: 11998

SEQ ID NO: 12001 - protein, 422 aa, Homo sapiens; identical to SEQ ID NO: 11998

SEQ ID NO: 12002 - protein, 568 aa, Homo sapiens
MERDRISALKRSFEVEEVETPNSTPPRRVQTPLLRATVASSTQKFQDLGVKNSEPSARHVDSLSQRSPKASLRRVELSGPKAAEPVSRRTELSIDISSKQVENAGAIGPSRFGLKRAEVLGHKTPEPAPRRTEITIVKPQESAHRRMEPPASKVPEVPTAPATDAAPKRVEIQMPKPAEAPTAPSPAQTLENSEPAPVSQLQSRLEPKPQPPVAEATPRSQEATEAAPSCVGDMADTPRDAGLKQAPASRNEKAPVDFGYVGIDSILEQMRRKAMKQGFEFNIMVVGQSGLGKSTLINTLFKSKISRKSVQPTSEERIPKTIEIKSITHDIEEKGVRMKLTVIDTPGFGDHINNENCWQPIMKFINDQYEKYLQEEVNINRKKRIPDTRVHCCLYFIPATGHSLRPLDIEFMKRLSKVVNIVPVIAKADTLTLEERVHFKQRITADLLSNGIDVYPQKEFDEDSEDRLVNEKFREMIPFAVVGSDHEYQVNGKRILGRKTKWGTIEVENTTHCEFAYLRDLLIRTHMQNIKDITSSIHFEAYRVKRLNEGSSAMANGMEEKEPEAPEM

SEQ ID NO: 12003 - protein, 568 aa, Homo sapiens; identical to SEQ ID NO: 12002

SEQ ID NO: 12004 - protein, 159 aa, Homo sapiens
MGSFRTSKMPKPAEAPTAPSPAQTLENSEPAPVSQLQSRLEPKPQPPVAEATPRSQEATEAAPSCVGDMADTPRDAGLKQAPASRNEKAPVDFGYVGIDSILEQMRRKAMKQGFEFNIMVVGQSGLGKSTLINTLFKSKISRKSVQPTSEERIPKTIEI

SEQ ID NO: 12005 - protein, 474 aa, Homo sapiens
MGSSFWEGLQVAVGLPQGCWPQGLDSGEPAEGGQLEAAPVCIVTRQSKETAGPTLGRGGWRQGSLRRGKGTSCRCRQLSPGHGPGRLTGCGECHRLPCRGLVSGFTGLRGQEEDDLAFCLATIGSDRQATEAAPSCVGDMADTPRDAGLKQAPASRNEKAPVDFGYVGIDSILEQMRRKAMKQGFEFNIMVVGQSGLGKSTLINTLFKSKISRKSVQPTSEERIPKTIEIKSITHDIEEKGVRMKLTVIDTPGFGDHINNENCWQPIMKFINDQYEKYLQEEVNINRKKRIPDTRVHCCLYFIPATGHSLRPLDIEFMKRLSKVVNIVPVIAKADTLTLEERVHFKQRITADLLSNGIDVYPQKEFDEDSEDRLVNEKFREMIPFAVVGSDHEYQVNGKRILGRKTKWGTIEVENTTHCEFAYLRDLLIRTHMQNIKDITSSIHFEAYRVKRLNEGSSAMANGMEEKEPEAPEM

SEQ ID NO: 12006 - protein, 23 aa, Homo sapiens
MHLAAEHCVCDSPPSSWNHPPQV

SEQ ID NO: 12007 - protein, 125 aa, Homo sapiens
MIICPTRPFTALKRSFEVEEVETPNSTPPRRVQTPLLRATVASSTQKFQDLGVKNSEPSARHVDSLSQRSPKASLRRVELSGPKAAEPVSRRTELSIDISSKQVENAGAIGPSRFGLKRAEVLGH

SEQ ID NO: 12008 - protein, 90 aa, Homo sapiens
MKDFGSRQEFDSVENAGAIGPSRFGLKRAEVLGHKTPEPAPRRTEITIVKPQESAHRRMEPPASKPEVGAAHLRGAHPQDHRDQVHHARY

SEQ ID NO: 12009 - protein, 134 aa, Homo sapiens
MKDFGSRQEFDSVENAGAIGPSRFGLKRAEVLGHKTPEPAPRRTEITIVKPQESAHRRMEPPASKVPEVPTAPATDAAPKRVEIQMPKPAEAPTAPSPAQTLENSEPAPVSQLQSRLEPKPQPPVAEATPRSQE

SEQ ID NO: 12010 - protein, 567 aa, Homo sapiens
MKKSYSALKRSFEVEEVETPNSTPPRRVQTPLLRATVASSTQKFQDLGVKNSEPSARHVDSLSQRSPKASLRRVELSGPKAAEPVSRRTELSIDISSKQVENAGAIGPSRFGLKRAEVLGHKTPEPAPRRTEITIVKPQESAHRRMEPPASKVPEVPTAPATDAAPKRVEIQMPKPAEAPTAPSPAQTLENSEPAPVSQLQSRLEPKPQPPVAEATPRSQEATEAAPSCVGDMADTPRDAGLKQAPASRNEKAPVDFGYVGIDSILEQMRRKAMKQGFEFNIMVVGQSGLGKSTLINTLFKSKISRKSVQPTSEERIPKTIEIKSITHDIEEKGVRMKLTVIDTPGFGDHINNENCWQPIMKFINDQYEKYLQEEVNINRKKRIPDTRVHCCLYFIPATGHSLRPLDIEFMKRLSKVVNIVPVIAKADTLTLEERVHFKQRITADLLSNGIDVYPQKEFDEDSEDRLVNEKFREMIPFAVVGSDHEYQVNGKRILGRKTKWGTIEVENTTHCEFAYLRDLLIRTHMQNIKDITSSIHFEAYRVKRLNEGSSAMANGMEEKEPEAPEM

SEQ ID NO: 12011 - protein, 44 aa, Homo sapiens
MKKSYSDLLLDPCISNLASLHCARFSGARHRRICSCLVIFDSAR

SEQ ID NO: 12012 - protein, 586 aa, Homo sapiens
MKKSYSGGTRTSSGRLRRLGDSSGPALKRSFEVEEVETPNSTPPRRVQTPLLRATVASSTQKFQDLGVKNSEPSARHVDSLSQRSPKASLRRVELSGPKAAEPVSRRTELSIDISSKQVENAGAIGPSRFGLKRAEVLGHKTPEPAPRRTEITIVKPQESAHRRMEPPASKVPEVPTAPATDAAPKRVEIQMPKPAEAPTAPSPAQTLENSEPAPVSQLQSRLEPKPQPPVAEATPRSQEATEAAPSCVGDMADTPRDAGLKQAPASRNEKAPVDFGYVGIDSILEQMRRKAMKQGFEFNIMVVGQSGLGKSTLINTLFKSKISRKSVQPTSEERIPKTIEIKSITHDIEEKGVRMKLTVIDTPGFGDHINNENCWQPIMKFINDQYEKYLQEEVNINRKKRIPDTRVHCCLYFIPATGHSLRPLDIEFMKRLSKVVNIVPVIAKADTLTLEERVHFKQRITADLLSNGIDVYPQKEFDEDSEDRLVNEKFREMIPFAVVGSDHEYQVNGKRILGRKTKWGTIEVENTTHCEFAYLRDLLIRTHMQNIKDITSSIHFEAYRVKRLNEGSSAMANGMEEKEPEAPEM

SEQ ID NO: 12013 - protein, 151 aa, Homo sapiens
MLWPEEEPWGGRCACVTEACPADAGPLTSRRGSLKRSFEVEEVETPNSTPPRRVQTPLLRATVASSTQKFQDLGVKNSEPSARHVDSLSQRSPKASLRRVELSGPKAAEPVSRRTELSIDISSKQVENAGAIGPSRFGLKRAEVLGHKTPE

SEQ ID NO: 12014 - protein, 189 aa, Homo sapiens
MPKPAEAPTAPSPAQTLENSEPAPVSQLQSRLEPKPQPPVAEATPRSQEATEAAPSCVGDMADTPRDAGLKQAPASRNEKAPVDFGYVGIDSILEQMRRKAMKQGFEFNIMVVGESSPCMPLNQCRKPASAPRAAHKPLGLVFPSVKWGSNPDLKDGLPVTLRVHACAWEEPTASSGSSEGPVLHIQGP

SEQ ID NO: 12015 - protein, 579 aa, Homo sapiens
MSDPAVNAQLDGIISDFEALKRSFEVEEVETPNSTPPRRVQTPLLRATVASSTQKFQDLGVKNSEPSARHVDSLSQRSPKASLRRVELSGPKAAEPVSRRTELSIDISSKQVENAGAIGPSRFGLKRAEVLGHKTPEPAPRRTEITIVKPQESAHRRMEPPASKVPEVPTAPATDAAPKRVEIQMPKPAEAPTAPSPAQTLENSEPAPVSQLQSRLEPKPQPPVAEATPRSQEATEAAPSCVGDMADTPRDAGLKQAPASRNEKAPVDFGYVGIDSILEQMRRKAMKQGFEFNIMVVGQSGLGKSTLINTLFKSKISRKSVQPTSEERIPKTIEIKSITHDIEEKGVRMKLTVIDTPGFGDHINNENCWQPIMKFINDQYEKYLQEEVNINRKKRIPDTRVHCCLYFIPATGHSLRPLDIEFMKRLSKVVNIVPVIAKADTLTLEERVHFKQRITADLLSNGIDVYPQKEFDEDSEDRLVNEKFREMIPFAVVGSDHEYQVNGKRILGRKTKWGTIEVENTTHCEFAYLRDLLIRTHMQNIKDITSSIHFEAYRVKRLNEGSSAMANGMEEKEPEAPEM

SEQ ID NO: 12016 - protein, 152 aa, Homo sapiens
MTSMSAGTINTLKRSFEVEEVETPNSTPPRRVQTPLLRATVASSTQKFQDLGVKNSEPSARHVDSLSQRSPKASLRRVELSGPKAAEPVSRRTELSIDISSKQVENAGAIGPSRFGLKRAEVLGHKTPEPAPRRTEITIVKPQESAHRRMEP

SEQ ID NO: 12017 - protein, 105 aa, Homo sapiens
MLSLGTKADTHDEILEGLNFNLTEIPEAQIHEGFQELLRTLNQPDSQLQLTTGNGLFLSEGLKLVDKFLEDVKKLYHSEAFTVNFGDTEEAKKQINDYVEKGTQG

SEQ ID NO: 12018 - protein, 22 aa, Homo sapiens
MPSSVSWGILLLAGLCCLVPVS

SEQ ID NO: 12019 - protein, 92 aa, Homo sapiens
MPSSVSWGILLLAGLCCLVPVSLAEDPQGDAAQKTDTSHHDQDHPTFNKITPNLAEFAFSLYRQLAHQSNSTNIFFSPVSIATAFAMLSLGT

SEQ ID NO: 12020 - protein, 117 aa, Homo sapiens
MPSSVSWGILLLAGLCCLVPVSLAEDPQGDAAQKTDTSHHDQDHPTFNKITPNLAEFAFSLYRQLAHQSNSTNIFFSPVSIATAFAMLSLGTKADTHDEILEGLNFNLTEIPEAQIH

SEQ ID NO: 12021 - protein, 144 aa, Homo sapiens
MPSSVSWGILLLAGLCCLVPVSLAEDPQGDAAQKTDTSHHDQDHPTFNKITPNLAEFAFSLYRQLAHQSNSTNIFFSPVSIATAFAMLSLGTKADTHDEILEGLNFNLTEIPEAQIHEGFQELLRTLNQPDSQLQLTTGNGLFL

SEQ ID NO: 12022 - protein, 156 aa, Homo sapiens
MPSSVSWGILLLAGLCCLVPVSLAEDPQGDAAQKTDTSHHDQDHPTFNKITPNLAEFAFSLYRQLAHQSNSTNIFFSPVSIATAFAMLSLGTKADTHDEILEGLNFNLTEIPEAQIHEGFQELLRTLNQPDSQLQLTTGNGLFLSEGLKLVDKFLE

SEQ ID NO: 12023 - protein, 418 aa, Homo sapiens
MPSSVSWGILLLAGLCCLVPVSLAEDPQGDAAQKTDTSHHDQDHPTFNKITPNLAEFAFSLYRQLAHQSNSTNIFFSPVSIATAFAMLSLGTKADTHDEILEGLNFNLTEIPEAQIHEGFQELLRTLNQPDSQLQLTTGNGLFLSEGLKLVDKFLEDVKKLYHSEAFTVNFGDTEEAKKQINDYVEKGTQGKIVDLVKELDRDTVFALVNYIFFKGKWERPFEVKDTEEEDFHVDQVTTVKVPMMKRLGMFNIQHCKKLSSWVLLMKYLGNATAIFFLPDEGKLQHLENELTHDIITKFLENEDRRSASLHLPKLSITGTYDLKSVLGQLGITKVFSNGADLSGVTEEAPLKLSKAVHKAVLTIDEKGTEAAGAMFLEAIPMSIPPEVKFNKPFVFLMIEQNTKSPLFMGKVVNPTQK

SEQ ID NO: 12024 - protein, 418 aa, Homo sapiens; identical to SEQ ID NO: 12023

SEQ ID NO: 12025 - protein, 359 aa, Homo sapiens
MPSSVSWGILLLAGLCCLVPVSLAEDPQGDAAQKTDTSHHDQDHPTFNKITPNLAEFAFSLYRQLAHQSNSTNIFFSPVSIATAFAMLSLGTKADTHDEILEGLNFNLTEIPEAQIHEGFQELLRTLNQPDSQLQLTTGNGLFLSEGLKLVDKFLEDVKKLYHSEAFTVNFGDTEEAKKQINDYVEKGTQGKIVDLVKELDRDTVFALVNYIFFKGKWERPFEVKDTEEEDFHVDQVTTVKVPMMKRLGMFNIQHCKKLSSWVLLMKYLGNATAIFFLPDEGKLQHLENELTHDIITKFLENEDRRSASLHLPKLSITGTYDLKSVLGQLGITKVFSNGADLSGVTEEAPLKLSKVRSP

SEQ ID NO: 12026 - protein, 418 aa, Homo sapiens; identical to SEQ ID NO: 12023

SEQ ID NO: 12027 - protein, 418 aa, Homo sapiens; identical to SEQ ID NO: 12023

SEQ ID NO: 12028 - protein, 418 aa, Homo sapiens; identical to SEQ ID NO: 12023

SEQ ID NO: 12029 - protein, 418 aa, Homo sapiens; identical to SEQ ID NO: 12023

SEQ ID NO: 12030 - protein, 418 aa, Homo sapiens; identical to SEQ ID NO: 12023

SEQ ID NO: 12031 - protein, 418 aa, Homo sapiens; identical to SEQ ID NO: 12023

SEQ ID NO: 12032 - protein, 306 aa, Homo sapiens
MPSSVSWGILLLAGLCCLVPVSLAEDPQGDAAQKTDTSHHDQDHPTFNKITPNLAEFAFSLYRQLAHQSNSTNIFFSPVSIATAFAMLSLGTKADTHDEILEGLNFNLTEIPEAQIHEGFQELLRTLNQPDSQLQLTTGNGLFLSEGLKLVDKFLEDVKKLYHSEAFTVNFGDTEEAKKQINDYVEKGTQGKIVDLVKELDRDTVFALVNYIFFKGKWERPFEVKDTEEEDFHVDQVTTVKVPMMKRLGMFNIQHCKKLSSWVLLMKYLGNATAIFFLPDEGKLQHLENELTHDIITKFLENEDRR

SEQ ID NO: 12033 - protein, 418 aa, Homo sapiens; identical to SEQ ID NO: 12023

SEQ ID NO: 12034 - protein, 444 aa, Homo sapiens
MKVVPSLLLSVLLAQVWLVPGLAPSPQSPETPAPQNQTSRVVQAPKEEEEDEQEASEEKASEEEKAWLMASRQQLAKETSNFGFSLLRKISMRHDGNMVFSPFGMSLAMTGLMLGATGPTETQIKRGLHLQALKPTKPGLLPSLFKGLRETLSRNLELGLTQGSFAFIHKDFDVKETFFNLSKRYFDTECVPMNFRNASQAKRLMNHYINKETRGKIPKLFDEINPETKLILVDYILFKGKWLTPFDPVFTEVDTFHLDKYKTIKVPMMYGAGKFASTFDKNFRCHVLKLPYQGNATMLVVLMEKMGDHLALEDYLTTDLVETWLRNMKTRNMEVFFPKFKLDQKYEMHELLRQMGIRRIFSPFADLSELSATGRNLQVSRVLQRTVIEVDERGTEAVAGILSEITAYSMPPVIKVDRPFHFMIYEETSGMLLFLGRVVNPTLL

SEQ ID NO: 12035 - protein, 444 aa, Homo sapiens; identical to SEQ ID NO: 12034

SEQ ID NO: 12036 - protein, 444 aa, Homo sapiens; identical to SEQ ID NO: 12034

SEQ ID NO: 12037 - protein, 484 aa, Homo sapiens
MSRSTQELLGYHCRLQDKLQEQEGSLAAEGRHSLASAADHMKVVPSLLLSVLLAQVWLVPGLAPSPQSPETPAPQNQTSRVVQAPKEEEEDEQEASEEKASEEEKAWLMASRQQLAKETSNFGFSLLRKISMRHDGNMVFSPFGMSLAMTGLMLGATGPTETQIKRGLHLQALKPTKPGLLPSLFKGLRETLSRNLELGLTQGSFAFIHKDFDVKETFFNLSKRYFDTECVPMNFRNASQAKRLMNHYINKETRGKIPKLFDEINPETKLILVDYILFKGKWLTPFDPVFTEVDTFHLDKYKTIKVPMMYGAGKFASTFDKNFRCHVLKLPYQGNATMLVVLMEKMGDHLALEDYLTTDLVETWLRNMKTRNMEVFFPKFKLDQKYEMHELLRQMGIRRIFSPFADLSELSATGRNLQVSRVLQRTVIEVDERGTEAVAGILSEITAYSMPPVIKVDRPFHFMIYEETSGMLLFLGRVVNPTLL

SEQ ID NO: 12038 - protein, 422 aa, Homo sapiens
MGPAWLWLLGTGILASVHCQPLLAHGDKSLQGPQPPRHQLSEPAPAYHRITPTITNFALRLYKELAADAPGNIFFSPVSISTTLALLSLGAQANTSALILEGLGFNLTETPEADIHQGFRSLLHTLALPSPKLELKVGNSLFLDKRLKPRQHYLDSIKELYGAFAFSANFTDSVTTGRQINDYLRRQTYGQVVDCLPEFSQDTFMVLANYIFFKAKWKHPFSRYQTQKQESFFVDERTSLQVPMMHQKEMHRFLYDQDLACTVLQIEYRGNALALLVLPDPGKMKQVEAALQPQTLRKWGQLLLPSLLDLHLPRFSISGTYNLEDILPQIGLTNILNLEADFSGVTGQLNKTISKVSHKAMVDMSEKGTEAGAASGLLSQPPSLNTMSDPHAHFNRPFLLLLWEVTTQSLLFLGKVVNPVAG

SEQ ID NO: 12039 - protein, 414 aa, Homo sapiens
MNPTLGLAIFLAVLLTVKGLLKPSFSPRNYKALSEVQGWKQRMAAKELARQNMDLGFKLLKKLAFYNPGRNIFLSPLSISTAFSMLCLGAQDSTLDEIKQGFNFRKMPEKDLHEGFHYIIHELTQKTQDLKLSIGNTLFIDQRLQPQRKFLEDAKNFYSAETILTNFQNLEMAQKQINDFISQKTHGKINNLIENIDPGTVMLLANYIFFRARWKHEFDPNVTKEEDFFLEKNSSVKVPMMFRSGIYQVGYDDKLSCTILEIPYQKNITAIFILPDEGKLKHLEKGLQVDTFSRWKTLLSRRVVDVSVPRLHMTGTFDLKKTLSYIGVSKIFEEHGDLTKIAPHRSLKVGEAVHKAELKMDERGTEGAAGTGAQTLPMETPLVVKIDKPYLLLIYSEKIPSVLFLGKIVNPIGK

SEQ ID NO: 12040 - protein, 414 aa, Homo sapiens; identical to SEQ ID NO: 12039

SEQ ID NO: 12041 - protein, 423 aa, Homo sapiens
MERMLPLLALGLLAAGFCPAVLCHPNSPLDEENLTQENQDRGTHVDLGLASANVDFAFSLYKQLVLKAPDKNVIFSPLSISTALAFLSLGAHNTTLTEILKGLKFNLTETSEAEIHQSFQHLLRTLNQSSDELQLSMGNAMFVKEQLSLLDRFTEDAKRLYGSEAFATDFQDSAAAKKLINDYVKNGTRGKITDLIKDLDSQTMMVLVNYIFFKAKWEMPFDPQDTHQSRFYLSKKKWVMVPMMSLHHLTIPYFRDEELSCTVVELKYTGNASALFILPDQDKMEEVEAMLLPETLKRWRDSLEFREIGELYLPKFSISRDYNLNDILLQLGIEEAFTSKADLSGITGARNLAVSQVVHKAVLDVFEEGTEASAATAVKITLLSALVETRTIVRFNRPFLMIIVPTDTQNIFFMSKVTNPKQA

SEQ ID NO: 12042 - protein, 423 aa, Homo sapiens; identical to SEQ ID NO: 12041

SEQ ID NO: 12043 - protein, 423 aa, Homo sapiens; identical to SEQ ID NO: 12041

SEQ ID NO: 12044 - protein, 305 aa, Homo sapiens
MERMLPLLALGLLAAGFCPAVLCHPNSPLDEENLTQENQDRGTHVDLGLASANVDFAFSLYKQLVLKAPDKNVIFSPLSISTALAFLSLGAHNTTLTEILKGLKFNLTETSEAEIHQSFQHLLRTLNQSSDELQLSMGNAMFVKEQLSLLDRFTEDAKRLYGSEAFATDFQDSAAAKKLINDYVKNGTRGKITDLIKDLDSQTMMVLVNYIFFKAKWEMPFDPQDTHQSRFYLSKKKWVMVPMMSLHHLTIPYFRDEELSCTVVELKYTGNASALFILPDQDKMEEVEAMLLPETLKRWRDSLEF

SEQ ID NO: 12045 - protein, 216 aa, Homo sapiens
MERMLPLLALGLLAAGFCPAVLCHPNSPLDEENLTQENQDRGTHVDLGLASANVDFAFSLYKQLVLKAPDKNVIFSPLSISTALAFLSLGAHNTTLTEILKGLKFNLTETSEAEIHQSFQHLLRTLNQSSDELQLSMGNAMFVKEQLSLLDRFTEDAKRLYGSEAFATDFQDSAAAKKLINDYVKNGTRGKITDLIKDLDSQTMMVLVNYIFFKER

SEQ ID NO: 12046 - protein, 205 aa, Homo sapiens
MPFDPQDTHQSRFYLSKKKWVMVPMMSLHHLTIPYFRDEELSCTVVELKYTGNASALFILPDQDKMEEVEAMLLPETLKRWRDSLEFREIGELYLPKFSISRDYNLNDILLQLGIEEAFTSKADLSGITGARNLAVSQVVHKAVLDVFEEGTEASAATAVKITLLSALVETRTIVRFNRPFLMIIVPTDTQNIFFMSKVTNPKQA

SEQ ID NO: 12047 - protein, 46 aa, Homo sapiens
  SITE 1: note = misc_feature - Xaa can be any naturally occurring amino acid
XTVVELKYTGNASALFILPDQDKMEEVEAMLLPETLKRWRDSLEFR

SEQ ID NO: 12048 - protein, 427 aa, Homo sapiens
MHLIDYLLLLLVGLLALSHGQLHVEHDGESCSNSSHQQILETGEGSPSLKIAPANADFAFRFYYLIASETPGKNIFFSPLSISAAYAMLSLGACSHSRSQILEGLGFNLTELSESDVHRGFQHLLHTLNLPGHGLETRVGSALFLSHNLKFLAKFLNDTMAVYEAKLFHTNFYDTVGTIQLINDHVKKETRGKIVDLVSELKKDVLMVLVNYIYFKALWEKPFISSRTTPKDFYVDENTTVRVPMMLQDQEHHWYLHDRYLPCSVLRMDYKGDATVFFILPNQGKMREIEEVLTPEMLMRWNNLLRKRNFYKKLELHLPKFSISGSYVLDQILPRLGFTDLFSKWADLSGITKQQKLEASKSFHKATLDVDEAGTEAAAATSFAIKFFSAQTNRHILRFNRPFLVVIFSTSTQSVLFLGKVVDPTKP

SEQ ID NO: 12049 - protein, 427 aa, Homo sapiens; identical to SEQ ID NO: 12048

SEQ ID NO: 12050 - protein, 427 aa, Homo sapiens; identical to SEQ ID NO: 12048

SEQ ID NO: 12051 - protein, 24 aa, Homo sapiens
MQLFLLLCLVLLSPQGASLHRHHP

SEQ ID NO: 12052 - protein, 86 aa, Homo sapiens
MQLFLLLCLVLLSPQGASLHRHHPREMKKRVEDLHVGATVAPSSRRDFTFDLYRALASAAPSQSIFFSPVSISMSLAMLSLGAGSS

SEQ ID NO: 12053 - protein, 90 aa, Homo sapiens
MQLFLLLCLVLLSPQGASLHRHHPREMKKRVEDLHVGATVAPSSRRDFTFDLYRALASAAPSQSIFFSPVSISMSLAMLSLGAGSSTKMQ

SEQ ID NO: 12054 - protein, 144 aa, Homo sapiens
MQLFLLLCLVLLSPQGASLHRHHPREMKKRVEDLHVGATVAPSSRRDFTFDLYRALASAAPSQSIFFSPVSISMSLAMLSLGAGSSTKMQILEGLGLNLQKSSEKELHRGFQQLLQELNQPRDGFQLSLGNALFTDLVVDLQDT

SEQ ID NO: 12055 - protein, 157 aa, Homo sapiens
MQLFLLLCLVLLSPQGASLHRHHPREMKKRVEDLHVGATVAPSSRRDFTFDLYRALASAAPSQSIFFSPVSISMSLAMLSLGAGSSTKMQILEGLGLNLQKSSEKELHRGFQQLLQELNQPRDGFQLSLGNALFTDLVVDLQDTFVSAMKTLYLADT

SEQ ID NO: 12056 - protein, 172 aa, Homo sapiens
MQLFLLLCLVLLSPQGASLHRHHPREMKKRVEDLHVGATVAPSSRRDFTFDLYRALASAAPSQSIFFSPVSISMSLAMLSLGAGSSTKMQILEGLGLNLQKSSEKELHRGFQQLLQELNQPRDGFQLSLGNALFTDLVVDLQDTFVSAMKTLYLADTFPTNFRDSAGAMKQI

SEQ ID NO: 12057 - protein, 231 aa, Homo sapiens
MQLFLLLCLVLLSPQGASLHRHHPREMKKRVEDLHVGATVAPSSRRDFTFDLYRALASAAPSQSIFFSPVSISMSLAMLSLGAGSSTKMQILEGLGLNLQKSSEKELHRGFQQLLQELNQPRDGFQLSLGNALFTDLVVDLQDTFVSAMKTLYLADTFPTNFRDSAGAMKQINDYVAKQTKGKIVDLLKNLDSNAVVIMVNYIFFKAKWETSFNHKGTQEQDFYVTSETVV

SEQ ID NO: 12058 - protein, 406 aa, Homo sapiens
MQLFLLLCLVLLSPQGASLHRHHPREMKKRVEDLHVGATVAPSSRRDFTFDLYRALASAAPSQSIFFSPVSISMSLAMLSLGAGSSTKMQILEGLGLNLQKSSEKELHRGFQQLLQELNQPRDGFQLSLGNALFTDLVVDLQDTFVSAMKTLYLADTFPTNFRDSAGAMKQINDYVAKQTKGKIVDLLKNLDSNAVVIMVNYIFFKAKWETSFNHKGTQEQDFYVTSETVVRVPMMSREDQYHYLLDRNLSCRVVGVPYQGNATALFILPSEGKMQQVENGLSEKTLRKWLKMFKKRQLELYLPKFSIEGSYQLEKVLPSLGISNVFTSHADLSGISNHSNIQVSEMVHKAVVEVDESGTRAAAATGTIFTFRSARLNSQRLVFNRPFLMFIVDNNILFLGKVNRP

SEQ ID NO: 12059 - protein, 406 aa, Homo sapiens; identical to SEQ ID NO: 12058

SEQ ID NO: 12060 - protein, 406 aa, Homo sapiens; identical to SEQ ID NO: 12058

SEQ ID NO: 12061 - protein, 406 aa, Homo sapiens; identical to SEQ ID NO: 12058

SEQ ID NO: 12062 - protein, 301 aa, Homo sapiens
MQLFLLLCLVLLSPQGASLHRHHPREMKKRVEDLHVGATVAPSSRRDFTFDLYRALASAAPSQSIFFSPVSISMSLAMLSLGAGSSTKMQILEGLGLNLQKSSEKELHRGFQQLLQELNQPRDGFQLSLGNALFTDLVVDLQDTFVSAMKTLYLADTFPTNFRDSAGAMKQINDYVAKQTKGKIVDLLKNLDSNAVVIMVNYIFFKAKWETSFNHKGTQEQDFYVTSETVVRVPMMSREDQYHYLLDRNLSCRVVGVPYQGNATALFILPSEGKMQQVENGLSEKTLRKWLKMFKKRYFQT

SEQ ID NO: 12063 - protein, 136 aa, Homo sapiens
MPLLLYTCLLWLPTSGLWTVQAMDPNAAYVNMSNHHRGLASANVDFAFSLYKHLVALSPKKNIFISPVSISMALAMLSLGTCGHTRAQLLQGLGFNLTERSETEIHQGFQHLHQLFAKSDTSLEMTMGNALFLDGS

SEQ ID NO: 12064 - protein, 278 aa, Homo sapiens
MPLLLYTCLLWLPTSGLWTVQAMDPNAAYVNMSNHHRGLASANVDFAFSLYKHLVALSPKKNIFISPVSISMALAMLSLGTCGHTRAQLLQGLGFNLTERSETEIHQGFQHLHQLFAKSDTSLEMTMGNALFLDGSLELLESFSADIKHYYESEVLAMNFQDWATASRQINSYVKNKTQGKIVDLFSGLDSPAILVLVNYIFFKGIPTHPHLKAHPLWPGITAAKIQGTLLGKVFDSVKHIHIWESPSSPQSCWAHGHSPLTWQAPGRRTSMWTRQLW

SEQ ID NO: 12065 - protein, 405 aa, Homo sapiens
MPLLLYTCLLWLPTSGLWTVQAMDPNAAYVNMSNHHRGLASANVDFAFSLYKHLVALSPKKNIFISPVSISMALAMLSLGTCGHTRAQLLQGLGFNLTERSETEIHQGFQHLHQLFAKSDTSLEMTMGNALFLDGSLELLESFSADIKHYYESEVLAMNFQDWATASRQINSYVKNKTQGKIVDLFSGLDSPAILVLVNYIFFKGTWTQPFDLASTREENFYVDETTVVKVPMMLQSSTISYLHDSELPCQLVQMNYVGNGTVFFILPDKGKMNTVIAALSRDTINRWSAGLTSSQVDLYIPKVTISGVYDLGDVLEEMGIADLFTNQANFSRITQDAQLKSSKVVHKAVLQLNEEGVDTAGSTGVTLNLTSKPIILRFNQPFIIMIFDHFTWSSLFLARVMNPV

SEQ ID NO: 12066 - protein, 415 aa, Homo sapiens
MSPFLYLVLLVLGLHATIHCASPEGKVTACHSSQPNATLYKMSSINADFAFNLYRRFTVETPDKNIFFSPVSISAALVMLSFGACCSTQTEIVETLGFNLTDTPMVEIQHGFQHLICSLNFPKKELELQIGNALFIGKHLKPLAKFLNDVKTLYETEVFSTDFSNISAAKQEINSHVEMQTKGKVVGLIQDLKPNTIMVLVNYIHFKAQWANPFDPSKTEDSSSFLIDKTTTVQVPMMHQMEQYYHLVDMELNCTVLQMDYSKNALALFVLPKEGQMESVEAAMSSKTLKKWNRLLQKGWVDLFVPKFSISATYDLGATLLKMGIQHAYSENADFSGLTEDNGLKLSNAAHKAVLHIGEKGTEAAAVPEVELSDQPENTFLHPIIQIDRSFMLLILERSTRSILFLGKVVNPTEA

SEQ ID NO: 12067 - protein, 415 aa, Homo sapiens; identical to SEQ ID NO: 12066

SEQ ID NO: 12068 - protein, 417 aa, Homo sapiens
MASYLYGVLFAVGLCAPIYCVSPANAPSAYPRPSSTKSTPASQVYSLNTDFAFRLYRRLVLETPSQNIFFSPVSVSTSLAMLSLGAHSVTKTQILQGLGFNLTHTPESAIHQGFQHLVHSLTVPSKDLTLKMGSALFVKKELQLQANFLGNVKRLYEAEVFSTDFSNPSIAQARINSHVKKKTQGKVVDIIQGLDLLTAMVLVNHIFFKAKWEKPFHPEYTRKNFPFLVGEQVTVHVPMMHQKEQFAFGVDTELNCFVLQMDYKGDAVAFFVLPSKGKMRQLEQALSARTLRKWSHSLQKRWIEVFIPRFSISASYNLETILPKMGIQNVFDKNADFSGIAKRDSLQVSKATHKAVLDVSEEGTEATAATTTKFIVRSKDGPSYFTVSFNRTFLMMITNKATDGILFLGKVENPTKS

SEQ ID NO: 12069 - protein, 286 aa, Homo sapiens
MGSALFVKKELQLQANFLGNVKRLYEAEVFSTDFSNPSIAQARINSHVKKKTQGKVVDIIQGLDLLTAMVLVNHIFFKAKWEKPFHPEYTRKNFPFLVGEQVTVHVPMMHQKEQFAFGVDTELNCFVLQMDYKGDAVAFFVLPSKGKMRQLEQALSARTLRKWSHSLQKRWIEVFIPRFSISASYNLETILPKMGIQNVFDKNADFSGIAKRDSLQVSKATHKAVLDVSEEGTEATAATTTKFIVRSKDGPSYFTVSFNRTFLMMITNKATDGILFLGKVENPTKS

SEQ ID NO: 12070 - protein, 337 aa, Homo sapiens
MLSLGAHSVTKTQILQGLGFNLTHTPESAIHQGFQHLVHSLTVPSKDLTLKMGSALFVKKELQLQANFLGNVKRLYEAEVFSTDFSNPSIAQARINSHVKKKTQGKVVDIIQGLDLLTAMVLVNHIFFKAKWEKPFHPEYTRKNFPFLVGEQVTVHVPMMHQKEQFAFGVDTELNCFVLQMDYKGDAVAFFVLPSKGKMRQLEQALSARTLRKWSHSLQKRWIEVFIPRFSISASYNLETILPKMGIQNVFDKNADFSGIAKRDSLQVSKATHKAVLDVSEEGTEATAATTTKFIVRSKDGPSYFTVSFNRTFLMMITNKATDGILFLGKVENPTKS

SEQ ID NO: 12071 - protein, 335 aa, Homo sapiens
MQGQGRRRGTCKDIFCSKMASYLYGVLFAVGLCAPIYCVSPANAPSAYPRPSSTKSTPASQVYSLNTDFAFRLYRRLVLETPSQNIFFSPARINSHVKKKTQGKVVDIIQGLDLLTAMVLVNHIFFKAKWEKPFHPEYTRKNFPFLVGEQVTVHVPMMHQKEQFAFGVDTELNCFVLQMDYKGDAVAFFVLPSKGKMRQLEQALSARTLRKWSHSLQKRWIEVFIPRFSISASYNLETILPKMGIQNVFDKNADFSGIAKRDSLQVSKATHKAVLDVSEEGTEATAATTTKFIVRSKDGPSYFTVSFNRTFLMMITNKATDGILFLGKVENPTKS

SEQ ID NO: 12072 - protein, 435 aa, Homo sapiens
MQGQGRRRGTCKDIFCSKMASYLYGVLFAVGLCAPIYCVSPANAPSAYPRPSSTKSTPASQVYSLNTDFAFRLYRRLVLETPSQNIFFSPVSVSTSLAMLSLGAHSVTKTQILQGLGFNLTHTPESAIHQGFQHLVHSLTVPSKDLTLKMGSALFVKKELQLQANFLGNVKRLYEAEVFSTDFSNPSIAQARINSHVKKKTQGKVVDIIQGLDLLTAMVLVNHIFFKAKWEKPFHPEYTRKNFPFLVGEQVTVHVPMMHQKEQFAFGVDTELNCFVLQMDYKGDAVAFFVLPSKGKMRQLEQALSARTLRKWSHSLQKRWIEVFIPRFSISASYNLETILPKMGIQNVFDKNADFSGIAKRDSLQVSKATHKAVLDVSEEGTEATAATTTKFIVRSKDGPSYFTVSFNRTFLMMITNKATDGILFLGKVENPTKS

SEQ ID NO: 12073 - protein, 201 aa, Homo sapiens
MRSAGGRGEIKVRRELQPSKQVSGLTNHARTGQEKRNLQRHILFQNGILPLWSTLCCWPLCSNLLCVPGQCPQCIPPPFLHKEHPCLTGVFPQHRLCLPPIPQAGFGDPESEHLLLPCECLHFPGHALPWGPLSHQDPDSPGPGLQPHTHTRVCHPPGLPAPGSLTDCSQQRPDLEDGKCPLRQEGAAAAGKFLGQCQEAV

SEQ ID NO: 12074 - protein, 334 aa, Homo sapiens
MRSAGGRGEIKVRRELQPSKQVSGLTNHARTGQEKRNLQRLVLETPSQNIFFSPVSVSTSLAMLSLGAHSVTKTQILQGLGFNLTHTPESAIHQGFQHLVHSLTVPSKDLTLKMGSALFVKKELQLQANFLGNVKRLYEAEVFSTDFSNPSIAQARINSHVKKKTQGKVVDIIQGLDLLTAMVLVNHIFFKAKWEKPFHPEYTRKNFPFLVGEQVTVHVPMMHQKEQFAFGVDTELNCFVLQMDYKGDAVAFFVLPSKGKMRQLEQALSARTLRKWSHSLQKRWIEVFIPRFSISASYNLETILPKMGIQNVFDKNADFSGIAKRDSLQVSKVS

SEQ ID NO: 12075 - protein, 113 aa, Homo sapiens
MEDLCVANTLFALNLFKHLAKASPTQNLFLSPWSISSTMAMVYMGSRGSTEDQMAKVLQFNEVGANAVTPMTPENFTSCGFMQQIQKGSYPDAILQAQAADKIHSSFRSLSSA

SEQ ID NO: 12076 - protein, 132 aa, Homo sapiens
MEDLCVANTLFALNLFKHLAKASPTQNLFLSPWSISSTMAMVYMGSRGSTEDQMAKVLQFNEVGANAVTPMTPENFTSCGFMQQIQKGSYPDAILQAQAADKIHSSFRSLSSAINASTGNYLLESVNKLFGE

SEQ ID NO: 12077 - protein, 161 aa, Homo sapiens
MEDLCVANTLFALNLFKHLAKASPTQNLFLSPWSISSTMAMVYMGSRGSTEDQMAKVLQFNEVGANAVTPMTPENFTSCGFMQQIQKGSYPDAILQAQAADKIHSSFRSLSSAINASTGNYLLESVNKLFGEKSASFREEYIRLCQKYYSSEPQAVDFLEC

SEQ ID NO: 12078 - protein, 415 aa, Homo sapiens
MEDLCVANTLFALNLFKHLAKASPTQNLFLSPWSISSTMAMVYMGSRGSTEDQMAKVLQFNEVGANAVTPMTPENFTSCGFMQQIQKGSYPDAILQAQAADKIHSSFRSLSSAINASTGNYLLESVNKLFGEKSASFREEYIRLCQKYYSSEPQAVDFLECAEEARKKINSWVKTQTKGKIPNLLPEGSVDGDTRMVLVNAVYFKGKWKTPFEKKLNGLYPFRVNSAQRTPVQMMYLREKLNIGYIEDLKAQILELPYAGDVSMFLLLPDEIADVSTGLELLESEITYDKLNKWTSKDKMAEDEVEVYIPQFKLEEHYELRSILRSMGMEDAFNKGRANFSGMSERNDLFLSEVFHQAMVDVNEEGTEAAAGTGGVMTGRTGHGGPQFVADHPFLFLIMHKITNCILFFGRFSSP

SEQ ID NO: 12079 - protein, 415 aa, Homo sapiens; identical to SEQ ID NO: 12078

SEQ ID NO: 12080 - protein, 259 aa, Homo sapiens
MYSNVIGTVTSGKRKVYLLSLLLIGFWDCVTCHGSPVDICTAKPRDIPMNPMCIYRSPEKKATEDEGSEQKIPEATNRRVWELSKANSRFATTFYQHLADSKNDNDNIFLSPLSISTAFAMTKLGACNDTLQQLMEVFKFDTISEKTSDQIHFFFAKLNCRLYRKANKSSKLVSANRLFGDKSLTFNDLYVSDAFHKAFLEVNEEGSEAAASTAVVIAGRSLNPNRVTFKANRPFLVFIREVPLNTIIFMGRVANPCVK

SEQ ID NO: 12081 - protein, 464 aa, Homo sapiens
MYSNVIGTVTSGKRKVYLLSLLLIGFWDCVTCHGSPVDICTAKPRDIPMNPMCIYRSPEKKATEDEGSEQKIPEATNRRVWELSKANSRFATTFYQHLADSKNDNDNIFLSPLSISTAFAMTKLGACNDTLQQLMEVFKFDTISEKTSDQIHFFFAKLNCRLYRKANKSSKLVSANRLFGDKSLTFNETYQDISELVYGAKLQPLDFKENAEQSRAAINKWVSNKTEGRITDVIPSEAINELTVLVLVNTIYFKGLWKSKFSPENTRKELFYKADGESCSASMMYQEGKFRYRRVAEGTQVLELPFKGDDITMVLILPKPEKSLAKVEKELTPEVLQEWLDELEEMMLVVHMPRFRIEDGFSLKEQLQDMGLVDLFSPEKSKLPGIVAEGRDDLYVSDAFHKAFLEVNEEGSEAAASTAVVIAGRSLNPNRVTFKANRPFLVFIREVPLNTIIFMGRVANPCVK

SEQ ID NO: 12082 - protein, 499 aa, Homo sapiens
MKHSLNALLIFLIITSAWGGSKGPLDQLEKGGETAQSADPQWEQLNNKNLSMPLLPADFHKENTVTNDWIPEGEEDDDYLDLEKIFSEDDDYIDIVDSLSVSPTDSDVSAGNILQLFHGKSRIQRLNILNAKFAFNLYRVLKDQVNTFDNIFIAPVGISTAMGMISLGLKGETHEQVHSILHFKDFVNASSKYEITTIHNLFRKLTHRLFRRNFGYTLRSVNDLYIQKQFPILLDFKTKVREYYFAEAQIADFSDPAFISKTNNHIMKLTKGLIKDALENIDPATQMMILNCIYFKGSWVNKFPVEMTHNHNFRLNEREVVKVSMMQTKGNFLAANDQELDCDILQLEYVGGISMLIVVPHKMSGMKTLEAQLTPRVVERWQKSMTNRTREVLLPKFKLEKNYNLVESLKLMGIRMLFDKNGNMAGISDQRIAIDLFKHQGTITVNEEGTQATTVTTVGFMPLSTQVRFTVDRPFLFLIYEHRTSCLLFMGRVANPSRS

SEQ ID NO: 12083 - protein, 499 aa, Homo sapiens; identical to SEQ ID NO: 12082

SEQ ID NO: 12084 - protein, 402 aa, Homo sapiens [sequence omitted]

SEQ ID NO: 12085 - protein, 42 aa, Homo sapiens
MNWHLPLFLLASVTLPSICSHFNPLSLEELGSNTGIQVFNQI

SEQ ID NO: 12086 - protein, 87 aa, Homo sapiens
MNWHLPLFLLASVTLPSICSHFNPLSLEELGSNTGIQVFNQIVKSRPHDNIVISPHGIASVLGMLQLGADGRTKKQLAMVMRYGVNG

SEQ ID NO: 12087 - protein, 398 aa, Homo sapiens
MNWHLPLFLLASVTLPSICSHFNPLSLEELGSNTGIQVFNQIVKSRPHDNIVISPHGIASVLGMLQLGADGRTKKQLAMVMRYGVNGVGKILKKINKAIVSKKNKDIVTVANAVFVKNASEIEVPFVTRNKDVFQCEVRNVNFEDPASACDSINAWVKNETRDMIDNLLSPDLIDGVLTRLVLVNAVYFKGLWKSRFQPENTKKRTFVAADGKSYQVPMLAQLSVFRCGSTSAPNDLWYNFIELPYHGESISMLIALPTESSTPLSAIIPHISTKTIDSWMSIMVPKRVQVILPKFTAVAQTDLKEPLKVLGITDMFDSSKANFAKITTGSENLHVSHILQKAKIEVSEDGTKASAATTAILIARSSPPWFIVDRPFLFFIRHNPTGAVLFMGQINKP

SEQ ID NO: 12088 - protein, 397 aa, Homo sapiens
MNWHLPLFLLASVTLPSICSHFNPLSLEELGSNTGIQVFNQIVKSRPHDNIVISPHGIASVLGMLQLGADGRTKKQLAMVMRYGVNGVGKILKKINKAIVSKKNKDIVTVANAVFVKNASEIEVPFVTRNKDVFQCEVRNVNFEDPASACDSINAWVKNETRDMIDNLLSPDLIDGVLTRLVLVNAVYFKGLWKSRFQPENTKKRTFVAADGKSYQVPMLAQLSVFRCGSTSAPNDLWYNFIELPYHGESISMLIALPTESSTPLSAIIPHISTKTIDSWMSIMVPKRVQVILPKFTAVAQTDLKEPLKVLGITDMFDSSKANFAKITRSENLHVSHILQKAKIEVSEDGTKASAATTAILIARSSPPWFIVDRPFLFFIRHNPTGAVLFMGQINKP

SEQ ID NO: 12089 - protein, 397 aa, Homo sapiens; identical to SEQ ID NO: 12088

SEQ ID NO: 12090 - protein, 276 aa, Homo sapiens
MNWHLPLFLLASVTLPSICSHFNPLSLEELGSNTGIQVFNQIVKSRPHDNIVISPHGIASVLGMLQLGADGRTKKQLAMVMRYGVNGVGKILKKINKAIVSKKNKDIVTVANAVFVKNASEIEVPFVTRNKDVFQCEVRNVNFEDPASACDSINAWVKNETRDMIDNLLSPDLIDGVLTRLVLVNAVYFKGLWKSRFQPENTKKRTFVAADGKSYQVPMLAQLSVFRCGSTSAPNDLWYNFIELPYHGESISMLIALPTESSTPLSAIIPHISTKT

SEQ ID NO: 12091 - protein, 409 aa, Homo sapiens
MSDCRSSLVEGTMNWHLPLFLLASVTLPSICSHFNPLSLEELGSNTGIQVFNQIVKSRPHDNIVISPHGIASVLGMLQLGADGRTKKQLAMVMRYGVNGVGKILKKINKAIVSKKNKDIVTVANAVFVKNASEIEVPFVTRNKDVFQCEVRNVNFEDPASACDSINAWVKNETRDMIDNLLSPDLIDGVLTRLVLVNAVYFKGLWKSRFQPENTKKRTFVAADGKSYQVPMLAQLSVFRCGSTSAPNDLWYNFIELPYHGESISMLIALPTESSTPLSAIIPHISTKTIDSWMSIMVPKRVQVILPKFTAVAQTDLKEPLKVLGITDMFDSSKANFAKITRSENLHVSHILQKAKIEVSEDGTKASAATTAILIARSSPPWFIVDRPFLFFIRHNPTGAVLFMGQINKP

SEQ ID NO: 12092 - protein, 48 aa, Homo sapiens
MPPFLITLFLFHSCCLRANGHLREGMTLLKTEFALHLYQSVAACRNET

SEQ ID NO: 12093 - protein, 404 aa, Homo sapiens
MPPFLITLFLFHSCCLRANGHLREGMTLLKTEFALHLYQSVAACRNETNFVISPAGVSLPLEILQFGAEGSTGQQLADALGYTVHDKRVKDFLHAVYATLPTSSQGTEMELACSLFVQVGTPLSPCFVEHVSWWANSSLEPADLSEPNSTAIQTSEGASRETAGGGPSEGPGGWPWEQVSAAFAQLVLVSTMSFQGTWRKRFSSTDTQILPFTCAYGLVLQVPMMHQTTEVNYGQFQDTAGHQVGVLELPYLGSAVSLFLVLPRDKDTPLSHIEPHLTASTIHLWTTSLRRARMDVFLPRFRIQNQFNLKSILNSWGVTDLFDPLKANLKGISGQDGFYVSEAIHKAKIEVLEEGTKASGATALLLLKRSRIPIFKADRPFIYFLREPNTGFVFSIGRVSNPLD

SEQ ID NO: 12094 - protein, 424 aa, Homo sapiens
MPPFLITLFLFHSCCLRANGHLREGMTLLKTEFALHLYQSVAACRNETNFVISPAGVSLPLEILQFGAEGSTGQQLADALGYTVHDKRVKDFLHAVYATLPTSSQGTEMELACSLFVQVGTPLSPCFVEHVSWWANSSLEPADLSEPNSTAIQTSEGASRETAGGGPSEGPGGWPWEQVSAAFAQLVLVSTMSFQGTWRKRFSSTDTQILPFTCAYGLVLQVPMMHQTTEVNYGQFQDTAGHQVGVLELPYLGSAVSLFLVLPRDKDTPLSHIEPHLTASTIHLWTTSLRRARMDVFLPRFRIQNQFNLKSILNSWGVTDLFDPLKANLKGISGQDGFYVSEAIHKAKIEVLEEGTKASGATALLLLKRSRIPIFKADRPFIYFLREPNTGITVFFDRIQIIYQCLSSNKGSFVHYPLKNKHSF

SEQ ID NO: 12095 - protein, 404 aa, Homo sapiens; identical to SEQ ID NO: 12093

SEQ ID NO: 12096 - protein, 91 aa, Homo sapiens
MKGKLARSTKEIPDEISILLLGVAHFKGQWVTKFDSRKTSLEDFYLDEERTVRVPMMSDPKAVLRYGLDSDLSCKIAQLPLTGSMSIIFFL

SEQ ID NO: 12097 - protein, 99 aa, Homo sapiens
MKGKLARSTKEIPDEISILLLGVAHFKGQWVTKFDSRKTSLEDFYLDEERTVRVPMMSDPKAVLRYGLDSDLSCKIAQLPLTGSMSIIFFLPLKVTQNL

SEQ ID NO: 12098 - protein, 128 aa, Homo sapiens
MQALVLLLCIGALLGHSSCQNPASPPEEEEDPFFKVPVNKLAAAVSNFGYDLYRVRSSTSPTTNVLLSPLSVATALSALSLGAEQRTESIIHRALYYDLISSPDIHGTYKELLDTVTAPQKNLKSASR

SEQ ID NO: 12099 - protein, 87 aa, Homo sapiens
MQALVLLLCIGALLGHSSCQNPASPPEEGSPDPDSTGALVEEEDPFFKVPVNKLAAAVSNFGYDLYRVRSSTSPTTNVLLSPLSVAT

SEQ ID NO: 12100 - protein, 111 aa, Homo sapiens
MQALVLLLCIGALLGHSSCQNPASPPEEGSPDPDSTGALVEEEDPFFKVPVNKLAAAVSNFGYDLYRVRSSTSPTTNVLLSPLSVATALSALSLGAEQRTESIIHRALYYD

SEQ ID NO: 12101 - protein, 132 aa, Homo sapiens
MQALVLLLCIGALLGHSSCQNPASPPEEGSPDPDSTGALVEEEDPFFKVPVNKLAAAVSNFGYDLYRVRSSTSPTTNVLLSPLSVATALSALSLGAEQRTESIIHRALYYDLISSPDIHGTYKELLDTVTAP

SEQ ID NO: 12102 - protein, 418 aa, Homo sapiens
MQALVLLLCIGALLGHSSCQNPASPPEEGSPDPDSTGALVEEEDPFFKVPVNKLAAAVSNFGYDLYRVRSSTSPTTNVLLSPLSVATALSALSLGAEQRTESIIHRALYYDLISSPDIHGTYKELLDTVTAPQKNLKSASRIVFEKKLRIKSSFVAPLEKSYGTRPRVLTGNPRLDLQEINNWVQAQMKGKLARSTKEIPDEISILLLGVAHFKGQWVTKFDSRKTSLEDFYLDEERTVRVPMMSDPKAVLRYGLDSDLSCKIAQLPLTGSMSIIFFLPLKVTQNLTLIEESLTSEFIHDIDRELKTVQAVLTVPKLKLSYEGEVTKSLQEMKLQSLFDSPDFSKITGKPIKLTQVEHRAGFEWNEDGAGTTPSPGLQPAHLTFPLDYHLNQPFIFVLRDTDTGALLFIGKILDPRGP

SEQ ID NO: 12103 - protein, 114 aa, Homo sapiens
MQALVLLLCIGALLGHSSCQNPASPPEEGSPDPDSTGALVEEEDPFFKVPVNKLAAAVSNFGYDLYRVRSSTSPTTNVLLSPLSVATALSALSLGLMPLTYFRKISKDENSLAT

SEQ ID NO: 12104 - protein, 138 aa, Homo sapiens
MRSAFSFSVWRTSRWVTKFDSRKTSLEDFYLDEERTVRVPMMSDPKAVLRYGLDSDLSCKIAQLPLTGSMSIIFFLPLKVTQNLTLIEESLTSEFIHDIDRELKTVQAVLTVPKLKLSYEGEVTKSLQEMKLQSLFDS

SEQ ID NO: 12105 - protein, 491 aa, Homo sapiens
MALLWGLLVLSWSCLQGPCSVFSPVSAMEPLGRQLTSGPNQEQVSPLTLLKLGNQEPGGQTALKSPPGVCSRDPTPEQTHRLARAMMAFTADLFSLVAQTSTCPNLILSPLSVALALSHLALGAQNHTLQRLQQVLHAGSGPCLPHLLSRLCQDLGPGAFRLAARMYLQKGFPIKEDFLEQSEQLFGAKPVSLTGKQEDDLANINQWVKEATEGKIQEFLSGLPEDTVLLLLNAIHFQGFWRNKFDPSLTQRDSFHLDEQFTVPVEMMQARTYPLRWFLLEQPEIQVAHFPFKNNMSFVVLVPTHFEWNVSQVLANLSWDTLHPPLVWERPTKVRLPKLYLKHQMDLVATLSQLGLQELFQAPDLRGISEQSLVVSGVQHQSTLELSEVGVEAAAATSIAMSRMSLSSFSVNRPFLFFIFEDTTGLPLFVGSVRNPNPSAPRELKEQQDSPGNKDFLQSLKGFPRGDKLFGPDLKLVPPMEEDYPQFGSPK

SEQ ID NO: 12106 - protein, 491 aa, Homo sapiens; identical to SEQ ID NO: 12105

SEQ ID NO: 12107 - protein, 255 aa, Homo sapiens
MALLWGLLVLSWSCLQGPCSVFSPVSAMEPLGRQLTSGPNQEQVSPLTLLKLGNQEPGGQTALKSPPGVCSRDPTPEQTHRLARAMMAFTADLFSLVAQTSTCPNLILSPLSVALALSHLALGAQNHTLQRLQQVLHAGSGPCLPHLLSRLCQDLGPGAFRLAARMYLQKGFPIKEDFLEQSEQLFGAKPVSLTGKQEDDLANINQWVKEATEGKIQEFLSGLPEDTVLLLLNAIHFQGFWRNKFDPSLTQRDSF

SEQ ID NO: 12108 - protein, 264 aa, Homo sapiens
MALLWGLLVLSWSCLQGPCSVFSPVSAMEPLGRQLTSGPNQEQVSPLTLLKLGNQEPGGQTALKSPPGVCSRDPTPEQTHRLARAMMAFTADLFSLVAQTSTCPNLILSPLSVALALSHLALGFWRNKFDPSLTQRDSFHLDEQFTVPVEMMQARTYPLRWFLLEQPEIQVAHFPFKNNMSFVVLVPTHFEWNVSQVLANLSWDTLHPPLVWERPTKVRLPKLYLKHQMDLVATLSQLGLQELFQAPDLRGISEQSLVVSGVQH

SEQ ID NO: 12109 - protein, 427 aa, Homo sapiens
MALLWGLLVLSWSCLQGPCSVFSPVSAMEPLGRQLTSGPNQEQVSPLTLLKLGNQVQPGAQNHTLQRLQQVLHAGSGPCLPHLLSRLCQDLGPGAFRLAARMYLQKGFPIKEDFLEQSEQLFGAKPVSLTGKQEDDLANINQWVKEATEGKIQEFLSGLPEDTVLLLLNAIHFQGFWRNKFDPSLTQRDSFHLDEQFTVPVEMMQARTYPLRWFLLEQPEIQVAHFPFKNNMSFVVLVPTHFEWNVSQVLANLSWDTLHPPLVWERPTKVRLPKLYLKHQMDLVATLSQLGLQELFQAPDLRGISEQSLVVSGVQHQSTLELSEVGVEAAAATSIAMSRMSLSSFSVNRPFLFFIFEDTTGLPLFVGSVRNPNPSAPRELKEQQDSPGNKDFLQSLKGFPRGDKLFGPDLKLVPPMEEDYPQFGSPK

SEQ ID NO: 12110 - protein, 86 aa, Homo sapiens
AKWKTTFDPKKTRMEPFHFKNSVIKVPMMNSKKYPVAHFIDQTLKAKPWPRQTLYILGWKQDSQVSSCISTILNGKMWGSCSSPTI

SEQ ID NO: 12111 - protein, 133 aa, Homo sapiens [sequence omitted]

SEQ ID NO: 12112 - protein, 160 aa, Homo sapiens
MASRLTLLTLLLLLLAGDRASSNPNATSSSSQDPESLQDRGEGKVATTVISKMLFVEPILEVSSLPTTNSTTNSATKITANTTDEPTTQPTTEPTTQPTIQPTQPTTQLPTDSPTQPTTGSFCPGPVTLCSDLESHSTEAVLGDALVDFSLKLYHAFSAM

SEQ ID NO: 12113 - protein, 500 aa, Homo sapiens
MASRLTLLTLLLLLLAGDRASSNPNATSSSSQDPESLQDRGEGKVATTVISKMLFVEPILEVSSLPTTNSTTNSATKITANTTDEPTTQPTTEPTTQPTIQPTQPTTQLPTDSPTQPTTGSFCPGPVTLCSDLESHSTEAVLGDALVDFSLKLYHAFSAMKKVETNMAFSPFSIASLLTQVLLGAGENTKTNLESILSYPKDFTCVHQALKGFTTKGVTSVSQIFHSPDLAIRDTFVNASRTLYSSSPRVLSNNSDANLELINTWVAKNTNNKISRLLDSLPSDTRLVLLNAIYLSAKWKTTFDPKKTRMEPFHFKNSVIKVPMMNSKKYPVAHFIDQTLKAKVGQLQLSHNLSLVILVPQNLKHRLEDMEQALSPSVFKAIMEKLEMSKFQPTLLTLPRIKVTTSQDMLSIMEKLEFFDFSYDLNLCGLTEDPDLQVSAMQHQTVLELTETGVEAAAASAISVARTLLVFEVQQPFLFVLWDQQHKFPVFMGRVYDPRA

SEQ ID NO: 12114 - protein, 463 aa, Homo sapiens
MASRLTLLTLLLLLLAGDRASSNPNATSSSSQDPESLQDRGEGKVATTVISKMLFVEPILEVSSLPTTNSTTNSATKITANTTDEPTTQPTTEPTTQPTIQPTQPTTQLPTDSPTQPTTGSFCPGPVTLCSDLESHSTEAVLGDALVDFSLKLYHAFSAMKKVETNMAFSPFSIASLLTQVLLGAGENTKTNLESILSYPKDFTCVHQALKGFTTKGVTSVSQIFHSPDLAIRDTFVNASRTLYSSSPRVLSNNSDANLELINTWVAKNTNNKISRLLDSLPSDTRLVLLNAIYLSAKWKTTFDPKKTRMEPFHFKNSVIKVPMMNSKKYPVAHFIDQTLKAKAIMEKLEMSKFQPTLLTLPRIKVTTSQDMLSIMEKLEFFDFSYDLNLCGLTEDPDLQVSAMQHQTVLELTETGVEAAAASAISVARTLLVFEVQQPFLFVLWDQQHKFPVFMGRVYDPRA

SEQ ID NO: 12115 - protein, 505 aa, Homo sapiens
MASRLTLLTLLLLLLAGFLEPQDRASSNPNATSSSSQDPESLQDRGEGKVATTVISKMLFVEPILEVSSLPTTNSTTNSATKITANTTDEPTTQPTTEPTTQPTIQPTQPTTQLPTDSPTQPTTGSFCPGPVTLCSDLESHSTEAVLGDALVDFSLKLYHAFSAMKKVETNMAFSPFSIASLLTQVLLGAGENTKTNLESILSYPKDFTCVHQALKGFTTKGVTSVSQIFHSPDLAIRDTFVNASRTLYSSSPRVLSNNSDANLELINTWVAKNTNNKISRLLDSLPSDTRLVLLNAIYLSAKWKTTFDPKKTRMEPFHFKNSVIKVPMMNSKKYPVAHFIDQTLKAKVGQLQLSHNLSLVILVPQNLKHRLEDMEQALSPSVFKAIMEKLEMSKFQPTLLTLPRIKVTTSQDMLSIMEKLEFFDFSYDLNLCGLTEDPDLQVSAMQHQTVLELTETGVEAAAASAISVARTLLVFEVQQPFLFVLWDQQHKFPVFMGRVYDPRA

SEQ ID NO: 12116 - protein, 43 aa, Homo sapiens
MASRLTLLTLLLLLLAGGLGRTPKQTWRASSLTPRTSPVSTRP

SEQ ID NO: 12117 - protein, 43 aa, Homo sapiens; identical to SEQ ID NO: 12116

SEQ ID NO: 12118 - protein, 122 aa, Homo sapiens
MGAGPGRGGGPWAPRVGAGSEAGWLRRSADVAAQMASRLTLLTLLLLLLAGDRASSNPNATSSSSQDPESLQDRGEGKVATTVISKMLFVEPILEVSSLPTTNSTTNSATKITANTTDEPTT

SEQ ID NO: 12119 - protein, 543 aa, Homo sapiens
MGAGPGRGGGPWAPRVGAGSEAGWLRRSADVAAQMASRLTLLTLLLLLLAGDRASSNPNATSSSSQDPESLQDRGEGKVATTVISKMLFVEPILEVSSLPTTNSTTNSATKITANTTDEPTTQPTTEPTTQPTIQPTQPTTQLPTDSPTQPTTGSFCPGPVTLCSDLESHSTEAVLGDALVDFSLKLYHAFSAMKKVETNMAFSPFSIASLLTQVLLGAGENTKTNLESILSYPKDFTCVHQALKGFTTKGVTSVSQIFHSPDLAIRDTFVNASRTLYSSSPRVLSNNSDANLELINTWVAKNTNNKISRLLDSLPSDTRLVLLNAIYLSEQPSHLFPLAKWKTTFDPKKTRMEPFHFKNSVIKVPMMNSKKYPVAHFIDQTLKAKVGQLQLSHNLSLVILVPQNLKHRLEDMEQALSPSVFKAIMEKLEMSKFQPTLLTLPRIKVTTSQDMLSIMEKLEFFDFSYDLNLCGLTEDPDLQVSAMQHQTVLELTETGVEAAAASAISVARTLLVFEVQQPFLFVLWDQQHKFPVFMGRVYDPRA

SEQ ID NO: 12120 - protein, 448 aa, Homo sapiens
MLFVEPILEVSSLPTTNSTTNSATKITANTTDEPTTQPTTEPTTQPTIQPTQPTTQLPTDSPTQPTTGSFCPGPVTLCSDLESHSTEAVLGDALVDFSLKLYHAFSAMKKVETNMAFSPFSIASLLTQVLLGAGENTKTNLESILSYPKDFTCVHQALKGFTTKGVTSVSQIFHSPDLAIRDTFVNASRTLYSSSPRVLSNNSDANLELINTWVAKNTNNKISRLLDSLPSDTRLVLLNAIYLSAKWKTTFDPKKTRMEPFHFKNSVIKVPMMNSKKYPVAHFIDQTLKAKVGQLQLSHNLSLVILVPQNLKHRLEDMEQALSPSVFKAIMEKLEMSKFQPTLLTLPRIKVTTSQDMLSIMEKLEFFDFSYDLNLCGLTEDPDLQVSAMQHQTVLELTETGVEAAAASAISVARTLLVFEVQQPFLFVLWDQQHKFPVFMGRVYDPRA

SEQ ID NO: 12121 - protein, 150 aa, Homo sapiens
MRSLLLLSAFCLLEAALAAEVKKPAAAAAPGTAEKLSPKAATLAERSAGLAFSLYQAMAKDQAVENILVSPVVVASSLGLVSLGGKATTASQAKAVLSAEQLRDEEVHAGLGELLRSLSNSTARNVTWKLGSRLYGPSSVSFADDFVRSS

SEQ ID NO: 12122 - protein, 165 aa, Homo sapiens
MRSLLLLSAFCLLEAALAAEVKKPAAAAAPGTAEKLSPKAATLAERSAGLAFSLYQAMAKDQAVENILVSPVVVASSLGLVSLGGKATTASQAKAVLSAEQLRDEEVHAGLGELLRSLSNSTARNVTWKLGSRLYGPSSVSFADDFVRSSKQHYNCEHSKINFRD

SEQ ID NO: 12123 - protein, 167 aa, Homo sapiens
MRSLLLLSAFCLLEAALAAEVKKPAAAAAPGTAEKLSPKAATLAERSAGLAFSLYQAMAKDQAVENILVSPVVVASSLGLVSLGGKATTASQAKAVLSAEQLRDEEVHAGLGELLRSLSNSTARNVTWKLGSRLYGPSSVSFADDFVRSSKQHYNCEHSKINFRDKR

SEQ ID NO: 12124 - protein, 203 aa, Homo sapiens
MRSLLLLSAFCLLEAALAAEVKKPAAAAAPGTAEKLSPKAATLAERSAGLAFSLYQAMAKDQAVENILVSPVVVASSLGLVSLGGKATTASQAKAVLSAEQLRDEEVHAGLGELLRSLSNSTARNVTWKLGSRLYGPSSVSFADDFVRSSKQHYNCEHSKINFRDKRSALQSINEWAAQTTDGKLPEVTKDVERTDGALLVNA

SEQ ID NO: 12125 - protein, 247 aa, Homo sapiens
MRSLLLLSAFCLLEAALAAEVKKPAAAAAPGTAEKLSPKAATLAERSAGLAFSLYQAMAKDQAVENILVSPVVVASSLGLVSLGGKATTASQAKAVLSAEQLRDEEVHAGLGELLRSLSNSTARNVTWKLGSRLYGPSSVSFADDFVRSSKQHYNCEHSKINFRDKRSALQSINEWAAQTTDGKLPEVTKDVERTDGALLVNAMFFKPHWDEKFHHKMVDNRGFMVTRSYTVGVMMMHRTGLYNYYD

SEQ ID NO: 12126 - protein, 249 aa, Homo sapiens
MRSLLLLSAFCLLEAALAAEVKKPAAAAAPGTAEKLSPKAATLAERSAGLAFSLYQAMAKDQAVENILVSPVVVASSLGLVSLGGKATTASQAKAVLSAEQLRDEEVHAGLGELLRSLSNSTARNVTWKLGSRLYGPSSVSFADDFVRSSKQHYNCEHSKINFRDKRSALQSINEWAAQTTDGKLPEVTKDVERTDGALLVNAMFFKPHWDEKFHHKMVDNRGFMVTRSYTVGVMMMHRTGLYNYYDDE

SEQ ID NO: 12127 - protein, 418 aa, Homo sapiens
MRSLLLLSAFCLLEAALAAEVKKPAAAAAPGTAEKLSPKAATLAERSAGLAFSLYQAMAKDQAVENILVSPVVVASSLGLVSLGGKATTASQAKAVLSAEQLRDEEVHAGLGELLRSLSNSTARNVTWKLGSRLYGPSSVSFADDFVRSSKQHYNCEHSKINFRDKRSALQSINEWAAQTTDGKLPEVTKDVERTDGALLVNAMFFKPHWDEKFHHKMVDNRGFMVTRSYTVGVMMMHRTGLYNYYDDEKEKLQIVEMPLAHKLSSLIILMPHHVEPLERLEKLLTKEQLKIWMGKMQKKAVAISLPKGVVEVTHDLQKHLAGLGLTEAIDKNKADLSRMSGKKDLYLASVFHATAFELDTDGNPFDQDIYGREELRSPKLFYADHPFIFLVRDTQSGSLLFIGRLVRPKGDKMRDEL

SEQ ID NO: 12128 - protein, 418 aa, Homo sapiens; identical to SEQ ID NO: 12127

SEQ ID NO: 12129 - protein, 295 aa, Homo sapiens
MRSLLLLSAFCLLEAALAAEVKKPAAAAAPGTAEKLSPKAATLAERSAGLAFSLYQAMAKDQAVENILVSPVVVASSLGLVSLGGKATTASQAKAVLSAEQLRDEEVHAGLGELLRSLSNSTARNVTWKLGSRLYGPSSVSFADDFVRSSKQHYNCEHSKINFRDKRSALQSINEWAAQTTDGKLPEVTKDVERTDGALLVNAMFFKPHWDEKFHHKMVDNRGFMVTRSYTVGVMMMHRTGLYNYYDDEKEKLQIVEMPLAHKLSSLIILMPHHVEPLERLEKLLTKEQLKIWMG

SEQ ID NO: 12130 - protein, 418 aa, Homo sapiens; identical to SEQ ID NO: 12127

SEQ ID NO: 12131 - protein, 324 aa, Homo sapiens
MRSLLLLSAFCLLEAALAAEVKKPAAAAAPGTAEKLSPKAATLAERSAGLAFSLYQAMAKDQAVENILVSPVVVASSLGLVSLGGKATTASQAKAVLSAEQLRDEEVHAGLGELLRSLSNSTARNVTWKLGSRLYGPSSVSFADDFVRSSKQHYNCEHSKINFRDKRSALQSINEWAAQTTDGKLPEVTKDVERTDGALLVNAMFFKPHWDEKFHHKMVDNRGFMVTRSYTVGVMMMHRTGLYNYYDDEKEKLQIVEMPLAHKLSSLIILMPHHVEPLERLEKLLTKEQLKIWMGKMQKKAVAISLPKGVVEVTHDLQVRGGPA

SEQ ID NO: 12132 - protein, 142 aa, Homo sapiens
MRSLLLLSAFCLLEAALAAEVKKPAAAAAPGTAEKLSPKATTASQAKAVLSAEQLRDEEVHAGLGELLRSLSNSTARNVTWKLGSRLYGPSSVSFADDFVRSSKQHYNCEHSKINFRDKRSALQSINEWAAQTTDGKLPEVT

SEQ ID NO: 12133 - protein, 86 aa, Homo sapiens [sequence omitted]

SEQ ID NO: 12134 - protein, 201 aa, Homo sapiens
MVDNRGFMVTRSYTVGVMMMHRTGLYNYYDDEKEKLQIVEMPLAHKLSSLIILMPHHVEPLERLEKLLTKEQLKIWMGKMQKKAVAISLPKGVVEVTHDLQKHLAGLGLTEAIDKNKADLSRMSGKKDLYLASVFHATAFELDTDGNPFDQDIYGREELRSPKLFYADHPFIFLVRDTQSGSLLFIGRLVRPKGDKMRDEL

SEQ ID NO: 12135 - protein, 56 aa, Homo sapiens
  SITE 1: note = misc_feature - Xaa can be any naturally occurring amino acid
XNPFDQDIYGREELRSPKLFYADHPFIFLVRDTQSGSLLFIGRLVRPKGDKMRDEL

SEQ ID NO: 12136 - protein, 160 aa, Homo sapiens
MAFLGLFSLLVLQSMATGATFPEEAIADLSVNMYNRLRATGEDENILFSPLSIALAMGMMELGAQGSTQKEIRHSMGYDSLKNGEEFSFLKEFSNMVTAKESQYVMKIANSLFVQNGFHVNEEFLQMMKKYFNAAVNHVDFSQNVAVANYINKWVENNTN

SEQ ID NO: 12137 - protein, 245 aa, Homo sapiens
MAFLGLFSLLVLQSMATGATFPEEAIADLSVNMYNRLRATGEDENILFSPLSIALAMGMMELGAQGSTQKEIRHSMGYDSLKNGEEFSFLKEFSNMVTAKESQYVMKIANSLFVQNGFHVNEEFLQMMKKYFNAAVNHVDFSQNVAVANYINKWVENNTNNLVKDLVSPRDFDAATYLALINAVYFKGNWKSQFRPENTRTFSFTKDDESEVQIPMMYQQGEFYYGEFSDGSNEAGGIYQVLEIP

SEQ ID NO: 12138 - protein, 410 aa, Homo sapiens
MAFLGLFSLLVLQSMATGATFPEEAIADLSVNMYNRLRATGEDENILFSPLSIALAMGMMELGAQGSTQKEIRHSMGYDSLKNGEEFSFLKEFSNMVTAKESQYVMKIANSLFVQNGFHVNEEFLQMMKKYFNAAVNHVDFSQNVAVANYINKWVENNTNNLVKDLVSPRDFDAATYLALINAVYFKGNWKSQFRPENTRTFSFTKDDESEVQIPMMYQQGEFYYGEFSDGSNEAGGIYQVLEIPYEGDEISMMLVLSRQEVPLATLEPLVKAQLVEEWANSVKKQKVEVYLPRFTVEQEIDLKDVLKALGITEIFIKDANLTGLSDNKEIFLSKAIHKSFLEVNEEGSEAAAVSGMIAISRMAVLYPQVIVDHPFFFLIRNRRTGTILFMGRVMHPETMNTSGHDFEEL

SEQ ID NO: 12139 - protein, 410 aa, Homo sapiens; identical to SEQ ID NO: 12138

SEQ ID NO: 12140 - protein, 119 aa, Homo sapiens
  SITE 1: note = misc_feature - Xaa can be any naturally occurring amino acid
XSRFTVEQEIDLKDVLKALGITEIFIKDANLTGLSDNKEIFLSKAIHKSFLEVNEEGSEAAAVSGMIAISRMAVLYPQVIVDHPFFFLIRNRRTGTILFMGRVMHPETMNTSGHDFEEL

SEQ ID NO: 12141 - protein, 157 aa, Homo sapiens
MDTIFLWSLLLLFFGSQASRCSAQKNTEFAVDLYQEVSLSHKDNIIFSPLGITLVLEMVQLGAKGKAQQQIRQTLKQQETSAEKKQEFTFNLANALYLQEGFTVKEQYLHGNKEFFQSAIKLVDFQDAKACAEMISTWVERKTDGKIKDMFSGEEFG

SEQ ID NO: 12142 - protein, 206 aa, Homo sapiens
MDTIFLWSLLLLFFGSQASRCSAQKNTEFAVDLYQEVSLSHKDNIIFSPLGITLVLEMVQLGAKGKAQQQIRQTLKQQETSAGEEFFVLKSFFSAISEKKQEFTFNLANALYLQEGFTVKEQYLHGNKEFFQSAIKLVDFQDAKACAEMISTWVERKTDGKIKDMFSGEEFGPLTRLVLVNAIYFKGDWKQKFRKEDTQLINFTKK

SEQ ID NO: 12143 - protein, 405 aa, Homo sapiens
MDTIFLWSLLLLFFGSQASRCSAQKNTEFAVDLYQEVSLSHKDNIIFSPLGITLVLEMVQLGAKGKAQQQIRQTLKQQETSAGEEFFVLKSFFSAISEKKQEFTFNLANALYLQEGFTVKEQYLHGNKEFFQSAIKLVDFQDAKACAEMISTWVERKTDGKIKDMFSGEEFGPLTRLVLVNAIYFKGDWKQKFRKEDTQLINFTKKNGSTVKIPMMKALLRTKYGYFSESSLNYQVLELSYKGDEFSLIIILPAEGMDIEEVEKLITAQQILKWLSEMQEEEVEISLPRFKVEQKVDFKDVLYSLNITEIFSGGCDLSGITDSSEVYVSQVTQKVFFEINEDGSEAATSTGIHIPVIMSLAQSQFIANHPFLFIMKHNPTESILFMGRVTNPDTQEIKGRDLDSL

SEQ ID NO: 12144 - protein, 405 aa, Homo sapiens; identical to SEQ ID NO: 12143

SEQ ID NO: 12145 - protein, 405 aa, Homo sapiens; identical to SEQ ID NO: 12143

SEQ ID NO: 12146 - protein, 405 aa, Homo sapiens; identical to SEQ ID NO: 12143

SEQ ID NO: 12147 - protein, 415 aa, Homo sapiens
MIQNLMREVKMDTIFLWSLLLLFFGSQASRCSAQKNTEFAVDLYQEVSLSHKDNIIFSPLGITLVLEMVQLGAKGKAQQQIRQTLKQQETSAGEEFFVLKSFFSAISEKKQEFTFNLANALYLQEGFTVKEQYLHGNKEFFQSAIKLVDFQDAKACAEMISTWVERKTDGKIKDMFSGEEFGPLTRLVLVNAIYFKGDWKQKFRKEDTQLINFTKKNGSTVKIPMMKALLRTKYGYFSESSLNYQVLELSYKGDEFSLIIILPAEGMDIEEVEKLITAQQILKWLSEMQEEEVEISLPRFKVEQKVDFKDVLYSLNITEIFSGGCDLSGITDSSEVYVSQVTQKVFFEINEDGSEAATSTGIHIPVIMSLAQSQFIANHPFLFIMKHNPTESILFMGRVTNPDTQEIKGRDLDSL

SEQ ID NO: 12148 - protein, 853 aa, Homo sapiens
MGTPRAQHPPPPQLLFLILLSCPWIQGLPLKEEEILPEPGSETPTVASEALAELLHGALLRRGPEMGYLPGPPLGPEGGEEETTTTIITTTTVTTTVTSPVLCNNNISEGEGYVESPDLGSPVSRTLGLLDCTYSIHVYPGYGIEIQVQTLNLSQEEELLVLAGGGSPGLAPRLLANSSMLGEGQVLRSPTNRLLLHFQSPRVPRGGGFRIHYQAYLLSCGFPPRPAHGDVSVTDLHPGGTATFHCDSGYQLQGEETLICLNGTRPSWNGETPSCMASCGGTIHNATLGRIVSPEPGGAVGPNLTCRWVIEAAEGRRLHLHFERVSLDEDNDRLMVRSGGSPLSPVIYDSDMDDVPERGLISDAQSLYVELLSETPANPLLLSLRFEAFEEDRCFAPFLAHGNVTTTDPEYRPGALATFSCLPGYALEPPGPPNAIECVDPTEPHWNDTEPACKAMCGGELSEPAGVVLSPDWPQSYSPGQDCVWGVHVQEEKRILLQVEILNVREGDMLTLFDGDGPSARVLAQLRGPQPRRRLLSSGPDLTLQFQAPPGPPNPGLGQGFVLHFKEVPRNDTCPELPPPEWGWRTASHGDLIRGTVLTYQCEPGYELLGSDILTCQWDLSWSAAPPACQKIMTCADPGEIANGHRTASDAGFPVGSHVQYRCLPGYSLEGAAMLTCYSRDTGTPKWSDRVPKCALKYEPCLNPGVPENGYQTLYKHHYQAGESLRFFCYEGFELIGEVTITCVPGHPSQWTSQPPLCKVAYEELLDNRKLEVTQTTDPSRQLEGGNLALAILLPLGLVIVLGSGVYIYYTKLQGKSLFGFSGSHSYSPITVESDFSNPLYEAGDTREYEVSI

SEQ ID NO: 12149 - protein, 809 aa, Homo sapiens
MGTPRAQHPPPPQLLFLILLSCPWIQGLPLKEEEILPEPGSETPTVASEALAELLHGALLRRGPEMGYLPGSDRDPTLATPPAGQTLAVPSLPRATEPGTGPLTTAVTPNGVRGAGPTAPELLTPPPGTTAPPPPSPASPGPPLGPEGGEEETTTTIITTTTVTTTVTSPAYLLSCGFPPRPAHGDVSVTDLHPGGTATFHCDSGYQLQGEETLICLNGTRPSWNGETPSCMASCGGTIHNATLGRIVSPEPGGAVGPNLTCRWVIEAAEGRRLHLHFERVSLDEDNDRLMVRSGGSPLSPVIYDSDMDDVPERGLISDAQSLYVELLSETPANPLLLSLRFEAFEEDRCFAPFLAHGNVTTTDPEYRPGALATFSCLPGYALEPPGPPNAIECVDPTEPHWNDTEPACKAMCGGELSEPAGVVLSPDWPQSYSPGQDCVWGVHVQEEKRILLQVEILNVREGDMLTLFDGDGPSARVLAQLRGPQPRRRLLSSGPDLTLQFQAPPGPPNPGLGQGFVLHFKEVPRNDTCPELPPPEWGWRTASHGDLIRGTVLTYQCEPGYELLGSDILTCQWDLSWSAAPPACQKIMTCADPGEIANGHRTASDAGFPVGSHVQYRCLPGYSLEGAAMLTCYSRDTGTPKWSDRVPKCALKYEPCLNPGVPENGYQTLYKHHYQAGESLRFFCYEGFELIGEVTITCVPGHPSQWTSQPPLCKVAYEELLDNRKLEVTQTTDPSRQLEGGNLALAILLPLGLVIVLGSGVYIYYTKLQGKSLFGFSGSHSYSPITVESDFSNPLYEAGDTREYEVSI

SEQ ID NO: 12150 - protein, 910 aa, Homo sapiens
MGTPRAQHPPPPQLLFLILLSCPWIQGLPLKEEEILPEPGSETPTVASEALAELLHGALLRRGPEMGYLPGSDRDPTLATPPAGQTLAVPSLPRATEPGTGPLTTAVTPNGVRGAGPTAPELLTPPPGTTAPPPPSPASPGPPLGPEGGEEETTTTIITTTTVTTTVTSPVLCNNNISEGEGYVESPDLGSPVSRTLGLLDCTYSIHVYPGYGIEIQVQTLNLSQEEELLVLAGGGSPGLAPRLLANSSMLGEGQVLRSPTNRLLLHFQSPRVPRGGGFRIHYQAYLLSCGFPPRPAHGDVSVTDLHPGGTATFHCDSGYQLQGEETLICLNGTRPSWNGETPSCMASCGGTIHNATLGRIVSPEPGGAVGPNLTCRWVIEAAEGRRLHLHFERVSLDEDNDRLMVRSGGSPLSPVIYDSDMDDVPERGLISDAQSLYVELLSETPANPLLLSLRFEAFEEDRCFAPFLAHGNVTTTDPEYRPGALATFSCLPGYALEPPGPPNAIECVDPTEPHWNDTEPACKAMCGGELSEPAGVVLSPDWPQSYSPGQDCVWGVHVQEEKRILLQVEILNVREGDMLTLFDGDGPSARVLAQLRGPQPRRRLLSSGPDLTLQFQAPPGPPNPGLGQGFVLHFKEVPRNDTCPELPPPEWGWRTASHGDLIRGTVLTYQCEPGYELLGSDILTCQWDLSWSAAPPACQKIMTCADPGEIANGHRTASDAGFPVGSHVQYRCLPGYSLEGAAMLTCYSRDTGTPKWSDRVPKCALKYEPCLNPGVPENGYQTLYKHHYQAGESLRFFCYEGFELIGEVTITCVPGHPSQWTSQPPLCKVTQTTDPSRQLEGGNLALAILLPLGLVIVLGSGVYIYYTKLQGKSLFGFSGSHSYSPITVESDFSNPLYEAGDTREYEVSI

SEQ ID NO: 12151 - protein, 923 aa, Homo sapiens
MGTPRAQHPPPPQLLFLILLSCPWIQGLPLKEEEILPEPGSETPTVASEALAELLHGALLRRGPEMGYLPGSDRDPTLATPPAGQTLAVPSLPRATEPGTGPLTTAVTPNGVRGAGPTAPELLTPPPGTTAPPPPSPASPGPPLGPEGGEEETTTTIITTTTVTTTVTSPVLCNNNISEGEGYVESPDLGSPVSRTLGLLDCTYSIHVYPGYGIEIQVQTLNLSQEEELLVLAGGGSPGLAPRLLANSSMLGEGQVLRSPTNRLLLHFQSPRVPRGGGFRIHYQAYLLSCGFPPRPAHGDVSVTDLHPGGTATFHCDSGYQLQGEETLICLNGTRPSWNGETPSCMASCGGTIHNATLGRIVSPEPGGAVGPNLTCRWVIEAAEGRRLHLHFERVSLDEDNDRLMVRSGGSPLSPVIYDSDMDDVPERGLISDAQSLYVELLSETPANPLLLSLRFEAFEEDRCFAPFLAHGNVTTTDPEYRPGALATFSCLPGYALEPPGPPNAIECVDPTEPHWNDTEPACKAMCGGELSEPAGVVLSPDWPQSYSPGQDCVWGVHVQEEKRILLQVEILNVREGDMLTLFDGDGPSARVLAQLRGPQPRRRLLSSGPDLTLQFQAPPGPPNPGLGQGFVLHFKEVPRNDTCPELPPPEWGWRTASHGDLIRGTVLTYQCEPGYELLGSDILTCQWDLSWSAAPPACQKIMTCADPGEIANGHRTASDAGFPVGSHVQYRCLPGYSLEGAAMLTCYSRDTGTPKWSDRVPKCALKYEPCLNPGVPENGYQTLYKHHYQAGESLRFFCYEGFELIGEVTITCVPGHPSQWTSQPPLCKVAYEELLDNRKLEVTQTTDPSRQLEGGNLALAILLPLGLVIVLGSGVYIYYTKLQGKSLFGFSGSHSYSPITVESDFSNPLYEAGDTREYEVSI

SEQ ID NO: 12152 - protein, 81 aa, Homo sapiens
MGTPRAQHPPPPQLLFLILLSCPWIQGSDRDPTLATPPAGQTLAVPSLPRATEPGTGPLTTAVTPNGVRGAGPTAPELLTP

SEQ ID NO: 12153 - protein, 879 aa, Homo sapiens
MGTPRAQHPPPPQLLFLILLSCPWIQGSDRDPTLATPPAGQTLAVPSLPRATEPGTGPLTTAVTPNGVRGAGPTAPELLTPPPGTTAPPPPSPASPGPPLGPEGGEEETTTTIITTTTVTTTVTSPVLCNNNISEGEGYVESPDLGSPVSRTLGLLDCTYSIHVYPGYGIEIQVQTLNLSQEEELLVLAGGGSPGLAPRLLANSSMLGEGQVLRSPTNRLLLHFQSPRVPRGGGFRIHYQAYLLSCGFPPRPAHGDVSVTDLHPGGTATFHCDSGYQLQGEETLICLNGTRPSWNGETPSCMASCGGTIHNATLGRIVSPEPGGAVGPNLTCRWVIEAAEGRRLHLHFERVSLDEDNDRLMVRSGGSPLSPVIYDSDMDDVPERGLISDAQSLYVELLSETPANPLLLSLRFEAFEEDRCFAPFLAHGNVTTTDPEYRPGALATFSCLPGYALEPPGPPNAIECVDPTEPHWNDTEPACKAMCGGELSEPAGVVLSPDWPQSYSPGQDCVWGVHVQEEKRILLQVEILNVREGDMLTLFDGDGPSARVLAQLRGPQPRRRLLSSGPDLTLQFQAPPGPPNPGLGQGFVLHFKEVPRNDTCPELPPPEWGWRTASHGDLIRGTVLTYQCEPGYELLGSDILTCQWDLSWSAAPPACQKIMTCADPGEIANGHRTASDAGFPVGSHVQYRCLPGYSLEGAAMLTCYSRDTGTPKWSDRVPKCALKYEPCLNPGVPENGYQTLYKHHYQAGESLRFFCYEGFELIGEVTITCVPGHPSQWTSQPPLCKVAYEELLDNRKLEVTQTTDPSRQLEGGNLALAILLPLGLVIVLGSGVYIYYTKLQGKSLFGFSGSHSYSPITVESDFSNPLYEAGDTREYEVSI

SEQ ID NO: 12154 - protein, 303 aa, Homo sapiens
  SITE 1: note = misc_feature - Xaa can be any naturally occurring amino acid
XCLNGTRPSWNGETPSCMASCGGTIHNATLGRIVSPEPGGAVGPNLTCRWVIEAAEGRRLHLHFERVSLDEDNDRLMVRSGGSPLSPVIYDSDMDDVPERGLISDAQSLYVELLSETPANPLLLSLRFEAMCGGELSEPAGVVLSPDWPQSYSPGQDCVWGVHVQEEKRILLQVEILNVREGDMLTLFDGDGPSARVLAQLRGPQPRRRLLSSGPDLTLQFQAPPGPPNPGLGQGFVLHFKEVPRNDTCPELPPPEWGWRTASHGDLIRGTVLTYQCEPGYELLGSDILTCQWDLSWSAAPPA

SEQ ID NO: 12155 - protein, 314 aa, Homo sapiens
MGIGRSEGGRRGAALGVLLALGAALLAVGSASEYDYVSFQSDIGPYQSGRFYTKPPQCVDIPADLRLCHNVGYKKMVLPNLLEHETMAEVKQQASSWVPLLNKNCHAGTQVFLCSLFAPVCLDRPIYPCRWLCEAVRDSCEPVMQFFGFYWPEMLKCDKFPEGDVCIAMTPPNATEASKPQGTTVCPPCDNELKSEAIIEHLCASEFALRMKIKEVKKENGDKKIVPKKKKPLKLGPIKKKDLKKLVLYLKNGADCPCHQLDNLSHHFLIMGRKVKSQYLLTAIHKWDKKNKEFKNFMKKMKNHECPTFQSVFK

SEQ ID NO: 12156 - protein, 178 aa, Homo sapiens
MGWGNPIIAVFRTPFAPWLQFHWSAPFSAWLGTVLTHLHSSQQRSGTTVCPPCDNELKSEAIIEHLCASEFALRMKIKEVKKENGDKKIVPKKKKPLKLGPIKKKDLKKLVLYLKNGADCPCHQLDNLSHHFLIMGRKVKSQYLLTAIHKWDKKNKEFKNFMKKMKNHECPTFQSVFK

SEQ ID NO: 12157 - protein, 295 aa, Homo sapiens
MLQGPGSLLLLFLASHCCLGSARGLFLFGQPDFSYKRSNCKPIPANLQLCHGIEYQNMRLPNLLGHETMKEVLEQAGAWIPLVMKQCHPDTKKFLCSLFAPVCLDDLDETIQPCHSLCVQVKDRCAPVMSAFGFPWPDMLECDRFPQDNDLCIPLASSDHLLPATEEAPKVCEACKNKNDDDNDIMETLCKNDFALKIKVKEITYINRDTKIILETKSKTIYKLNGVSERDLKKSVLWLKDSLQCTCEEMNDINAPYLVMGQKQGGELVITSVKRWQKGQREFKRISRSIRKLQC

SEQ ID NO: 12158 - protein, 346 aa, Homo sapiens
MFLSILVALCLWLHLALGVRGAPCEAVRIPMCRHMPWNITRMPNHLHHSTQENAILAIEQYEELVDVNCSAVLRFFLCAMYAPICTLEFLHDPIKPCKSVCQRARDDCEPLMKMYNHSWPESLACDELPVYDRGVCISPEAIVTDLPEDVKWIDITPDMMVQERPLDVDCKRLSPDRCKCKKVKPTLATYLSKNYSYVIHAKIKAVQRSGCNEVTTVVDVKEIFKSSSPIPRTQVPLITNSSCQCPHILPHQDVLIMCYEWRSRMMLLENCLVEKWRDQLSKRSIQWEERLQEQRRTVQDKKKTAGRTSRSNPPKPKGKPPAPKPASPKKNIKTRSAQKRTNPKRV

SEQ ID NO: 12159 - protein, 137 aa, Homo sapiens
MQLEQSIIPDIPAKDVKWIDITPDMMVQERPLDVDCKRLSPDRCKCKKVKPTLATYLSKNYSYVIHAKIKAVQRSGCNEVTTVVDVKEIFKSSSPIPRTQVPLITNSSCQCPHILPHQDVLIMCYEWRSRMMLLENC

SEQ ID NO: 12160 - protein, 317 aa, Homo sapiens
MRAAAAGGGVRTAALALLLGALHWAPARCEEYDYYGWQAEPLHGRSYSKPPQCLDIPADLPLCHTVGYKRMRLPNLLEHESLAEVKQQASSWLPLLAKRCHSDTQVFLCSLFAPVCLDRPIYPCRSLCEAVRAGCAPLMEAYGFPWPEMLHCHKFPLDNDLCIAVQFGHLPATAPPVTKICAQCEMEHSADGLMEQMCSSDFVVKMRIKEIKIENGDRKLIGAQKKKKLLKPGPLKRKDTKRLVLHMKNGAGCPCPQLDSLAGSFLVMGRKVDGQLLLMAVYRWDKKNKEMKFAVKFMFSYPCSLYYPFFYGAAEPH

SEQ ID NO: 12161 - protein, 78 aa, Homo sapiens
MGSGLPLVLLLTLLGSSHGTGPGMTLQLKLKESFLTNSSYESSFLELLEKLCLLLHLPSGTSVTLHHARSQHHVVCNT

SEQ ID NO: 12162 - protein, 55 aa, Homo sapiens
MTLQLKLKESFLTNSSYESSFLELLEKLCLLLHLPSGTSVTLHHARSQHHVVCNT

SEQ ID NO: 12163 - protein, 263 aa, Homo sapiens
MRPCQVPGAATGPRAMWLCPLALNLILMAASGAVCEVKDVCVGSPGIPGTPGSHGLPGRDGRDGLKGDPGPPGPMGPPGEMPCPPGNDGLPGAPGIPGECGEKGEPGERGPPGLPAHLDEELQATLHDFRHQILQTRGALSLQGSIMTVGEKVFSSNGQSITFDAIQEACARAGGRIAVPRNPEENEAIASFVKKYNTYAYVGLTEGPSPGDFRYSDGTPVNYTNWYRGEPAGRGKEQCVEMYTDGQWNDRNCLYSRLTICEF

SEQ ID NO: 12164 - protein, 158 aa, Homo sapiens
MWLCPLALNLILMAASGAVCEVKDVCVGSPGIPGTPGSHGLPGRDGRDGLKGDPGPPGPMGPPGEMPCPPGNDGLPGAPGIPGECGEKGEPGERGPPGLPAHLDEELQATLHDFRHQILQTRGALSLQGSIMTVGEKVFSSNGQSITFDAIQEACARA

SEQ ID NO: 12165 - protein, 158 aa, Homo sapiens; identical to SEQ ID NO: 12164

SEQ ID NO: 12166 - protein, 248 aa, Homo sapiens
MWLCPLALNLILMAASGAVCEVKDVCVGSPGIPGTPGSHGLPGRDGRDGLKGDPGPPGPMGPPGEMPCPPGNDGLPGAPGIPGECGEKGEPGERGPPGLPAHLDEELQATLHDFRHQILQTRGALSLQGSIMTVGEKVFSSNGQSITFDAIQEACARAGGRIAVPRNPEENEAIASFVKKYNTYAYVGLTEGPSPGDFRYSDGTPVNYTNWYRGEPAGRGKEQCVEMYTDGQWNDRNCLYSRLTICEF

SEQ ID NO: 12167 - protein, 248 aa, Homo sapiens; identical to SEQ ID NO: 12166

SEQ ID NO: 12168 - protein, 38 aa, Homo sapiens
MRPCQVPGAATGPRAMWLCPLALTLILMAASGAACEVK

SEQ ID NO: 12169 - protein, 98 aa, Homo sapiens
MWLCPLALTLILMAASGAACEVKDVCVGSPGIPGTPGSHGLPGRDGRDGVKGDPGPPGPMGPPGETPCPPGNNGLPGAPGVPGERGEKGEAGERGPPG

SEQ ID NO: 12170 - protein, 158 aa, Homo sapiens
MWLCPLALTLILMAASGAACEVKDVCVGSPGIPGTPGSHGLPGRDGRDGVKGDPGPPGPMGPPGETPCPPGNNGLPGAPGVPGERGEKGEAGERGPPGLPAHLDEELQATLHDFRHQILQTRGALSLQGSIMTVGEKVFSSNGQSITFDAIQEACARA

SEQ ID NO: 12171 - protein, 248 aa, Homo sapiens
MWLCPLALTLILMAASGAACEVKDVCVGSPGIPGTPGSHGLPGRDGRDGVKGDPGPPGPMGPPGETPCPPGNNGLPGAPGVPGERGEKGEAGERGPPGLPAHLDEELQATLHDFRHQILQTRGALSLQGSIMTVGEKVFSSNGQSITFDAIQEACARAGGRIAVPRNPEENEAIASFVKKYNTYAYVGLTEGPSPGDFRYSDGTPVNYTNWYRGEPAGRGKEQCVEMYTDGQWNDRNCLYSRLTICEF

SEQ ID NO: 12172 - protein, 248 aa, Homo sapiens; identical to SEQ ID NO: 12171

SEQ ID NO: 12173 - protein, 381 aa, Homo sapiens
MAESHLLQWLLLLLPTLCGPGTAAWTTSSLACAQGPEFWCQSLEQALQCRALGHCLQEVWGHVGADDLCQECEDIVHILNKMAKEAIFQDTMRKFLEQECNVLPLKLLMPQCNQVLDDYFPLVIDYFQNQTDSNGICMHLGLCKSRQPEPEQEPGMSDPLPKPLRDPLPDPLLDKLVLPVLPGALQARPGPHTQDLSEQQFPIPLPYCWLCRALIKRIQAMIPKGALAVAVAQVCRVVPLVAGGICQCLAERYSVILLDTLLGRMLPQLVCRLVLRCSMDDSAGPRSPTGEWLPRDSECHLCMSVTTQAGNSSEQAIPQAMLQACVGSWLDREKCKQFVEQHTPQLLTLVPRGWDAHTTCQALGVCGTMSSPLQCIHSPDL

SEQ ID NO: 12174 - protein, 381 aa, Homo sapiens; identical to SEQ ID NO: 12173

SEQ ID NO: 12175 - protein, 393 aa, Homo sapiens
MHQAGYPGCRGAMAESHLLQWLLLLLPTLCGPGTAAWTTSSLACAQGPEFWCQSLEQALQCRALGHCLQEVWGHVGADDLCQECEDIVHILNKMAKEAIFQDTMRKFLEQECNVLPLKLLMPQCNQVLDDYFPLVIDYFQNQTDSNGICMHLGLCKSRQPEPEQEPGMSDPLPKPLRDPLPDPLLDKLVLPVLPGALQARPGPHTQDLSEQQFPIPLPYCWLCRALIKRIQAMIPKGALAVAVAQVCRVVPLVAGGICQCLAERYSVILLDTLLGRMLPQLVCRLVLRCSMDDSAGPRSPTGEWLPRDSECHLCMSVTTQAGNSSEQAIPQAMLQACVGSWLDREKCKQFVEQHTPQLLTLVPRGWDAHTTCQALGVCGTMSSPLQCIHSPDL

SEQ ID NO: 12176 - protein, 92 aa, Homo sapiens
  SITE 1: note = misc_feature - Xaa can be any naturally occurring amino acid
XEWLPRDSECHLCMSVTTQAGNSSEQAIPQAMLQACVGSWLDREKCKQFVEQHTPQLLTLVPRGWDAHTTCQALGVCGTMSSPLQCIHSPDL

SEQ ID NO: 12177 - protein, 374 aa, Homo sapiens
  SITE 1: note = misc_feature - Xaa can be any naturally occurring amino acid
XHLLQWLLLLLPTLCGPGTAAWTTSSLACAQGPEFWCQSLEQALQCRALGHCLQEVWGHVGADDLCQECEDIVHILNKMAKEAIFQDTMRKFLEQECNVLPLKLLMPQCNQVLDDYFPLVIDYFQNQTDSNGICMHLGLCKSRQPEPEQEPGMSDPLPKPLRDPLPDPLLDKLVLPVLPGALQARPGPHTQDLSEQQFPIPLPYCWLCRALIKRIQAMIPKGALAVAVAQVCRVVPLVAGGICQCLAERYSVILLDTLLGRMLPQLVCRLVLRCSMDDSAGPREWLPRDSECHLCMSVTTQAGNSSEQAIPQAMLQACVGSWLDREKCKQFVEQHTPQLLTLVPRGWDAHTTCQALGVCGTMSSPLQCIHSPDL

SEQ ID NO: 12178 - protein, 218 aa, Homo sapiens
MFLSTSKHGRQEAMLLFLLSALVLLTQPLGYLEAEMKTYSHRTMPSACTLVMCSSVESGLPGRDGRDGREGPRGEKGDPGLPGAAGQAGMPGQAGPVGPKGDNGSVGEPGPKGDTGPSGPPGPPGVPGPAGREGPLGKQGNIGPQGKPGPKGEAGPKGEVGAPGMQGSAGARGLAGPKGERGVPGERGVPGNTGAAGSAGAMGPQGSPGARGPPGLKG

SEQ ID NO: 12179 - protein, 375 aa, Homo sapiens
MLLFLLSALVLLTQPLGYLEAEMKTYSHRTMPSACTLVMCSSVESGLPGRDGRDGREGPRGEKGDPGLPGAAGQAGMPGQAGPVGPKGDNGSVGEPGPKGDTGPSGPPGPPGVPGPAGREGPLGKQGNIGPQGKPGPKGEAGPKGEVGAPGMQGSAGARGLAGPKGERGVPGERGVPGNTGAAGSAGAMGPQGSPGARGPPGLKGDKGIPGDKGAKGESGLPDVASLRQQVEALQGQVQHLQAAFSQYKKVELFPNGQSVGEKIFKTAGFVKPFTEAQLLCTQAGGQLASPRSAAENAALQQLVVAKNEAAFLSMTDSKTEGKFTYPTGESLVYSNWAPGEPNDDGGSEDCVEIFTNGKWNDRACGEKRLVVCEF

SEQ ID NO: 12180 - protein, 88 aa, Homo sapiens
MADTATTASAAAASAASASSDAPPFQLGKPRFQQTSFYGRFRHFLDIIDPRTLFVTEMESCTVPQAHCNPCLLGSETSQRGCAAAGGL

SEQ ID NO: 12181 - protein, 340 aa, Homo sapiens
MADTATTASAAAASAASASSDAPPFQLGKPRFQQTSFYGRFRHFLDIIDPRTLFVTERRLREAVQLLEDYKHGTLRPGVTNEQLWSAQKIKQAILHPDTNEKIFMPFRMSGYIPFGTPIVVGLLLPNQTLASTVFWQWLNQSHNACVNYANRNATKPSPASKFIQGYLGAVISAVSIAVGLNVLVQKANKFTPATRLLIQRFVPFPAVASANICNVVLMRYGELEEGIDVLDSDGNLVGSSKIAARHALLETALTRVVLPMPILVLPPIVMSMLEKTALLQARPRLLLPVQSLVCLAAFGLALPLAISLFPQMSEIETSQLEPEIAQATSSRTVVYNKGL

SEQ ID NO: 12182 - protein, 253 aa, Homo sapiens
MADTATTASAAAASAASASSDAPPFQLGKPRFQQTSFYGRFRHFLDIIDPRTLFVTERRLREAVQLLEDYKHGTLRPGVTNEQLWSAQKIKQAILHPDTNEKIFMPFRMSGYIPFGTPIVVGLLLPNQTLASTVFWQWLNQSHNACVNYANRNATKPSPASKFIQGYLGAVISAVSIAVGLNVLVQKANKFTPATRLLIQRFVPFPAVGRLSCRHAPGCSSLCKASCAWQPSAWPCRWPSASSRKCQRLKHPN

SEQ ID NO: 12183 - protein, 156 aa, Homo sapiens
MADTATTASAAAASAASASSDAPPFQLGKPRFQQTSFYGRFRHFLDIIDPRTLFVTERRLREAVQLLEDYKHGTLRPGVTNEQLWSAQKIKQVIFLLGRQFRSSLAQPDTGIHCLLWLNQSHNACVNYANRNATKPSPASKFIQGYLGAVISAVSI

SEQ ID NO: 12184 - protein, 252 aa, Homo sapiens
  SITE 1: note = misc_feature - Xaa can be any naturally occurring amino acid
XAASAASASSDAPPFQLGKPRFQQTSFYGRFRHFLDIIDPRTLFVTERRLREAVQLLEDYKHGTLRPGVTNEQLWSAQKIKQAILHPDTNEKIFMPFRMSGYIPFGTPIVVGLLLPNQTLASTVFWQWLNQSHNACVNYANRNATKPSPASKFIQGYLGAVISAVSIAVGLNVLVQKANKFTPATRLLIQRFVPFPAVGPAGDGADASGPAHAHPGATPDRHVHAGEIETSQLEPEIAQATSSRTVVYNKGL

SEQ ID NO: 12185 - protein, 196 aa, Homo sapiens
LRHSSGLLSSWVTAYNRDSFDTTRQRLVLEIGDPEGPLLPYQAEFLVRSHDAEEVLPSTPASRFLSALGGLWEPGELQLLNVTSALDRGGRVPLPIEGRKEGLKRDLATSDIQMVHHCTIHGNTEELRQMAASREVPRPLSTLPMFNVHTVVPGPALTSSSLLCPHHEWHIPPADSSSWPSWNPGSKQAGRGGGVG

SEQ ID NO: 12186 - protein, 65 aa, Homo sapiens
MAETLFWTPLLVGKLGPCSAGRPRMRGQDLGVFSWQGWGTPRPSRPRYTHLWAVSLCTPWTMRRF

SEQ ID NO: 12187 - protein, 263 aa, Homo sapiens
MAETLFWTPLLVVLLAGLGDTEAQQTTLHPLVGRVFVHTLDHETFLSLPEHVAVPPAVHITYHAHLQGHPDLPRWLRYTQRSPHHPGFLYGSATPEDRGLQVIEVTAYNRDSFDTTRQRLVLEIGDPEGPLLPYQAEFLVRSHDAEEVLPSTPASRFLSALGGLWEPGELQLLNVTSALDRGGRVPLPIEGRKEGLKRDLATSDIQMVHHCTIHGNTEELRQMAASREVPRPLSTLPMFNVHTGERLPPRVDSAQVPLILDQH

SEQ ID NO: 12188 - protein, 298 aa, Homo sapiens
MAETLFWTPLLVVLLAGLGDTEAQQTTLHPLVGRVFVHTLDHETFLSLPEHVAVPPAVHITYHAHLQGHPDLPRWLRYTQRSPHHPGFLYGSATPEDRGLQVIEVTAYNRDSFDTTRQRLVLEIGDPEGPLLPYQAEFLVRSHDAEEVLPSTPASRFLSALGGLWEPGELQLLNVTSALDRGGRVPLPIEGRKEGVYIKVGSASPFSTCLKMVASPDSHARCAQGQPPLLSCYDTLAPHFRVDWCNVTLAEERPGYLRHPDGPPLHHPREHRGAAADGGQPRGAPATLHPAHVQCAHR

SEQ ID NO: 12189 - protein, 387 aa, Homo sapiens
MAETLFWTPLLVVLLAGLGDTEAQQTTLHPLVGRVFVHTLDHETFLSLPEHVAVPPAVHITYHAHLQGHPDLPRWLRYTQRSPHHPGFLYGSATPEDRGLQVIEVTAYNRDSFDTTRQRLVLEIGDPEGPLLPYQAEFLVRSHDAEEVLPSTPASRFLSALGGLWEPGELQLLNVTSALDRGGRVPLPIEGRKEGVYIKVGSASPFSTCLKMVASPDSHARCAQGQPPLLSCYDTLAPHFRVDWCNVTLVDKSVPEPADEVPTPGDGILEHDPFFCPPTEAPDRDFLVDALVTLLVPLLVALLLTLLLAYVMCCRREGRLKRDLATSDIQMVHHCTIHGNTEELRQMAASREVPRPLSTLPMFNVHTGERLPPRVDSAQVPLILDQH

SEQ ID NO: 12190 - protein, 61 aa, Homo sapiens
MAETLFWTPLLVVLLAGLGDTEAQQTTLHPLVGRVFVHTLDHETFLSLPEHVGHSLQSGQL

SEQ ID NO: 12191 - protein, 58 aa, Homo sapiens
  SITE 1: note = misc_feature - Xaa can be any naturally occurring amino acid
XCPTRCPHHLPRPPPGTPRPAPVAPLHPAQPPPPWLPLRLCHPRRSWAPGHSLQSGQL

SEQ ID NO: 12192 - protein, 160 aa, Homo sapiens
  SITE 1: note = misc_feature - Xaa can be any naturally occurring amino acid
XLDRGGRVPLPIEGRKEGVYIKVDKSVPEPADEVPTPGDGILEHDPFFCPPTEAPDRDFLVDALVTLLVPLLVALLLTLLLAYVMCCRREGRLKRDLATSDIQMVHHCTIHGNTEELRQMAASREVPRPLSTLPMFNVHTGERLPPRVDSAQVPLILDQH

SEQ ID NO: 12193 - protein, 108 aa, Homo sapiens
MSCPVPACCALLLVLGLCRARPRNALLLLADDGGFESGAYNNSAIATPHLDALARRSLLFRNAFTSVSSCSPSRASLLTGLPQAFLPLRRLPRPPPLWALPAPVRNLL

SEQ ID NO: 12194 - protein, 227 aa, Homo sapiens
MSCPVPACCALLLVLGLCRARPRNALLLLADDGGFESGAYNNSAIATPHLDALARRSLLFRNAFTSVSSCSPSRASLLTGLPQASSGRSTWGRRPCTRLTLRTRRRMAPSSRWGGTSLELSCSSGNSCRLRMTGLSSSTSPSTTPTAVGTPSPSTEPSVRSLATERAAWVVSQTGPPRPTTHWTCWCLTSSPTPRQPEPTWPLSTPPSAAWTKELDWCSRSCVTPVS

SEQ ID NO: 12195 - protein, 502 aa, Homo sapiens
MSCPVPACCALLLVLGLCRARPRNALLLLADDGGFESGAYNNSAIATPHLDALARRSLLFRNAFTSVSSCSPSRASLLTGLPQHQNGMYGLHQDVHHFNSFDKVRSLPLLLSQAGVRTGIIGKKHVGPETVYPFDFAYTEENGSVLQVGRNITRIKLLVRKFLQTQDDRPFFLYVAFHDPHRCGHSQPQYGTFCEKFGNGESGMGRIPDWTPQAYDPLDVLVPYFVPNTPAARADLAAQYTTVGRMDQGVGLVLQELRDAGVLNDTLVIFTSDNGIPFPSGRTNLYWPGTAEPLLVSSPEHPKRWGQVSEAYVSLLDLTPTILDWFSIPYPSYAIFGSKTIHLTGRSLLPALEAEPLWATVFGSQSHHEVTMSYPMRSVQHRHFRLVHNLNFKMPFPIDQDFYVSPTFQDLLNRTTAGQPTGWYKDLRHYYYRARWELYDRSRDPHETQNLATDPRFAQLLEMLRDQLAKWQWETHDPWVCAPDGVLEEKLSPQCQPLHNEL

SEQ ID NO: 12196 - protein, 188 aa, Homo sapiens [sequence omitted]

SEQ ID NO: 12197 - protein, 274 aa, Homo sapiens
MSCPVPACCALLLVLGLCRARPRNALLLLADRALSVSHLTQRMTEALRVARTTTAPSPPRTWTPWPAAASSFAMPSPRSAAALPAAPASSLACPSIRMGCTGCTRTCTTSTPSTRCGACRCCSAKLVCAQASSGRSTWGRRPCTRLTLRTRRRMAPSSRWGGTSLELSCSSGNSCRLRMTGLSSSTSPSTTPTAVGTPSPSTEPSVRSLATERAAWVVSQTGPPRPTTHWTCWCLTSSPTPRQPEPTWPLSTPPSAAWTKELDWCSRSCVTPVS

SEQ ID NO: 12198 - protein, 110 aa, Homo sapiens
MYGLHQDVHHFNSFDKVRSLPLLLSQAGVRTGIIGKKHVGPETVYPFDFAYTEENGSVLQVGRNITRIKLLVRKFLQTQDDRPFFLYVAFHDPHRCGHSQPQYGTFCEKF

SEQ ID NO: 12199 - protein, 67 aa, Homo sapiens
VIFTSDNGIPFPSGRTNLYWPGTAEPLLVSSPEHPKRWGQVSEAYVSLLEEKNEAQRGEVSCSGLHS

SEQ ID NO: 12200 - protein, 106 aa, Homo sapiens
  SITE 1: note = misc_feature - Xaa can be any naturally occurring amino acid
XARPRNALLLLADDGGFESGAYNNSAIATPHLDALARRSLLFRNAFTSVSSCSPSRASLLTGLPQHQNGMYGLHQDVHHFNSFDKVRSLPLLLSQAGVRTGGAEHH

SEQ ID NO: 12201 - protein, 194 aa, Homo sapiens
  SITE 1: note = misc_feature - Xaa can be any naturally occurring amino acid
XFDFAYTEENGSVLQVGRNITRIKLLVRKFLQTQDDRPFFLYVAFHDPHRCGHSQPQYGTFCEKFGNGESGMGRIPDWTPQAYDPLDVLVPYFVPNTPAARADLAAQYTTVGRMDQGVGLVLQELRDAGVLNDTLVIFTSDNGIPFPSGRTNLYWPGTAEPLLVSSPEHPKRWGQVSEAYVSLLVTRLLLPTVK

SEQ ID NO: 12202 - protein, 882 aa, Homo sapiens
MLLGASWLCASKAAAAAAQSEGDEDRPGERRRRRAAATAAGAGEDMDESSLLDLLECSVCLERLDTTAKVLPCQHTFCRRCLESIVCSRHELRCPECRILVGCGVDELPANILLVRLLDGIRQRPRAGTSPGGSPPARPIPGQSAAPTLAGGGGGAAGSTPGSPVFLSAAAGSTAGSLRELATSRTAPAAKNPCLLPYGKALYSYEGKEPGDLKFNKGDIIVLRRKVDEQWYHGELHGTQGFLPASYIQCIQPLPHAPPQGKALYDFEMKDKDQDKDCLTFTKDEILTVLRRVDENWAEGMLGDKIGIFPLLYVELNDSAKQLIEMDKPCPAAASSCNASLPSDSGAVASVAPSPTLSSSGAVSAFQRRVDGKKNTKKRHSFTALSVTHRSSQAASHRHSMEISAPVLISSSDPRAAARIGDLAHLSCAAPTQDVSSSAGSTPTAVPRAASVSGEQGTPPKVQLPLNVYLALYAYKPQKSDELELHKGEMYRVLEKCQDGWFKGASLRTGVSGVFPGNYVTPVSRVPAGGAGPPRNNVVGGSPLAKGITTTMHPGSGSLSSLATATRPALPITTPQAHAQHPTASPPTGSCLRHSAQPTASQARSTISTAAHSAAQAQDRPTATVSPLRTQNSPSRLPATSLRPHSVVSPQHSHQPPVQMCPRPAIPLTSAASAITPPNVSAANLNGEAGGGPIGVLSTSSPTNTGCKLDEKKSEKKEKKSGLLKLLAGASTKKKSRSPPSVSPTHDPQVAVDALLQGAVGPEVSSLSIHGRAGSCPIESEMQGAMGMEPLHRKAGSLDLNFTSPSRQAPLSMAAIRPEPKLLPRERYRVVVSYPPQSEAEIELKEGDIVFVHKKREDGWYKGTLQRNGRTGLFPGSFVESF

SEQ ID NO: 12203 - protein, 181 aa, Homo sapiens
MESRGPLATSRLLLLLLLLLLRHTRQGWALRPVLPTQSAHDPPAVHLSNGPGQEPIAVMTFDLTKITKTSSSFEVRTWDPEGVIFYGDTNPKDDWFMLGLRDGRPEIQLHNHWAQLTVGAAPETGLWAPDQQTPSHHEDCAWGAALPRFQPSVAAGSCPGWLPAPGFLAGQTGRDLSICPH

SEQ ID NO: 12204 - protein, 384 aa, Homo sapiens
MESRGPLATSRLLLLLLLLLLRHTRQGWALRPVLPTQSAHDPPAVHLSNGPGQEPIAVMTFDLTKITKTSSSFEVRTWDPEGVIFYGDTNPKDDWFMLGLRDGRPEIQLHNHWAQLTVGAGPRLDDGRWHQVEVKMEGDSVLLEVDGEEVLRLRQVSGPLTSKRHPIMRIALGGLLFPASNLRLPAEISASAPTSLRSCDVESNPGIFLPPGTQAEFNLRDIPQPHAEPWAFSLDLGLKQAAGSGHLLALGTPENPSWLSLHLQDQKVVLSSGSGPGLDLPLVLGLPLQLKLSMSRVVLSQGSKMKALALPPLGLAPLLNLWAKPQGRLFLGALPGEDSSTSFCLNGLWAQGQRLDVDQALNRSHEIWTHSCPQSPGNGTDASH

SEQ ID NO: 12205 - protein, 402 aa, Homo sapiens
MESRGPLATSRLLLLLLLLLLRHTRQGWALRPVLPTQSAHDPPAVHLSNGPGQEPIAVMTFDLTKITKTSSSFEVRTWDPEGVIFYGDTNPKDDWFMLGLRDGRPEIQLHNHWAQLTVGAGPRLDDGRWHQVEVKMEGDSVLLEVDGEEVLRLRQVSGPLTSKRHPIMRIALGGLLFPASNLRLPLVPALDGCLRRDSWLDKQAEISASAPTSLRSCDVESNPGIFLPPGTQAEFNLRDIPQPHAEPWAFSLDLGLKQAAGSGHLLALGTPENPSWLSLHLQDQKVVLSSGSGPGLDLPLVLGLPLQLKLSMSRVVLSQGSKMKALALPPLGLAPLLNLWAKPQGRLFLGALPGEDSSTSFCLNGLWAQGQRLDVDQALNRSHEIWTHSCPQSPGNGTDASH

SEQ ID NO: 12206 - protein, 293 aa, Homo sapiens
MESRGPLATSRLLLLLLLLLLRHTRQGWALRPVLPTQSAHDPPAVHLSNGPGQEPIAVMTFDLTKITKTSSSFEVRTWDPEGVIFYGDTNPKDDWFMLGLRDGRPEIQLHNHWAQLTVGAGPRLDDGRWHQVEVKMEGDSVLLEVDGEEVLRLRQVSGPLTSKRHPIMRIALGGLLFPASNLRLPLVPALDGCLRRDSWLDKQAEISASAPTSLRSCDVESNPGIFLPPGTQAEFNLRDIPQPHAEPWAFSLDLGLKQAAGSGHLLALGTPENPSWLSLHLQDQEKTLPPLFA

SEQ ID NO: 12207 - protein, 287 aa, Homo sapiens
MESRGPLATSRLLLLLLLLLLRHTRQGWALRPVLPTQSAHDPPAVHLSNGPGQEPIAVMTFDLTKITKTSSSFEVRTWDPEGVIFYGDTNPKDDWFMLGLRDGRPEIQLHNHWAQLTVGAGPRLDDGRWHQVEVKMEGDSVLLEVDGEEVLRLRQVSGPLTSKRHPIMRIALGGLLFPASNLRLPLVPALDGCLRRDSWLDKQAEISASAPTSLRSCDVESNPGIFLPPGTQAEFNLRGEDSSTSFCLNGLWAQGQRLDVDQALNRSHEIWTHSCPQSPGNGTDASH

SEQ ID NO: 12208 - protein, 57 aa, Homo sapiens
MESRGPLATSRLLLLLLLLLLRHTRQGWALRPVLPTQVQERDRALSSCSLPFSPLAL

SEQ ID NO: 12209 - protein, 82 aa, Homo sapiens
MTFDLTKITKTSSSFEVRTWDPEGVIFYGDTNPKDDWFMLGLRDGRPEIQLHNHWAQLTVGAGPRLDDGRWHQEKTLPPLFA

SEQ ID NO: 12210 - protein, 181 aa, Homo sapiens
MTFDLTKITKTSSSFEVRTWDPEGVIFYGDTNPKDDWFMLGLRDGRPEIQLHNHWAQLTVGAGPRLDDGRWHQLVPALDGCLRRDSWLDKQAEISASAPTSLRSCDVESNPGIFLPPGTQAEFNLRDIPQPHAEPWAFSLDLGLKQAAGSGHLLALGTPENPSWLSLHLQDQEKTLPPLFA

SEQ ID NO: 12211 - protein, 290 aa, Homo sapiens
MTFDLTKITKTSSSFEVRTWDPEGVIFYGDTNPKDDWFMLGLRDGRPEIQLHNHWAQLTVGAGPRLDDGRWHQLVPALDGCLRRDSWLDKQAEISASAPTSLRSCDVESNPGIFLPPGTQAEFNLRDIPQPHAEPWAFSLDLGLKQAAGSGHLLALGTPENPSWLSLHLQDQKVVLSSGSGPGLDLPLVLGLPLQLKLSMSRVVLSQGSKMKALALPPLGLAPLLNLWAKPQGRLFLGALPGEDSSTSFCLNGLWAQGQRLDVDQALNRSHEIWTHSCPQSPGNGTDASH

SEQ ID NO: 12212 - protein, 175 aa, Homo sapiens
MTFDLTKITKTSSSFEVRTWDPEGVIFYGDTNPKDDWFMLGLRDGRPEIQLHNHWAQLTVGAGPRLDDGRWHQLVPALDGCLRRDSWLDKQAEISASAPTSLRSCDVESNPGIFLPPGTQAEFNLRGEDSSTSFCLNGLWAQGQRLDVDQALNRSHEIWTHSCPQSPGNGTDASH

SEQ ID NO: 12213 - protein, 93 aa, Homo sapiens
MTFDLTKITKTSSSFEVRTWDPEGVIFYGDTNPKDDWFMLGLRDGRPEIQLHNHWAQLTVGAGPRLDDGRWHQVEVKMEGDSVLLEVDGEEVL

SEQ ID NO: 12214 - protein, 235 aa, Homo sapiens
MTFDLTKITKTSSSFEVRTWDPEGVIFYGDTNPKDDWFMLGLRDGRPEIQLHNHWAQLTVGAGPRLDDGRWHQVEVKMEGDSVLLEVDGEEVLRLRQVSGPLTSKRHPIMRIALGGLLFPASNLRLPLVPALDGCLRRDSWLDKQAEISASAPTSLRSCDVESNPGIFLPPGTQAEFNLRDIPQPHAEPWAFSLDLGLKQAAGSGHLLALGTPENPSWLSLHLQDQEKTLPPLFA

SEQ ID NO: 12215 - protein, 344 aa, Homo sapiens
MTFDLTKITKTSSSFEVRTWDPEGVIFYGDTNPKDDWFMLGLRDGRPEIQLHNHWAQLTVGAGPRLDDGRWHQVEVKMEGDSVLLEVDGEEVLRLRQVSGPLTSKRHPIMRIALGGLLFPASNLRLPLVPALDGCLRRDSWLDKQAEISASAPTSLRSCDVESNPGIFLPPGTQAEFNLRDIPQPHAEPWAFSLDLGLKQAAGSGHLLALGTPENPSWLSLHLQDQKVVLSSGSGPGLDLPLVLGLPLQLKLSMSRVVLSQGSKMKALALPPLGLAPLLNLWAKPQGRLFLGALPGEDSSTSFCLNGLWAQGQRLDVDQALNRSHEIWTHSCPQSPGNGTDASH

SEQ ID NO: 12216 - protein, 344 aa, Homo sapiens; identical to SEQ ID NO: 12215

SEQ ID NO: 12217 - protein, 229 aa, Homo sapiens
MTFDLTKITKTSSSFEVRTWDPEGVIFYGDTNPKDDWFMLGLRDGRPEIQLHNHWAQLTVGAGPRLDDGRWHQVEVKMEGDSVLLEVDGEEVLRLRQVSGPLTSKRHPIMRIALGGLLFPASNLRLPLVPALDGCLRRDSWLDKQAEISASAPTSLRSCDVESNPGIFLPPGTQAEFNLRGEDSSTSFCLNGLWAQGQRLDVDQALNRSHEIWTHSCPQSPGNGTDASH

SEQ ID NO: 12218 - protein, 113 aa, Homo sapiens
WALRPVLPTQSAHDPPAVHLSNGPGQEPIAVMTFDLTKITKTSSSFEVRTWDPEGVIFYGDTNPKDDWFMLGLRDGRPEIQLHNHWAQLTVGAGPRLDDGRWHQEKTLPPLFA

SEQ ID NO: 12219 - protein, 212 aa, Homo sapiens
WALRPVLPTQSAHDPPAVHLSNGPGQEPIAVMTFDLTKITKTSSSFEVRTWDPEGVIFYGDTNPKDDWFMLGLRDGRPEIQLHNHWAQLTVGAGPRLDDGRWHQLVPALDGCLRRDSWLDKQAEISASAPTSLRSCDVESNPGIFLPPGTQAEFNLRDIPQPHAEPWAFSLDLGLKQAAGSGHLLALGTPENPSWLSLHLQDQEKTLPPLFA

SEQ ID NO: 12220 - protein, 206 aa, Homo sapiens
WALRPVLPTQSAHDPPAVHLSNGPGQEPIAVMTFDLTKITKTSSSFEVRTWDPEGVIFYGDTNPKDDWFMLGLRDGRPEIQLHNHWAQLTVGAGPRLDDGRWHQLVPALDGCLRRDSWLDKQAEISASAPTSLRSCDVESNPGIFLPPGTQAEFNLRGEDSSTSFCLNGLWAQGQRLDVDQALNRSHEIWTHSCPQSPGNGTDASH

SEQ ID NO: 12221 - protein, 260 aa, Homo sapiens
WALRPVLPTQSAHDPPAVHLSNGPGQEPIAVMTFDLTKITKTSSSFEVRTWDPEGVIFYGDTNPKDDWFMLGLRDGRPEIQLHNHWAQLTVGAGPRLDDGRWHQVEVKMEGDSVLLEVDGEEVLRLRQVSGPLTSKRHPIMRIALGGLLFPASNLRLPLVPALDGCLRRDSWLDKQAEISASAPTSLRSCDVESNPGIFLPPGTQAEFNLRGEDSSTSFCLNGLWAQGQRLDVDQALNRSHEIWTHSCPQSPGNGTDASH

SEQ ID NO: 12222 - protein, 495 aa, Homo sapiens
MQWSPTPGASACLGWASSLACSTAPTLLGRAGRGPLMAAKWFKEFPLNLKTVSERAKPGGGGGKLRKNSEAGGAGPGPGKGRKNSAAELGSGRAGVGPKDSRLSRDSLQGLIQAAAGKGRKNSRATEEEPHRGATKSSGCSTYINRLIKVDTQEKNGKSNYPSSSSSSSSSSSSASSSPSSLGPELDKGKIIKQQETVIILEDYADPYDAKRTKGQRDAERVGENDGYMEPYDAQQMITEIRRRGSKDPLVKALQLLDSPCEPADGGLKSETLAKRRSSKDLLGKPPQLYDTPYEPAEGGPRAEGKARPPDSRLPENDERPAAEYEQPWEWKKEQIVRALSVQFEGAERPSFREETVRQHHRQKSWTQKILKPALSDHSEGEKVDPGLPLEKQPWYHGAISRAEAESRLQPCKEAGYLVRNSESGNSRYSIALKTSQGCVHIIVAQTKDNKYTLNQTSAVFDSIPEVVHYYSNEKLPFKGAEHMTLLYPVHSKLH

SEQ ID NO: 12223 - protein, 132 aa, Homo sapiens
  SITE 1: note = misc_feature - Xaa can be any naturally occurring amino acid
XEGKARPPDSRLPENDERPAAEYEQPWEWKKEQIVRALSVQFEGAERPSFREETVRQHHRQKSWTQKILKPALSDHSEGEKVDPGLPLEKQPWYHGAISRAEAESRLQPCKEAGYLVRNSESGNSRYSIALK

SEQ ID NO: 12224 - protein, 41 aa, Homo sapiens
  SITE 1: note = misc_feature - Xaa can be any naturally occurring amino acid
XSRAEAESRLQPCKEAGYLVRNSESGNSRYSIALKNHHLLS

SEQ ID NO: 12225 - protein, 462 aa, Homo sapiens
MLLLARCLLLVLVSSLLVCSGLACGPGRGFGKRRHPKKLTPLAYKQFIPNVAEKTLGASGRYEGKISRNSERFKELTPNYNPDIIFKDEENTGADRLMTQRCKDKLNALAISVMNQWPGVKLRVTEGWDEDGHHSEESLHYEGRAVDITTSDRDRSKYGMLARLAVEAGFDWVYYESKAHIHCSVKAENSVAAKSGGCFPGSATVHLEQGGTKLVKDLSPGDRVLAADDQGRLLYSDFLTFLDRDDGAKKVFYVIETREPRERLLLTAAHLLFVAPHNDSATGEPEASSGSGPPSGGALGPRALFASRVRPGQRVYVVAERDGDRRLLPAAVHSVTLSEEAAGAYAPLTAQGTILINRVLASCYAVIEEHSWAHRAFAPFRLAHALLAALAPARTDRGGDSGGGDRGGGGGRVALTAPGAADAPGAGATAGIHWYSQLLYQIGTWLLDSEALHPLGMAVKSS

SEQ ID NO: 12226 - protein, 126 aa, Homo sapiens
MLSLFPSPGPGSSRCKDKLNALAISVMNQWPGVKLRVTEGWDEDGHHSEESLHYEGRAVDITTSDRDRSKYGMLARLAVEAGFDWVYYESKAHIHCSVKAGGQQVPGWCLQSRRKCDGFCSFDSSV

SEQ ID NO: 12227 - protein, 169 aa, Homo sapiens
MLSLFPSPGPGSSRCKDKLNALAISVMNQWPGVKLRVTEGWDEDGHHSEESLHYEGRAVDITTSDRDRSKYGMLARLAVEAGFDWVYYESKAHIHCSVKAGKERKPLLRDTRYRASRGCSPAPPGRGADFSFRVDGAKSLCKMYAWWLLPASLMTKCISIPVKTCITMY

SEQ ID NO: 12228 - protein, 123 aa, Homo sapiens
MLSLFPSPGPGSSRCKDKLNALAISVMNQWPGVKLRVTEGWDEDGHHSEESLHYEGRAVDITTSDRDRSKYGMLARLAVEAGFDWVYYESKAHIHCSVKAVQSDFKSVESEPEAPGTAAPLAV

SEQ ID NO: 12229 - protein, 262 aa, Homo sapiens
KFPLRMKDNDLLVSELYRDPAEDGVTALSVYLTPKTSDSGNWIEIAYGTSSGGVRVIVQHPETVGSGPQLFQTFTVHRSPVTKIMLSEKHLISVCADNNHVRTWSVTRFRGMISTQPGSTPLASFKILALESADGHGGCSAGNDIGGLTEQELMEQLEHCELAPPAPSAPSWGCLPSPSPRISLTSLHSASSNTSLSGHRGSPSPPQAEARRRGGGSFVERCQELVRSGPDLRRPPTPAPWPSSGLGTPLTPPKMKLNETSF

SEQ ID NO: 12230 - protein, 141 aa, Homo sapiens
MAAAATAAEGVPSRGPPGEVIHLNVGGKRFSTSRQTLTWIPDSFFSSLLSGRISTLKDETGAIFIDRDPTVFAPILNFLRTKELDPRGVHGSSLLHEAQFYGLTPLVLLLQFVACSFERSWIDLLVETSSSMVTCRHQCSQ

SEQ ID NO: 12231 - protein, 707 aa, Homo sapiens
MAAAATAAEGVPSRGPPGEVIHLNVGGKRFSTSRQTLTWIPDSFFSSLLSGRISTLKDETGAIFIDRDPTVFAPILNFLRTKELDPRGVHGSSLLHEAQFYGLTPLVRRLQLREELDRSSCGNVLFNGYLPPPVFPVKRRNRHSLVGPQQLGGRPAPVRRSNTMPPNLGNAGLLGRMLDEKTPPSPSGQPEEPGMVRLVCGHHNWIAVAYTQFLVCYRLKEASGWQLVFSSPRLDWPIERLALTARVHGGALGEHDKMVAAATGSEILLWALQAEGGGSEIGVFHLGVPVEALFFVGNQLIATSHTGRIGVWNAVTKHWQVQEVQPITSYDAAGSFLLLGCNNGSIYYVDVQKFPLRMKDNDLLVSELYRDPAEDGVTALSVYLTPKTSDSGNWIEIAYGTSSGGVRVIVQHPETVGSGPQLFQTFTVHRSPVTKIMLSEKHLISVCADNNHVRTWSVTRFRGMISTQPGSTPLASFKILALESADGHGGCSAGNDIGPYGERDDQQVFIQKVVPSASQLFVRLSSTGQRVCSVRSVDGSPTTAFTVLECEGSRRLGSRPRRYLLTGQANGSLAMWDLTTAMDGLGQAPAGGLTEQELMEQLEHCELAPPAPSAPSWGCLPSPSPRISLTSLHSASSNTSLSGHRGSPSPPQAEARRRGGGSFVERCQELVRSGPDLRRPPTPAPWPSSGLGTPLTPPKMKLNETSF

SEQ ID NO: 12232 - protein, 682 aa, Homo sapiens
MAAAATAAEGVPSRGPPGEVIHLNVGGKRFSTSRQTLTWIPDSFFSSLLSGRISTLKDETGAIFIDRDPTVFAPILNFLRTKELDPRGVHGSSLLHEAQFYGLTPLVRRLQLREELDRSSCGNVLFNGYLPPPVFPVKRRNRHSLVGPQQLGGRPAPVRRSNTMPPNLGNAGLLGRMLDEKTPPSPSGQPEEPGMVRLVCGHHNWIAVAYTQFLVCYRLKEASGWQLVFSSPRLDWPIERLALTARVHGGALGEHDKMVAAATGSEILLWALQAEGGGSEIGRIGVWNAVTKHWQVQEVQPITSYDAAGSFLLLGCNNGSIYYVDVQKFPLRMKDNDLLVSELYRDPAEDGVTALSVYLTPKTSDSGNWIEIAYGTSSGGVRVIVQHPETVGSGPQLFQTFTVHRSPVTKIMLSEKHLISVCADNNHVRTWSVTRFRGMISTQPGSTPLASFKILALESADGHGGCSAGNDIGPYGERDDQQVFIQKVVPSASQLFVRLSSTGQRVCSVRSVDGSPTTAFTVLECEGSRRLGSRPRRYLLTGQANGSLAMWDLTTAMDGLGQAPAGGLTEQELMEQLEHCELAPPAPSAPSWGCLPSPSPRISLTSLHSASSNTSLSGHRGSPSPPQAEARRRGGGSFVERCQELVRSGPDLRRPPTPAPWPSSGLGTPLTPPKMKLNETSF

SEQ ID NO: 12233 - protein, 102 aa, Homo sapiens
MAAAATAAEGVPSRGPPGEVIHLNVGGKRFSTSRQTLTWIPDSFFSSLLSGRISTLKDETGAIFIDRDPTVFAPILNFLRTKELDPRLAWKKGRESLTVFSP

SEQ ID NO: 12234 - protein, 88 aa, Homo sapiens
MAAAATAAEGVPSRGPPGEVIHLNVGGKRFSTSRQTLTWIPDSFFSSLLSGRISTLKDETGAIFIDRDPTVFAPILNFLRTKELDPRP

SEQ ID NO: 12235 - protein, 37 aa, Homo sapiens
MRPEQSSSTGTLQSSPPSSTSCAPKSWIPAFSVHPHT

SEQ ID NO: 12236 - protein, 131 aa, Homo sapiens
MRPEQSSSTGTLQSSPPSSTSCAPKSWIPVRRLQLREELDRSSCGNVLFNGYLPPPVFPVKRRNRHSLVGPQQLGGRPAPVRRSNTMPPNLGNAGLLGRMLDEKTPPSPSGQPEEPGMVRLVCGHHNWIAV

SEQ ID NO: 12237 - protein, 277 aa, Homo sapiens
RSPVTKIMLSEKHLISVCADNNHVRTWSVTRFRGMISTQPGSTPLASFKILALESADGHGGCSAGNDIGPYGERDDQQVFIQKVVPSASQLFVRLSSTGQRVCSVRSVDGSPTTAFTVLECEGSRRLGSRPRRYLLTGQANGSLAMWDLTTAMDGLGQAPGGLTEQELMEQLEHCELAPPAPSAPSWGCLPSPSPRISLTSLHSASSNTSLSGHRGSPSPPQAEARRRGGGSFVERCQELVRSGPDLRRPPTPAPWPSSGLGTPLTPPKMKLNETSF

SEQ ID NO: 12238 - protein, 610 aa, Homo sapiens
  SITE 1: note = misc_feature - Xaa can be any naturally occurring amino acid
XAAEGVPSRGPPGEVIHLNVGGKRFSTSRQTLTWIPDSFFSSLLSGRISTLKDETGAIFIDRDPTVFAPILNFLRTKELDPRGVHGSSLLHEAQFYGLTPLVRRLQLREELDRSSCGNVLFNGYLPPPVFPVKRRNRHSLVGPQQLGGRPAPVRRSNTMPPNLGNAGLLGRMLDEKTPPSPSGQPEEPGMVRLVCGHHNWIAVAYTQFLVCYRLKEASGWQLVFSSPRLDWPIERLALTARVHGGALGEHDKMVAAATGSEILLWALQAEGGGSEIGVFHLGVPVEALFFVGNQLIATSHTGRIGVWNAVTKHWQVQEVQPITSYDAAGSFLLLGCNNGSIYYVDVQKFPLRMKDNDLLVSELYRDPAEDGVTALSVYLTPKTSDSGNWIEIAYGTSSGGVRVIVQHPETVGSGPQLFQTFTVHRSPVTKIMLSEKHLISVCADNNHVRTWSVTRFRGMISTQPGSTPLASFKILALESADGHGGCSAGNDIAGGLTEQELMEQLEHCELAPPAPSAPSWGCLPSPSPRISLTSLHSASSNTSLSGHRGSPSPPQAEARRRGGGSFVERCQELVRSGPDLRRPPTPAPWPSSGLGTPLTPPKMKLNETSF

SEQ ID NO: 12239 - protein, 175 aa, Homo sapiens
  SITE 1: note = misc_feature - Xaa can be any naturally occurring amino acid
XDSGNWIEIAYGTSSGGVRVIVQHPETVGSGPQLFQTFTVHRSPVTKIMLSEKHLISAGGLTEQELMEQLEHCELAPPAPSAPSWGCLPSPSPRISLTSLHSASSNTSLSGHRGSPSPPQAEARRRGGGSFVERCQELVRSGPDLRRPPTPAPWPSSGLGTPLTPPKMKLNETSF

SEQ ID NO: 12240 - protein, 250 aa, Homo sapiens
  SITE 1: note = misc_feature - Xaa can be any naturally occurring amino acid
XELYRDPAEDGVTALSVYLTPKTSDSGNWIEIAYGTSSGGVRVIVQHPETVGSGPQLFQTFTVHRSPVTKIMLSEKHLISVCADNNHVRTWSVTRFRGMISTQPGSTPLASFKILALESADGHGGCSAGNDIAGGLTEQELMEQLEHCELAPPAPSAPSWGCLPSPSPRISLTSLHSASSNTSLSGHRGSPSPPQAEARRRGGGSFVERCQELVRSGPDLRRPPTPAPWPSSGLGTPLTPPKMKLNETSF

SEQ ID NO: 12241 - protein, 129 aa, Homo sapiens
  SITE 1: note = misc_feature - Xaa can be any naturally occurring amino acid
XGSGPQLFQTFTVHRSPVTKIMLSEKHLISVCADNNHVRTWSVTRFRGMISTQPGSTPLASFKILALESADGHGGCSAGNDIGPYGERDDQQVFIQKVVPSASQLFVRLSSTGQRWPDGARADGTAGTL

SEQ ID NO: 12242 - protein, 299 aa, Homo sapiens
  SITE 1: note = misc_feature - Xaa can be any naturally occurring amino acid
XGSIYYVDVQKFPLRMKDNDLLVSELYRDPAEDGVTALSVYLTPKTICADNNHVRTWSVTRFRGMISTQPGSTPLASFKILALESADGHGGCSAGNDIGPYGERDDQQVFIQKVVPSASQLFVRLSSTGQRVCSVRSVDGSPTTAFTVLECEGSRRLGSRPRRYLLTGQANGSLAMWDLTTAMDGLGQAPAGGLTEQELMEQLEHCELAPPAPSAPSWGCLPSPSPRISLTSLHSASSNTSLSGHRGSPSPPQAEARRRGGGSFVERCQELVRSGPDLRRPPTPAPWPSSGLGTPLTPP

SEQ ID NO: 12243 - protein, 164 aa, Homo sapiens
  SITE 1: note = misc_feature - Xaa can be any naturally occurring amino acid
XQMGMAAAVLAMTLAPTVSGTTSKCSSRRWCPVPASSSCVSHLLGSAGGLTEQELMEQLEHCELAPPAPSAPSWGCLPSPSPRISLTSLHSASSNTSLSGHRGSPSPPQAEARRRGGGSFVERCQELVRSGPDLRRPPTPAPWPSSGLGTPLTPPKMKLNETSF

SEQ ID NO: 12244 - protein, 143 aa, Homo sapiens
  SITE 1: note = misc_feature - Xaa can be any naturally occurring amino acid
XTSKCSSRRWCPVPASSSCVSHLLGSGGLTEQELMEQLEHCELAPPAPSAPSWGCLPSPSPRISLTSLHSASSNTSLSGHRGSPSPPQAEARRRGGGSFVERCQELVRSGPDLRRPPTPAPWPSSGLGTPLTPPKMKLNETSF

SEQ ID NO: 12245 - protein, 523 aa, Homo sapiens
MVAPGLVLGLVLPLILWADRSAGIGFRFASYINNDMVLQKEPAGAVIWGFGTPGATVTVTLRQGQETIMKKVTSVKAHSDTWMVVLDPMKPGGPFEVMAQQTLEKINFTLRVHDVLFGDVWLCSGQSNMQMTVLQIFNATRELSNTAAYQSVRILSVSPIQAEQELEDLVAVDLQWSKPTSENLGHGYFKYMSAVCWLFGRHLYDTLQYPIGLIASSWGGTPIEAWSSGRSLKACGVPKQGSIPYDSVTGPSKHSVLWNAMIHPLCNMTLKGVVWYQGESNINYNTDLYNCTFPALIEDWRETFHRGSQGQTERFFPFGLVQLSSDLSKKSSDDGFPQIRWHQTADFGYVPNPKMPNTFMAVAMDLCDRDSPFGSIHPRDKQTVAYRLHLGARALAYGEKNLTFEGPLPEKIELLAHKGLLNLTYYQQIQVQKKDNKIFEISCCSDHRCKWLPASMNTVSTQSLTLAIDSCHGTVVALRYAWTTWPCEYKQCPLYHPSSALPAPPFIAFITDQGPGHQSNVAK

SEQ ID NO: 12246 - protein, 488 aa, Homo sapiens
MVLQKEPAGAVIWGFGTPGATVTVTLRQGQETIMKKVTSVKAHSDTWMVVLDPMKPGGPFEVMAQQTLEKINFTLRVHDVLFGDVWLCSGQSNMQMTVLQIFNATRELSNTAAYQSVRILSVSPIQAEQELEDLVAVDLQWSKPTSENLGHGYFKYMSAVCWLFGRHLYDTLQYPIGLIASSWGGTPIEAWSSGRSLKACGVPKQGSIPYDSVTGPSKHSVLWNAMIHPLCNMTLKGVVWYQGESNINYNTDLYNCTFPALIEDWRETFHRGSQGQTERFFPFGLVQLSSDLSKKSSDDGFPQIRWHQTADFGYVPNPKMPNTFMAVAMDLCDRDSPFGSIHPRDKQTVAYRLHLGARALAYGEKNLTFEGPLPEKIELLAHKGLLNLTYYQQIQVQKKDNKIFEISCCSDHRCKWLPASMNTVSTQSLTLAIDSCHGTVVALRYAWTTWPCEYKQCPLYHPSSALPAPPFIAFITDQGPGHQSNVAK

SEQ ID NO: 12247 - protein, 488 aa, Homo sapiens; identical to SEQ ID NO: 12246

SEQ ID NO: 12248 - protein, 133 aa, Homo sapiens
GIFRRILHVLYTDCIRQCSGPLYVDRMVLLVMGNVINWSLAAYGLIMRPNDFASYLLAIGICNLLLYFAFYIIMKKTPAESREHNRDCILLDFFDDHDIWHFLSSIAMFGSFLVLLTLDDDLDTVQRDKIYVF

SEQ ID NO: 12249 - protein, 170 aa, Homo sapiens
MDDFVLRTGEQFSFNTTAAQPQYFKYEFPEGVDSVIVKVTSNKAFPCSVISIQDVLCPVYDLDNNVAFIGMYQTMTKKAAITVQRKDFPSNSFYVVVVVKTEDQACGGSLPFYPFAEDEPVDQGHRQKTLSVLVSQAVTSEAYVSGMLFCLGIFLSFYLLTVLLACWENW

SEQ ID NO: 12250 - protein, 110 aa, Homo sapiens
MFALGLPFLVLLVASVESHLGVLGPKNVSQKDAEFERTYVDEVNSELVNIYTFNHTVTRNRTEGVRVSVNVLNKQKGAPLLFVVRQKEAVVSFQVPLILRGMFQRKYLYQ

SEQ ID NO: 12251 - protein, 855 aa, Homo sapiens
MFALGLPFLVLLVASVESHLGVLGPKNVSQKDAEFERTYVDEVNSELVNIYTFNHTVTRNRTEGVRVSVNVLNKQKGAPLLFVVRQKEAVVSFQVPLILRGMFQRKYLYQKVERTLCQPPTKNESEIQFFYVDVSTLSPVNTTYQLRVSRMDDFVLRTGEQFSFNTTAAQPQYFKYEFPEGVDSVIVKVTSNKAFPCSVISIQDVLCPVYDLDNNVAFIGMYQTMTKKAAITVQRKDFPSNSFYVVVVVKTEDQACGGSLPFYPFAEDEPVDQGHRQKTLSVLVSQAVTSEAYVSGMLFCLGIFLSFYLLTVLLACWENWRQKKKTLLVAIDRACPESGHPRVLADSFPGSSPYEGYNYGSFENVSGSTDGLVDSAGTGDLSYGYQGHDQFKRRLPSGQMRQLCIAMGRSFEPVGTRPRVDSMSSVEEDDYDTLTDIDSDKNVIRTKQYLYVADLARKDKRVLRKKYQIYFWNIATIAVFYALPVVQLVITYQTVVNVTGNQDICYYNFLCAHPLGNLSAFNNILSNLGYILLGLLFLLIILQREINHNRALLRNDLCALECGIPKHFGLFYAMGTALMMEGLLSACYHVCPNYTNFQFDTSFMYMIAGLCMLKLYQKRHPDINASAYSAYACLAIVIFFSVLGVVFGKGNTAFWIVFSIIHIIATLLLSTQLYYMGRWKLDSGIFRRILHVLYTDCIRQCSGPLYVDRMVLLVMGNVINWSLAAYGLIMRPNDFASYLLAIGICNLLLYFAFYIIMKLRSGERIKLIPLLCIVCTSVVWGFALFFFFQGLSTWQKTPAESREHNRDCILLDFFDDHDIWHFLSSIAMFGSFLVSGPPGRAGWVREGSSCLLLCG

SEQ ID NO: 12252 - protein, 832 aa, Homo sapiens
MFALGLPFLVLLVASVESHLGVLGPKNVSQKDAEFERTYVDEVNSELVNIYTFNHTVTRNRTEGVRVSVNVLNKQKGAPLLFVVRQKEAVVSFQVPLILRGMFQRKYLYQKVERTLCQPPTKNESEIQFFYVDVSTLSPVNTTYQLRVSRMDDFVLRTGEQFSFNTTAAQPQYFKYEFPEGVDSVIVKVTSNKAFPCSVISIQDVLCPVYDLDNNVAFIGMYQTMTKKAAITVQRKDFPSNSFYVVVVVKTEDQACGGSLPFYPFAEDEPVDQGHRQKTLSVLVSQAVTSEAYVSGMLFCLGIFLSFYLLTVLLACWENWRQKKKTLLVAIDRACPESGHPRVLADSFPGSSPYEGYNYGSFENVSGSTDGLVDSAGTGDLSYGYQGRSFEPVGTRPRVDSMSSVEEDDYDTLTDIDSDKNVIRTKQYLYVADLARKDKRVLRKKYQIYFWNIATIAVFYALPVVQLVITYQTVVNVTGNQDICYYNFLCAHPLGNLSAFNNILSNLGYILLGLLFLLIILQREINHNRALLRNDLCALECGIPKHFGLFYAMGTALMMEGLLSACYHVCPNYTNFQFDTSFMYMIAGLCMLKLYQKRHPDINASAYSAYACLAIVIFFSVLGVVFGKGNTAFWIVFSIIHIIATLLLSTQLYYMGRWKLDSGIFRRILHVLYTDCIRQCSGPLYVDRMVLLVMGNVINWSLAAYGLIMRPNDFASYLLAIGICNLLLYFAFYIIMKLRSGERIKLIPLLCIVCTSVVWGFALFFFFQGLSTWQKTPAESREHNRDCILLDFFDDHDIWHFLSSIAMFGSFLVLLTLDDDLDTVQRDKIYVF

SEQ ID NO: 12253 - protein, 829 aa, Homo sapiens
MFALGLPFLVLLVASVESHLGVLGPKNVSQKDAEFERTYVDEVNSELVNIYTFNHTVTRNRTEGVRVSVNVLNKQKGAPLLFVVRQKEAVVSFQVPLILRGMFQRKYLYQKVERTLCQPPTKNESEIQFFYVDVSTLSPVNTTYQLRVSRMDDFVLRTGEQFSFNTTAAQPQYFKYEFPEGVDSVIVKVTSNKAFPCSVISIQDVLCPVYDLDNNVAFIGMYQTMTKKAAITVQRKDFPSNSFYVVVVVKTEDQACGGSLPFYPFAEDEPVDQGHRQKTLSVLVSQAVTSEAYVSGMLFCLGIFLSFYLLTVLLACWENWRQKKKTLLVAIDRACPESASLLGHPRVLADSFPGSSPYEGYNYGSFENVSGSTDGLVDSAGTGDLSYGYQGTRPRVDSMSSVEEDDYDTLTDIDSDKNVIRTKQYLYVADLARKDKRVLRKKYQIYFWNIATIAVFYALPVVQLVITYQTVVNVTGNQDICYYNFLCAHPLGNLSAFNNILSNLGYILLGLLFLLIILQREINHNRALLRNDLCALECGIPKHFGLFYAMGTALMMEGLLSACYHVCPNYTNFQFDTSFMYMIAGLCMLKLYQKRHPDINASAYSAYACLAIVIFFSVLGVVFGKGNTAFWIVFSIIHIIATLLLSTQLYYMGRWKLDSGIFRRILHVLYTDCIRQCSGPLYVDRMVLLVMGNVINWSLAAYGLIMRPNDFASYLLAIGICNLLLYFAFYIIMKLRSGERIKLIPLLCIVCTSVVWGFALFFFFQGLSTWQKTPAESREHNRDCILLDFFDDHDIWHFLSSIAMFGSFLVLLTLDDDLDTVQRDKIYVF

SEQ ID NO: 12254 - protein, 832 aa, Homo sapiens; identical to SEQ ID NO: 12252

SEQ ID NO: 12255 - protein, 855 aa, Homo sapiens; identical to SEQ ID NO: 12251

SEQ ID NO: 12256 - protein, 98 aa, Homo sapiens
MFQRKYLYQKVERTLCQPPTKNESEIQFFYVDVSTLSPVNTTYQLRVSRMDDFVLRTGEQFSFNTTAAQPQYFKYEFPEGVDSVIVKVTSNKAFPCSV

SEQ ID NO: 12257 - protein, 124 aa, Homo sapiens
MRPNDFASYLLAIGICNLLLYFAFYIIMKLRSGERIKLIPLLCIVCTSVVWGFALFFFFQGLSTWQKTPAESREHNRDCILLDFFDDHDIWHFLSSIAMFGSFLVLLTLDDDLDTVQRDKIYVF

SEQ ID NO: 12258 - protein, 602 aa, Homo sapiens
MLLPLLLSSLLGGSQAMDGRFWIRVQESVMVPEGLCISVPCSFSYPRQDWTGSTPAYGYWFKAVTETTKGAPVATNHQSREVEMSTRGRFQLTGDPAKGNCSLVIRDAQMQDESQYFFRVERGSYVRYNFMNDGFFLKVTALTQKPDVYIPETLEPGQPVTVICVFNWAFEECPPPSFSWTGAALSSQGTKPTTSHFSVLSFTPRPQDHNTDLTCHVDFSRKGVSAQRTVRLRVAYAPRDLVISISRDNTPALEPQPQGNVPYLEAQKGQFLRLLCAADSQPPATLSWVLQNRVLSSSHPWGPRPLGLELPGVKAGDSGRYTCRAENRLGSQQRALDLSVQYPPENLRVMVSQANRTVLENLGNGTSLPVLEGQSLCLVCVTHSSPPARLSWTQRGQVLSPSQPSDPGVLELPRVQVEHEGEFTCHARHPLGSQHVSLSLSVHYKKGLISTAFSNGAFLGIGITALLFLCLALIIMKILPKRRTQTETPRPRFSRHSTILDYINVVPTAGPLAQKRNQKATPNSPRTPLPPGAPSPESKKNQKKQYQLPSFPEPKSSTQAPESQESQEELHYATLNFPGVRPRPEARMPKGTQADYAEVKFQ

SEQ ID NO: 12259 - protein, 697 aa, Homo sapiens
MLLPLLLSSLLGGSQAMDGRFWIRVQESVMVPEGLCISVPCSFSYPRQDWTGSTPAYGYWFKAVTETTKGAPVATNHQSREVEMSTRGRFQLTGDPAKGNCSLVIRDAQMQDESQYFFRVERGSYVRYNFMNDGFFLKVTALTQKPDVYIPETLEPGQPVTVICVFNWAFEECPPPSFSWTGAALSSQGTKPTTSHFSVLSFTPRPQDHNTDLTCHVDFSRKGVSAQRTVRLRVAYAPRDLVISISRDNTPALEPQPQGNVPYLEAQKGQFLRLLCAADSQPPATLSWVLQNRVLSSSHPWGPRPLGLELPGVKAGDSGRYTCRAENRLGSQQRALDLSVQYPPENLRVMVSQANRTVLENLGNGTSLPVLEGQSLCLVCVTHSSPPARLSWTQRGQVLSPSQPSDPGVLELPRVQVEHEGEFTCHARHPLGSQHVSLSLSVHYSPKLLGPSCSWEAEGLHCSCSSQASPAPSLRWWLGEELLEGNSSQDSFEVTPSSAGPWANSSLSLHGGLSSGLRLRCEAWNVHGAQSGSILQLPDKKGLISTAFSNGAFLGIGITALLFLCLALIIMKILPKRRTQTETPRPRFSRHSTILDYINVVPTAGPLAQKRNQKATPNSPRTPLPPGAPSPESKKNQKKQYQLPSFPEPKSSTQAPESQESQEELHYATLNFPGVRPRPEARMPKGTQADYAEVKFQ

SEQ ID NO: 12260 - protein, 512 aa, Homo sapiens
MLLPLLLSSLLGGSQAMDGRFWIRVQESVMVPEGLCISVPCSFSYPRQDWTGSTPAYGYWFKAVTETTKGAPVATNHQSREVEMSTRGRFQLTGDPAKGNCSLVIRDAQMQDESQYFFRVERGSYVRYNFMNDGFFLKVTALTQKPDVYIPETLEPGQPVTVICVFNWAFEECPPPSFSWTGAALSSQGTKPTTSHFSVLSFTPRPQDHNTDLTCHVDFSRKGVSAQRTVRLRVAYAPRDLVISISRDNTPDPPENLRVMVSQANRTVLENLGNGTSLPVLEGQSLCLVCVTHSSPPARLSWTQRGQVLSPSQPSDPGVLELPRVQVEHEGEFTCHARHPLGSQHVSLSLSVHYKKGLISTAFSNGAFLGIGITALLFLCLALIIMKILPKRRTQTETPRPRFSRHSTILDYINVVPTAGPLAQKRNQKATPNSPRTPLPPGAPSPESKKNQKKQYQLPSFPEPKSSTQAPESQESQEELHYATLNFPGVRPRPEARMPKGTQADYAEVKFQ

SEQ ID NO: 12261 - protein, 554 aa, Homo sapiens
MLLPLLLSSLLGGSQAMDGRFWIRVQESVMVPEGLCISVPCSFSYPRQDWTGSTPAYGYWFKAVTETTKGAPVATNHQSREVEMSTRGRFQLTGDPAKGNCSLVIRDAQMQDESQYFFRVERGSYVRYNFMNDGFFLKVTGTKPTTSHFSVLSFTPRPQDHNTDLTCHVDFSRKGVSAQRTVRLRVAYAPRDLVISISRDNTPALEPQPQGNVPYLEAQKGQFLRLLCAADSQPPATLSWVLQNRVLSSSHPWGPRPLGLELPGVKAGDSGRYTCRAENRLGSQQRALDLSVQYPPENLRVMVSQANRTVLENLGNGTSLPVLEGQSLCLVCVTHSSPPARLSWTQRGQVLSPSQPSDPGVLELPRVQVEHEGEFTCHARHPLGSQHVSLSLSVHYKKGLISTAFSNGAFLGIGITALLFLCLALIIMKILPKRRTQTETPRPRFSRHSTILDYINVVPTAGPLAQKRNQKATPNSPRTPLPPGAPSPESKKNQKKQYQLPSFPEPKSSTQAPESQESQEELHYATLNFPGVRPRPEARMPKGTQADYAEVKFQ

SEQ ID NO: 12262 - protein, 639 aa, Homo sapiens
MLLPLLLSSLLGGSQAMDGRFWIRVQESVMVPEGLCISVPCSFSYPRQDWTGSTPAYGYWFKAVTETTKGAPVATNHQSREVEMSTRGRFQLTGDPAKGNCSLVIRDAQMQDESQYFFRVERGSYVRYNFMNDGFFLKVTVLSFTPRPQDHNTDLTCHVDFSRKGVSAQRTVRLRVAYAPRDLVISISRDNTPALEPQPQGNVPYLEAQKGQFLRLLCAADSQPPATLSWVLQNRVLSSSHPWGPRPLGLELPGVKAGDSGRYTCRAENRLGSQQRALDLSVQYPPENLRVMVSQANRTVLENLGNGTSLPVLEGQSLCLVCVTHSSPPARLSWTQRGQVLSPSQPSDPGVLELPRVQVEHEGEFTCHARHPLGSQHVSLSLSVHYSPKLLGPSCSWEAEGLHCSCSSQASPAPSLRWWLGEELLEGNSSQDSFEVTPSSAGPWANSSLSLHGGLSSGLRLRCEAWNVHGAQSGSILQLPDKKGLISTAFSNGAFLGIGITALLFLCLALIIMKILPKRRTQTETPRPRFSRHSTILDYINVVPTAGPLAQKRNQKATPNSPRTPLPPGAPSPESKKNQKKQYQLPSFPEPKSSTQAPESQESQEELHYATLNFPGVRPRPEARMPKGTQADYAEVKFQ

SEQ ID NO: 12263 - protein, 544 aa, Homo sapiens
MLLPLLLSSLLGGSQAMDGRFWIRVQESVMVPEGLCISVPCSFSYPRQDWTGSTPAYGYWFKAVTETTKGAPVATNHQSREVEMSTRGRFQLTGDPAKGNCSLVIRDAQMQDESQYFFRVERGSYVRYNFMNDGFFLKVTVLSFTPRPQDHNTDLTCHVDFSRKGVSAQRTVRLRVAYAPRDLVISISRDNTPALEPQPQGNVPYLEAQKGQFLRLLCAADSQPPATLSWVLQNRVLSSSHPWGPRPLGLELPGVKAGDSGRYTCRAENRLGSQQRALDLSVQYPPENLRVMVSQANRTVLENLGNGTSLPVLEGQSLCLVCVTHSSPPARLSWTQRGQVLSPSQPSDPGVLELPRVQVEHEGEFTCHARHPLGSQHVSLSLSVHYKKGLISTAFSNGAFLGIGITALLFLCLALIIMKILPKRRTQTETPRPRFSRHSTILDYINVVPTAGPLAQKRNQKATPNSPRTPLPPGAPSPESKKNQKKQYQLPSFPEPKSSTQAPESQESQEELHYATLNFPGVRPRPEARMPKGTQADYAEVKFQ

SEQ ID NO: 12264 - protein, 454 aa, Homo sapiens
MLLPLLLSSLLGGSQAMDGRFWIRVQESVMVPEGLCISVPCSFSYPRQDWTGSTPAYGYWFKAVTETTKGAPVATNHQSREVEMSTRGRFQLTGDPAKGNCSLVIRDAQMQDESQYFFRVERGSYVRYNFMNDGFFLKVTVLSFTPRPQDHNTDLTCHVDFSRKGVSAQRTVRLRVAYAPRDLVISISRDNTPDPPENLRVMVSQANRTVLENLGNGTSLPVLEGQSLCLVCVTHSSPPARLSWTQRGQVLSPSQPSDPGVLELPRVQVEHEGEFTCHARHPLGSQHVSLSLSVHYKKGLISTAFSNGAFLGIGITALLFLCLALIIMKILPKRRTQTETPRPRFSRHSTILDYINVVPTAGPLAQKRNQKATPNSPRTPLPPGAPSPESKKNQKKQYQLPSFPEPKSSTQAPESQESQEELHYATLNFPGVRPRPEARMPKGTQADYAEVKFQ

SEQ ID NO: 12265 - protein, 155 aa, Homo sapiens
MLLPLLLSSLLGVLSFTPRPQDHNTDLTCHVDFSRKGVSAQRTVRLRVAYAPRDLVISISRDNTPALEPQPQGNVPYLEAQKGQFLRLLCAADSQPPATLSWVLQNRVLSSSHPWGPRPLGLELPGVKAGDSGRYTCRAENRLGSQQRALDLSVQ

SEQ ID NO: 12266 - protein, 186 aa, Homo sapiens
MRRCYCHCCCPRCWADWTGSTPAYGYWFKAVTETTKGAPVATNHQSREVEMSTRGRFQLTGDPAKGNCSLVIRDAQMQDESQYFFRVERGSYVRYNFMNDGFFLKVTALTQKPDVYIPETLEPGQPVTVICVFNWAFEECPPPSFSWTGAALSSQGTKPTTSHFSVLSFTPRPQDHNTDLTCHVDF

SEQ ID NO: 12267 - protein, 401 aa, Homo sapiens
MQGAQEASASEMLPLLLPLLWAASYYGYGYWFLEGADVPVATNDPDEEVQEETRGRFHLLWDPRRKNCSLSIRDARRRDNAAYFFRLKSKWMKYGYTSSKLSVRVMALTHRPNISIPGTLESGHPSNLTCSVPWVCEQGTPPIFSWMSAAPTSLGPRTTQSSVLTITPRPQDHSTNLTCQVTFPGAGVTMERTIQLNVSSFKILQNTSSLPVLEGQALRLLCDADGNPPAHLSWFQGFPALNATPISNTGVLELPQVGSAEEGDFTCRAQHPLGSLQISLSLFVHWKPEGRAGGVLGAVWGASITTLVFLCVCFIFRVKTRRKKAAQPVQNTDDVNPVMVSGSRGHQHQFQTGIVSDHPAEAGPISEDEQELHYAVLHFHKVQPQEPKVTDTEYSEIKIHK

SEQ ID NO: 12268 - protein, 437 aa, Homo sapiens
MQGAQEASASEMLPLLLPLLWAGALAQERRFQLEGPESLTVQEGLCVLVPCRLPTTLPASYYGYGYWFLEGADVPVATNDPDEEVQEETRGRFHLLWDPRRKNCSLSIRDARRRDNAAYFFRLKSKWMKYGYTSSKLSVRVMALTHRPNISIPGTLESGHPSNLTCSVPWVCEQGTPPIFSWMSAAPTSLGPRTTQSSVLTITPRPQDHSTNLTCQVTFPGAGVTMERTIQLNVSSFKILQNTSSLPVLEGQALRLLCDADGNPPAHLSWFQGFPALNATPISNTGVLELPQVGSAEEGDFTCRAQHPLGSLQISLSLFVHWKPEGRAGGVLGAVWGASITTLVFLCVCFIFRVKTRRKKAAQPVQNTDDVNPVMVSGSRGHQHQFQTGIVSDHPAEAGPISEDEQELHYAVLHFHKVQPQEPKVTDTEYSEIKIHK

SEQ ID NO: 12269 - protein, 389 aa, Homo sapiens
MQGAQEASASEMLPLLLPLLWAGALAQERRFQLEGPESLTVQEGLCVLVPCRLPTTLPASYYGYGYWFLEGADVPVATNDPDEEVQEETRGRFHLLWDPRRKNCSLSIRDARRRDNAAYFFRLKSKWMKYGYTSSKLSVRVMALTHRPNISIPGTLESGHPSNLTCSVPWVCEQGTPPIFSWMSAAPTSLGPRTTQSSVLTITPRPQDHSTNLTCQVTFPGAGVTMERTIQLNVSWMLRRPPLSTPDAPQKVAISIFQGNSAAFKILQNTSSLPVLEGQALRLLCDADGNPPAHLSWFQGFPALNATPISNTGVLELPQVGSAEEGDFTCRAQHPLGSLQISLSLFVHWKPEGRAGGVLGAVWGASITTLVFLCVCFIFRVISTSSRQA

SEQ ID NO: 12270 - protein, 353 aa, Homo sapiens
MQGAQEASASEMLPLLLPLLWAGALAQERRFQLEGPESLTVQEGLCVLVPCRLPTTLPASYYGYGYWFLEGADVPVATNDPDEEVQEETRGRFHLLWDPRRKNCSLSIRDARRRDNAAYFFRLKSKWMKYGYTSSKLSVRVMALTHRPNISIPGTLESGHPSNLTCSVPWVCEQGTPPIFSWMSAAPTSLGPRTTQSSVLTITPRPQDHSTNLTCQVTFPGAGVTMERTIQLNVSYAPQKVAISIFQGNSAAFKILQNTSSLPVLEGQALRLLCDADGNPPAHLSWFQGFPALNATPISNTGVLELPQVGSAEEGDFTCRAQHPLGSLQISLSLFVHWSSAPVPDRHSFRPPC

SEQ ID NO: 12271 - protein, 453 aa, Homo sapiens
MQGAQEASASEMLPLLLPLLWAGALAQERRFQLEGPESLTVQEGLCVLVPCRLPTTLPASYYGYGYWFLEGADVPVATNDPDEEVQEETRGRFHLLWDPRRKNCSLSIRDARRRDNAAYFFRLKSKWMKYGYTSSKLSVRVMALTHRPNISIPGTLESGHPSNLTCSVPWVCEQGTPPIFSWMSAAPTSLGPRTTQSSVLTITPRPQDHSTNLTCQVTFPGAGVTMERTIQLNVSYAPQKVAISIFQGNSAAFKILQNTSSLPVLEGQALRLLCDADGNPPAHLSWFQGFPALNATPISNTGVLELPQVGSAEEGDFTCRAQHPLGSLQISLSLFVHWKPEGRAGGVLGAVWGASITTLVFLCVCFIFRVKTRRKKAAQPVQNTDDVNPVMVSGSRGHQHQFQTGIVSDHPAEAGPISEDEQELHYAVLHFHKVQPQEPKVTDTEYSEIKIHK

SEQ ID NO: 12272 - protein, 342 aa, Homo sapiens
MQGAQEASASEMLPLLLPLLWAGALAQERRFQLEGPESLTVQEGLCVLVPCRLPTTLPASYYGYGYWFLEGADVPVATNDPDEEVQEETRGRFHLLWDPRRKNCSLSIRDARRRDNAAYFFRLKSKWMKYGYTSSKLSVRVMGTLESGHPSNLTCSVPWVCEQGTPPIFSWMSAAPTSLGPRTTQSSVLTITPRPQDHSTNLTCQVTFPGAGVTMERTIQLNVSYAPQKVAISIFQGNSAAFKILQNTSSLPVLEGQALRLLCDADGNPPAHLSWFQGFPALNATPISNTGVLELPQVGSAEEGDFTCRAQHPLGSLQISLSLFVHWSSAPVPDRHSFRPPC

SEQ ID NO: 12273 - protein, 467 aa, Homo sapiens
MLLLLLLPLLWGRERVEGQKSNRKDYSLTMQSSVTVQEGMCVHVRCSFSYPVDSQTDSDPVHGYWFRAGNDISWKAPVATNNPAWAVQEETRDRFHLLGDPQTKNCTLSIRDARMSDAGRYFFRMEKGNIKWNYKYDQLSVNVTALTHRPNILIPGTLESGCFQNLTCSVPWACEQGTPPMISWMGTSVSPLHPSTTRSSVLTLIPQPQHHGTSLTCQVTLPGAGVTTNRTIQLNVSYPPQNLTVTVFQGEGTASTALGNSSSLSVLEGQSLRLVCAVDSNPPARLSWTWRSLTLYPSQPSNPLVLELQVHLGDEGEFTCRAQNSLGSQHVSLNLSLQQEYTGKMRPVSGVLLGAVGGAGATALVFLSFCVIFIVVRSCRKKSARPAADVGDIGMKDANTIRGSASQGNLTESWADDNPRHHGLAAHSSGEEREIQYAPLSFHKGEPQDLSGQEATNNEYSEIKIPK

SEQ ID NO: 12274 - protein, 185 aa, Homo sapiens
MLLLLLLPLLWGRERVEGQKSNRKDYSLTMQSSVTVQEGMCVHVRCSFSYPVDSQTDSDPVHGYWFRAGNDISWKAPVATNNPAWAVQEETRDRFHLLGDPQTKNCTLSIRDARMSDAGRYFFRMEKGNIKWNYKYDQLSVNVTAPAPRHQPHLSGDLAWGRRDHEQDHPTQCVLSPCLSVPDPP

SEQ ID NO: 12275 - protein, 374 aa, Homo sapiens
MLLLLLLPLLWGRERVEGQKSNRKDYSLTMQSSVTVQEGMCVHVRCSFSYPVDSQTDSDPVHGYWFRAGNDISWKAPVATNNPAWAVQEETRDRFHLLGDPQTKNCTLSIRDARMSDAGRYFFRMEKGNIKWNYKYDQLSVNVTDPPQNLTVTVFQGEGTASTALGNSSSLSVLEGQSLRLVCAVDSNPPARLSWTWRSLTLYPSQPSNPLVLELQVHLGDEGEFTCRAQNSLGSQHVSLNLSLQQEYTGKMRPVSGVLLGAVGGAGATALVFLSFCVIFIVVRSCRKKSARPAADVGDIGMKDANTIRGSASQGNLTESWADDNPRHHGLAAHSSGEEREIQYAPLSFHKGEPQDLSGQEATNNEYSEIKIPK

SEQ ID NO: 12276 - protein, 145 aa, Homo sapiens
MLLLLLLPLLWGRERVEGQKSNRKDYSLTMQSSVTVQEGMCVHVRCSFSYPVDSQTDSDPVHGYWFRAGNDISWKAPVATNNPAWAVQEETRDRFHLLGDPQTKNCTLSIRDARMSDAGRYFFRMEKGNIKWNYKYDQLSVNVTE

SEQ ID NO: 12277 - protein, 145 aa, Homo sapiens
MLLLLLLPLLWGRERVEGQKSNRKDYSLTMQSSVTVQEGMCVHVRCSFSYPVDSQTDSDPVHGYWFRAGNDISWKAPVATNNPAWAVQEETRDRFHLLGDPQTKNCTLSIRDARMSDAGRYFFRMEKGNIKWNYKYDQLSVNVTG

SEQ ID NO: 12278 - protein, 13 aa, Homo sapiens
MLPLLQLGGKDNS

SEQ ID NO: 12279 - protein, 103 aa, Homo sapiens
MLPLLQLGKSSLAAQAFVKGLIQGAIYAGIVIALLFLCLLPLIVKHIRKKQAKKAAAIRAKKSSKVRASQELEMSLKPEEPGKPVVATFSESRILEKQDKRAS

SEQ ID NO: 12280 - protein, 84 aa, Homo sapiens
MLPLLQLVPAKLLNSSCSLEKTLQCSCSFHGIPTPSVQWWMGGVPVGVDGMDGSLQVTSTMLGPWANSTISLTEEPEMGMRLLC

SEQ ID NO: 12281 - protein, 140 aa, Homo sapiens
MLPLLQLVPAKLLNSSCSLEKTLQCSCSFHGIPTPSVQWWMGGVPVGVDGMDGSLQVTSTMLGPWANSTISLTEEPEMGMRLLCEGKNQNGTHALSILLMSRKSSLAAQAFVKGLIQGAIYAGIVIALLFLCLLPLIVKH

SEQ ID NO: 12282 - protein, 197 aa, Homo sapiens
MLPLLQLVPAKLLNSSCSLEKTLQCSCSFHGIPTPSVQWWMGGVPVGVDGMDGSLQVTSTMLGPWANSTISLTEEPEMGMRLLCEGKNQNGTHALSILLMSRKSSLAAQAFVKGLIQGAIYAGIVIALLFLCLLPLIVKHIRKKQAKKAAAIRAKKSSKVRASQELEMSLKPEEPGKPVVATFSESRILEKQDKRAS

SEQ ID NO: 12283 - protein, 197 aa, Homo sapiens; identical to SEQ ID NO: 12282

SEQ ID NO: 12284 - protein, 134 aa, Homo sapiens
MGAMCLLHASLSEYVLLFGTALGSRGHSGRYWAEISDTIISGTFHQWREGTTKSEVFYPGETVVHGPGEATAVEWGPNTWMVEYGRGVIPSTLAFALADTVFSTQDFLTLFYTLRSYARGLRLELTTYLFGQDP

SEQ ID NO: 12285 - protein, 106 aa, Homo sapiens
MQWAVGRRWAWAALLLAVAAVLTQVVWLWLGTQSFVFQREEIAQLARQYAGLDHELAFSRLIVELRRLHPGHVLPDEELQWVFVNAGGWMGAMCLLHASLSEALLG

SEQ ID NO: 12286 - protein, 192 aa, Homo sapiens
MQWAVGRRWAWAALLLAVAAVLTQVVWLWLGTQSFVFQREEIAQLARQYAGLDHELAFSRLIVELRRLHPGHVLPDEELQWVFVNAGGWMGAMCLLHASLSEYVLLFGTALGSRGHSGETVVHGPGEATAVEWGPNTWMVEYGRGVIPSTLAFALADTVFSTQDFLTLFYTLRSYARGLRLELTTYLFGQDP

SEQ ID NO: 12287 - protein, 223 aa, Homo sapiens
MQWAVGRRWAWAALLLAVAAVLTQVVWLWLGTQSFVFQREEIAQLARQYAGLDHELAFSRLIVELRRLHPGHVLPDEELQWVFVNAGGWMGAMCLLHASLSEYVLLFGTALGSRGHSGRYWAEISDTIISGTFHQWREGTTKSEVFYPGETVVHGPGEATAVEWGPNTWMVEYGRGVIPSTLAFALADTVFSTQDFLTLFYTLRSYARGLRLELTTYLFGQDP

SEQ ID NO: 12288 - protein, 83 aa, Homo sapiens
LKSALAKFKEGAEMESSKEDKMDNAQDLLSFGGLQVVINGLNSTEPLVKEYAAFVLGAAFSSNPKVQVEAIEGGALQKLLVIL

SEQ ID NO: 12289 - protein, 95 aa, Homo sapiens
MAPQSLPSSRMAPLGMLLGLLMAACFTFCLSHQNLKEFALTNPEKSSTKETERKETKAEEELDAEVLEVFHPTHEWQALQPGQAVPAGSHVRLNL

SEQ ID NO: 12290 - protein, 123 aa, Homo sapiens
MAPQSLPSSRMAPLGMLLGLLMAACFTFCLSHQNLKEFALTNPEKSSTKETERKETKAEEELDAEVLEVFHPTHEWQALQPGQAVPAGSHVRLNLQTGEREAKLQYEDKFRNNLKGKRLDINT

SEQ ID NO: 12291 - protein, 163 aa, Homo sapiens
MAPQSLPSSRMAPLGMLLGLLMAACFTFCLSHQNLKEFALTNPEKSSTKETERKETKAEEELDAEVLEVFHPTHEWQALQPGQAVPAGSHVRLNLQTGEREAKLQYEDKFRNNLKGKRLDINTNTYTSQDLKSALAKFKEGAEMESSKEDKARQAEVKRLFRP

SEQ ID NO: 12292 - protein, 461 aa, Homo sapiens
MAPQSLPSSRMAPLGMLLGLLMAACFTFCLSHQNLKEFALTNPEKSSTKETERKETKAEEELDAEVLEVFHPTHEWQALQPGQAVPAGSHVRLNLQTGEREAKLQYEDKFRNNLKGKRLDINTNTYTSQDLKSALAKFKEGAEMESSKEDKARQAEVKRLFRPIEELKKDFDELNVVIETDMQIMVRLINKFNSSSSSLEEKIAALFDLEYYVHQMDNAQDLLSFGGLQVVINGLNSTEPLVKEYAAFVLGAAFSSNPKVQVEAIEGGALQKLLVILATEQPLTAKKKVLFALCSLLRHFPYAQRQFLKLGGLQVLRTLVQEKGTEVLAVRVVTLLYDLVTEKMFAEEEAELTQEMSPEKLQQYRQVHLLPGLWEQGWCEITAHLLALPEHDAREKVLQTLGVLLTTCRDRYRQDPQLGRTLASLQAEYQVLASLELQDGEDEGYFQELLGSVNSLLKELR

SEQ ID NO: 12293 - protein, 461 aa, Homo sapiens; identical to SEQ ID NO: 12292

SEQ ID NO: 12294 - protein, 468 aa, Homo sapiens
MNSGTSLTMAPQSLPSSRMAPLGMLLGLLMAACFTFCLSHQNLEFALTNPEKSSTKETERKETKAEEELDAEVLEVFHPTHEWQALQPGQAVPAGSHVRLNLQTGEREAKLQYEDKFRNNLKGKRLDINTNTYTSQDLKSALAKFKEGAEMESSKEDKARQAEVKRLFRPIEELKKDFDELNVVIETDMQIMVRLINKFNSSSSSLEEKIAALFDLEYYVHQMDNAQDLLSFGGLQVVINGLNSTEPLVKEYAAFVLGAAFSSNPKVQVEAIEGGALQKLLVILATEQPLTAKKKVLFALCSLLRHFPYAQRQFLKLGGLQVLRTLVQEKGTEVLAVRVVTLLYDLVTEKMFAEEEAELTQEMSPEKLQQYRQVHLLPGLWEQGWCEITAHLLALPEHDAREKVLQTLGVLLTTCRDRYRQDPQLGRTLASLQAEYQVLASLELQDGEDEGYFQELLGSVNSLLKELR

SEQ ID NO: 12295 - protein, 123 aa, Homo sapiens
MQEMSDMSLTMAPQSLPSSRMAPLGMLLGLLMAACFTFCLSHQNLKEFALTNPEKSSTKETERKETKAEEELDAEVLEVFHPTHEWQALQPGQAVPAGSHVRLNLQTGEREAKLQYEDKFRNN

SEQ ID NO: 12296 - protein, 125 aa, Homo sapiens
MQEMSDMSLTMAPQSLPSSRMAPLGMLLGLLMAACFTFCLSHQNLKEFALTNPEKSSTKETERKETKAEEELDAEVLEVFHPTHEWQALQPGQAVPAGSHVRLNLQTGEREAKLQYEDKFRNNLK

SEQ ID NO: 12297 - protein, 182 aa, Homo sapiens
GNELSDFQTNVDPAGDSVSYSIHSTARVVLTRGDVHSQVICEIAHITLQGDPLRGTANLSEAIRVPPTLEVTQQPMRAENQANVTCQVSNFYPRGLQLTWLENGNVSRTETASTLIENKDGTYNWMSWLLVNTCAHRDDVVLTCQVEHDGQQAVSKSYALEISAHQKEHGSDITHGAVTSHF

SEQ ID NO: 12298 - protein, 77 aa, Homo sapiens
HRDDVKLTCQVEHDGQPAVSKSHDLKVSAHPKEQGSNTAPGPALASAAPLLIAFLLGPKVLLVVGVSVIYVYWKQKA

SEQ ID NO: 12299 - protein, 77 aa, Homo sapiens; identical to SEQ ID NO: 12298

SEQ ID NO: 12300 - protein, 77 aa, Homo sapiens; identical to SEQ ID NO: 12298

SEQ ID NO: 12301 - protein, 236 aa, Homo sapiens
HTVSFTCESHGFSPRDITLKWFKNGNELSDFQTNVDPAGDSVSYSIHSTAKVVLTREDVHSQVICEVAHVTLQGDPLRGTANLSETIRVPPTLEVTQQPVRAENQVNVTCQVRKFYPQRLQLTWLENGNVSRTETASTLTENKDGTYNWMSWLLVNVSAHRDDVKLTCQVEHDGQPAVSKSHDLKVSAHPKEQGSNTAPGPALASAAPLLIAFLLGPKVLLVVGVSVIYVYWKQKA

SEQ ID NO: 12302 - protein, 398 aa, Homo sapiens
MPVPASWPHLPSPFLLMTLLLGRLTGVAGEDELQVIQPEKSVSVAAGESATLRCAMTSLIPVGPIMWFRGAGAGRELIYNQKEGHFPRVTTVSELTKRNNLDFSISISNITPADAGTYYCVKFRKGSPDDVEFKSGAGTELSVRAKPSAPVVSGPAVRATPEHTVSFTCESHGFSPRDITLKWFKNGNELSDFQTNVDPAGDSVSYSIHSTARVVLTRGDVHSQVICEIAHITLQGDPLRGTANLSEAIRVPPTLEVTQQPMRAENQANVTCQVSNFYPRGLQLTWLENGNVSRTETASTLIENKDGTYNWMSWLLVNTCAHRDDVVLTCQVEHDGQQAVSKSYALEISAHQKEHGSDITHEAALAPTAPLLVALLLGPKLLLVVGVSAIYICWKQKA

SEQ ID NO: 12303 - protein, 181 aa, Homo sapiens
MPVPASWPHLPSPFLLMTLLLGRLTGVAGEDELQVIQPEKSVSVAAGESATLRCAMTSLIPVGPIMWFRGAGAGRELIYNQKEGHFPRVTTVSELTKRNNLDFSISISNITPADAGTYYCVKFRKGSPDDVEFKSGAGTELSVREAALAPTAPLLVALLLGPKLLLVVGVSAIYICWKQKA

SEQ ID NO: 12304 - protein, 398 aa, Homo sapiens
MPVPASWPHLPSPFLLMTLLLGRLTGVAGEEELQVIQPDKSISVAAGESATLHCTVTSLIPVGPIQWFRGAGPGRELIYNQKEGHFPRVTTVSDLTKRNNMDFSIRISNITPADAGTYYCVKFRKGSPDHVEFKSGAGTELSVRAKPSAPVVSGPAARATPQHTVSFTCESHGFSPRDITLKWFKNGNELSDFQTNVDPAGDSVSYSIHSTAKVVLTREDVHSQVICEVAHVTLQGDPLRGTANLSETIRVPPTLEVTQQPVRAENQVNVTCQVRKFYPQRLQLTWLENGNVSRTETASTLTENKDGTYNWMSWLLVNVSAHRDDVKLTCQVEHDGQPAVSKSHDLKVSAHPKEQGSNTAPGPALASAAPLLIAFLLGPKVLLVVGVSVIYVYWKQKA

SEQ ID NO: 12305 - protein, 398 aa, Homo sapiens; identical to SEQ ID NO: 12304

SEQ ID NO: 12306 - protein, 156 aa, Homo sapiens
MPVPASWPHPPCPFLLLTLLLGLTGVAGEDELQVIQPEKSVSVAAGESATLRCAMTSLIPVGPIMWFRGAGAGRELIYNQKEGHFPRVTTVSELTKRNNLDFSISISNITPADAGTYYCVKFRKGSPDDVEFKSGAGTELSVREAALAPTAPLLVA

SEQ ID NO: 12307 - protein, 180 aa, Homo sapiens
MPVPASWPHPPCPFLLLTLLLGLTGVAGEDELQVIQPEKSVSVAAGESATLRCAMTSLIPVGPIMWFRGAGAGRELIYNQKEGHFPRVTTVSELTKRNNLDFSISISNITPADAGTYYCVKFRKGSPDDVEFKSGAGTELSVREAALAPTAPLLVALLLGPKLLLVVGVSAIYICWKQKA

SEQ ID NO: 12308 - protein, 58 aa, Homo sapiens
RKGSPDHVEFKSGAGTELSVREAALAPTAPLLVALLLGPKLLLVVGVSAIYICWKQKA

SEQ ID NO: 12309 - protein, 131 aa, Homo sapiens
  SITE 1: note = misc_feature - Xaa can be any naturally occurring amino acid
XPPTLEVTQQPVRAENQVNVTCQVRKFYPQRLQLTWLENGNVSRTETASTLTENKDGTYNWMSWLLVNVSAHRDDVKLTCQVEHDGQPAVSKSHDLKVSAHPKEQGSNTAPVSLEFYRRGNQDLGSNGGYC

SEQ ID NO: 12310 - protein, 198 aa, Homo sapiens
MPIPASPLHPPLPSLLLYLLLELAGVTHVFHVQQTEMSQTVSTGESIILSCSVPNTLPNGPVLWFKGTGPNRKLIYNFKQGNFPRVKEIGDTTKPGNTDFSTRIREISLADAGTYYCVKFIKGRAIKEYQSGRGTQVFVTAEQNPRPPKNRPAGRAGSRAHHDAHTCLSALPERNSTNYFVQPCCCLRLLGLTGLLSK

SEQ ID NO: 12311 - protein, 197 aa, Homo sapiens
MPIPASPLHPPLPSLLLYLLLELAGVTHVFHVQQTEMSQTVSTGESIILSCSVPNTLPNGPVLWFKGTGPNRKLIYNFKQGNFPRVKEIGDTTKPGNTDFSTRIREISLADAGTYYCVKFIKGRAIKEYQSGRGTQVFVTEQNPRPPKNRPAGRAGSRAHHDAHTCLSALPERNSTNYFVQPCCCLRLLGLTGLLSK

SEQ ID NO: 12312 - protein, 80 aa, Homo sapiens
  SITE 1: note = misc_feature - Xaa can be any naturally occurring amino acid
XNGPVLWFKGTGPNRKLIYNFKQEQNPRPPKNRPAGRAGSRAHHDAHTCLSALPERNSTNYFVQPCCCLRLLGLTGLLSK

SEQ ID NO: 12313 - protein, 335 aa, Homo sapiens
MDPKGLLSLTFVLFLSLAFGASYGTGGRMMNCPKILRQLGSKVLLPLTYERINKSMNKSIHIVVTMAKSLENSVENKIVSLDPSEAGPPRYLGDRYKFYLENLTLGIRESRKEDEGWYLMTLEKNVSVQRFCLQLRLYEQVSTPEIKVLNKTQENGTCTLILGCTVEKGDHVAYSWSEKAGTHPLNPANSSHLLSLTLGPQHADNIYICTVSNPISNNSQTFSPWPGCRTDPSETKPWAVYAGLLGGVIMILIMVVILQLRRRGKTNHYQTTVEKKSLTIYAQVQKPGPLQKKLDSFPAQDPCTTIYVAATEPVPESVQETNSITVYASVTLPES

SEQ ID NO: 12314 - protein, 357 aa, Homo sapiens
MDPKGLLSLTFVLFLSLAFGASYGTGGRMMNCPKILRQLGSKVLLPLTYERINKSMNKSIHIVVTMAKSLENSVENKIVSLDPSEAGPPRYLGDRYKFYLENLTLGIRESRKEDEGWYLMTLEKNVSVQRFCLQLRLYEQVSTPEIKVLNKTQENGTCTLILGCTVEKGDHVAYSWSEKAGTHPLNPANSSHLLSLTLGPQHADNIYICTVSNPISNNSQTFSPWPGCRTDPSETKPWAVYAGLLGGVIMILIMVVILQLRRRATLTTTNQYWSQNVLTQDQERCPGCLPMVKRTITRQQWKKKALRSMPKSRNQVLFRRNLTPSQLRTLAPPYMLLPQSLSQSLSRKQIPSQSMLV

SEQ ID NO: 12315 - protein, 144 aa, Homo sapiens
MDPKGLLSLTFVLFLSLAFGASYGTGGRMMNCPKILRQLGSKVLLPLTYERINKSMNKSIHIVVTMAKSLENSVENKIVSLDPSEAGPPRYLGDRYKFYLENLTLGIRESRKEDEGWYLMTLEKSLHFGYLYFVLGADHDNLQT

SEQ ID NO: 12316 - protein, 149 aa, Homo sapiens
MAGSPTCLTLIYILWQLTEHLSKPKVTMGLQSNKNGTCVTNLTCCMEHGEEDVIYTWKALGQAANESHNGSILPISWRWGESDMTFICVARNPVSRNFSSPILARKLCEENNPKGRSSKYGLLHCGNTEKDGKSPLTAHDARHTKAICL

SEQ ID NO: 12317 - protein, 188 aa, Homo sapiens
MAGSPTCLTLIYILWQLTEHLSKPKVTMGLQSNKNGTCVTNLTCCMEHGEEDVIYTWKALGQAANESHNGSILPISWRWGESDMTFICVARNPVSRNFSSPILARKLCEEYIEEKKRVDICRETPNICPHSGENTEYDTIPHTNRTILKEDPANTVYSTVEIPKKMENPHSLLTMPDTPRLFAYENVI

SEQ ID NO: 12318 - protein, 228 aa, Homo sapiens
MAGSPTCLTLIYILWQLTEHLSKPKVTMGLQSNKNGTCVTNLTCCMEHGEEDVIYTWKALGQAANESHNGSILPISWRWGESDMTFICVARNPVSRNFSSPILARKLCEGAADDPDSSMVLLCLLLVPLLLSLFVLGLFLWFLKRERQEEYIEEKKRVDICRETPNICPHSGENTEYDTIPHTNRTILKEDPANTVYSTVEIPKKMENPHSLLTMPDTPRLFAYENVI

SEQ ID NO: 12319 - protein, 241 aa, Homo sapiens
MAGSPTCLTLIYILWQLTEHLSKPKVTMGLQSNKNGTCVTNLTCCMEHGEEDVIYTWKALGQAANESHNGSILPISWRWGESDMTFICVARNPVSRNFSSPILARKLCEGDCLSPLHRRLCPGAADDPDSSMVLLCLLLVPLLLSLFVLGLFLWFLKRERQEEYIEEKKRVDICRETPNICPHSGENTEYDTIPHTNRTILKEDPANTVYSTVEIPKKMENPHSLLTMPDTPRLFAYENVI

SEQ ID NO: 12320 - protein, 335 aa, Homo sapiens
MAGSPTCLTLIYILWQLTGSAASGPVKELVGSVGGAVTFPLKSKVKQVDSIVWTFNTTPLVTIQPEGGTIIVTQNRNRERVDFPDGGYSLKLSKLKKNDSGIYYVGIYSSSLQQPSTQEYVLHVYEHLSKPKVTMGLQSNKNGTCVTNLTCCMEHGEEDVIYTWKALGQAANESHNGSILPISWRWGESDMTFICVARNPVSRNFSSPILARKLCEGAADDPDSSMVLLCLLLVPLLLSLFVLGLFLWFLKRERQEEYIEEKKRVDICRETPNICPHSGENTEYDTIPHTNRTILKEDPANTVYSTVEIPKKMENPHSLLTMPDTPRLFAYENVI

SEQ ID NO: 12321 - protein, 296 aa, Homo sapiens
MAGSPTCLTLIYILWQLTGSAASGPVKELVGSVGGAVTFPLKSKVKQVDSIVWTFNTTPLVTIQPEGGTIIVTQNRNRERVDFPDGGYSLKLSKLKKNDSGIYYVGIYSSSLQQPSTQEYVLHVYEHLSKPKVTMGLQSNKNGTCVTNLTCCMEHGEEDVIYTWKALGQAANESHNGSILPISWRWGESDMTFICVARNPVSRNFSSPILARKLCEGAADDPDSSMVLLCLLLVPLLLSLFVLGLFLWFLKRERQEENNPKGRSSKYGLLHCGNTEKDGKSPLTAHDARHTKAICL

SEQ ID NO: 12322 - protein, 165 aa, Homo sapiens
MAGSPTCLTLIYILWQLTGSAASGPVKELVGSVGGAVTFPLKSKVKQVDSIVWTFNTTPLVTIQPEGGTIIVTQNRNRERVDFPDGGYSLKLSKLKKNDSGIYYVGIYSSSLQQPSTQEYVLHVYENNPKGRSSKYGLLHCGNTEKDGKSPLTAHDARHTKAICL

SEQ ID NO: 12323 - protein, 204 aa, Homo sapiens
MAGSPTCLTLIYILWQLTGSAASGPVKELVGSVGGAVTFPLKSKVKQVDSIVWTFNTTPLVTIQPEGGTIIVTQNRNRERVDFPDGGYSLKLSKLKKNDSGIYYVGIYSSSLQQPSTQEYVLHVYEYIEEKKRVDICRETPNICPHSGENTEYDTIPHTNRTILKEDPANTVYSTVEIPKKMENPHSLLTMPDTPRLFAYENVI

SEQ ID NO: 12324 - protein, 236 aa, Homo sapiens
  SITE 1: note = misc_feature - Xaa can be any naturally occurring amino acid
XAGSPTCLTLIYILWQLTGSAASGPVKELVGSVGGAVTFPLKSKVKQVDSIVWTFNTTPLVTIQPEGGTIIVTQNRNRERVDFPDGGYSLKLSKLKKNDSGIYYVGIYSSSLQQPSTQEYVLHVYEHLSKPKVTMGLQSNKNGTCVTNLTCCMEHGEEDVIYTWKALGQAANESHNGSILPISWRWGESDMTFICVARNPVSRNFSSPILARKLCEENNPKGRSSKYGLLHCGNTE

SEQ ID NO: 12325 - protein, 532 aa, Homo sapiens
MAGPRPPGDSPAIKEDSTGLGPTHEPFSGQPNSTSGDVLLSRRGPGHAIRPPGRAMVLMQDKGSSQQWPGLGGEGGGTGPLSMLRAALLLISLPWGAQGTASTSLSTAGGHTVPPTGGRYLSIGDGSVMEFEFPEDSEGIIVISSQYPGQANRTAPGPMLRVTSLDTEVLTIKNVSAITWGGGGGFVVSIHSGLAGLAPLHIQLVDAHEAPPTLIEERRDFCIKVSPAEDTPATLSADLAHFSENPILYLLLPLIFVNKCSFGCKVELEVLKGLMQSPQPMLLGLLGQFLVMPLYAFLMAKVFMLPKALALGLIITCSSPGGGGSYLFSLLLGGDVTLAISMTFLSTVAATGFLPLSSAIYSRLLSIHETLHVPISKILGTLLFIAIPIAVGVLIKSKLPKFSQLLLQVVKPFSFVLLLGGLFLAYRMGVFILAGIRLPIVLVGITVPLVGLLVGYCLATCLKLPVAQRRTVSIEVGVQNSLLALAMLQLSLRRLQADYASQAPFIVALSGTSEMLALVIGHFIYSSLFPVP

SEQ ID NO: 12326 - protein, 448 aa, Homo sapiens
MVLMQDKGSSQQWPGLGGEGGGTGPLSMLRAALLLISLPWGAQGTASTSLSTAGGHTVPPTGGRYLSIGDGSVMEFEFPEDSEGIIVISSQYPGQANRTAPGPMLRVTSLDTEVLTIKNLVDAHEAPPTLIEERRDFCIKVSPAEDTPATLSADLAHFSENPILYLLLPLIFVNKCSFGCKVELEVLKGLMQSPQPMLLGLLGQFLVMPLYAFLMAKVFMLPKALALGLIITCSSPGGGGSYLFSLLLGGDVTLAISMTFLSTVAATGFLPLSSAIYSRLLSIHETLHVPISKILGTLLFIAIPIAVGVLIKSKLPKFSQLLLQVVKPFSFVLLLGGLFLAYRMGVFILAGIRLPIVLVGITVPLVGLLVGYCLATCLKLPVAQRRTVSIEVGVQNSLLALAMLQLSLRRLQADYASQAPFIVALSGTSEMLALVIGHFIYSSLFPVP

SEQ ID NO: 12327 - protein, 218 aa, Homo sapiens
MVLMQDKGSSQQWPGLGGEGGGTGPLSMLRAALLLISLPWGAQGTASTSLSTAGGHTVPPTGGRYLSIGDGSVMEFEFPEDSEGIIVISSQYPGQANRTAPGPMLRVTSLDTEVLTIKNVSAITWGGGGGFVVSIHSGLAGLAPLHIQLVDAHEAPPTLIEERRDFCIKVSPAEDTPATLSADLAHFSENPILYLLLPLIFVNKCSFGCKVELEVLKG

SEQ ID NO: 12328 - protein, 477 aa, Homo sapiens
MVLMQDKGSSQQWPGLGGEGGGTGPLSMLRAALLLISLPWGAQGTASTSLSTAGGHTVPPTGGRYLSIGDGSVMEFEFPEDSEGIIVISSQYPGQANRTAPGPMLRVTSLDTEVLTIKNVSAITWGGGGGFVVSIHSGLAGLAPLHIQLVDAHEAPPTLIEERRDFCIKVSPAEDTPATLSADLAHFSENPILYLLLPLIFVNKCSFGCKVELEVLKGLMQSPQPMLLGLLGQFLVMPLYAFLMAKVFMLPKALALGLIITCSSPGGGGSYLFSLLLGGDVTLAISMTFLSTVAATGFLPLSSAIYSRLLSIHETLHVPISKILGTLLFIAIPIAVGVLIKSKLPKFSQLLLQVVKPFSFVLLLGGLFLAYRMGVFILAGIRLPIVLVGITVPLVGLLVGYCLATCLKLPVAQRRTVSIEVGVQNSLLALAMLQLSLRRLQADYASQAPFIVALSGTSEMLALVIGHFIYSSLFPVP

SEQ ID NO: 12329 - protein, 477 aa, Homo sapiens; identical to SEQ ID NO: 12328

SEQ ID NO: 12330 - protein, 43 aa, Homo sapiens
GAIMGIFFCLSGVGSLLGSSLVALLSLPGGWLHCPKDFAEEEL

SEQ ID NO: 12331 - protein, 209 aa, Homo sapiens
MDLGRDATRRFFNWFYWSINLGAVLSLLVVAFIQQNISFLLGYSIPVGCVGLAFFIFLFATPVFITKPPMGSQVSSMLKLALQNCCPQLWQRHSARDRQCARVLADERSPQPGASPQEDIANFQVLVKILPVMVTLVPYWMVYFQMQSTYVLQGLHLHIPNIFPANPANISVALRAQGSSYTIPEAWLLLANVVVVLILVPLKDRLIDP

SEQ ID NO: 12332 - protein, 581 aa, Homo sapiens
MPAPRAREQPRVPGERQPLLPRGARGPRRWRRAAGAAVLLVEMLERAAFFGVTANLVLYLNSTNFNWTGEQATRAALVFLGASYLLAPVGGWLADVYLGRYRAVALSLLLYLAASGLLPATAFPDGRSSFCGEMPASPLGPACPSAGCPRSSPSPYCAPVLYAGLLLLGLAASSVRSNLTSFGADQVMDLGRDATRRFFNWFYWSINLGAVLSLLVVAFIQQNISFLLGYSIPVGCVGLAFFIFLFATPVFITKPPMGSQVSSMLKLALQNCCPQLWQRHSARDRQCARVLADERSPQPGASPQEDIANFQVLVKILPVMVTLVPYWMVYFQMQSTYVLQGLHLHIPNIFPANPANISVALRAQGSSYTIPEAWLLLANVVVVLILVPLKDRLIDPLLLRCKLLPSALQKMALGMFFGFTSVIVAGVLEMERLHYIHHNETVSQQIGEVLYNAAPLSIWWQIPQYLLIGISEIFASIPGLEFAYSEAPRSMQGAIMGIFFCLSGVGSLLGSSLVALLSLPGGWLHCPKDFGNINNCRMDLYFFLLAGIQAVTALLFVWIAGRYERASQGPASHSRFSRDRG

SEQ ID NO: 12333 - protein, 456 aa, Homo sapiens
MPAPRAREQPRVPGERQPLLPRGARGPRRWRRAAGAAVLLVEMLERAAFFGVTANLVLYLNSTNFNWTGEQATRAALVFLGASYLLAPVGGWLADVYLGRYRAVALSLLLYLAASGLLPATAFPDGRSSFCGEMPASPLGPACPSAGCPRSSPSPYCAPVLYAGLLLLGLAASSVRSNLTSFGADQVMDLGRDATRRFFNWFYWSINLGAVLSLLVVAFIQQNISFLLGYSIPVGCVGLAFFIFLFATPVFITKPPMGSQVSSMLKLALQNCCPQLWQRHSARDRQCARVLADERSPQPGASPQEDIANFQVLVKILPVMVTLVPYWMVYFQMQSTYVLQGLHLHIPNIFPANPANISVALRAQGSSYTESWRWSAYTTSTTTRPCPSRLGRSCTTRHHCPSGGRSLSTCSLGSVRSLPASQAWSLPTQRPRAPCRAPSWASSSACRGWAHCWAPA

SEQ ID NO: 12334 - protein, 149 aa, Homo sapiens
MPASPLGPACPSAGCPRSSPSPYCAPVLYAGLLLLGLAASSVRSNLTSFGADQVMDLGRDATRRFFNWFYWSINLGAVLSLLVVAFIQQNISFLLGYSIPVGCVGLAFFIFLFATPVFITKPPMGSQVSSMLKLALQNCCPQLWQRHSA

SEQ ID NO: 12335 - protein, 247 aa, Homo sapiens
  SITE 1: note = misc_feature - Xaa can be any naturally occurring amino acid
XPGASPQEDIANFQVLVKILPVMVTLVPYWMVYFQIPEAWLLLANVVVVLILVPLKDRLIDPLLLRCKLLPSALQKMALGMFFGFTSVIVAGVLEMERLHYIHHNETVSQQIGEVLYNAAPLSIWWQIPQYLLIGISEIFASIPGLEFAYSEAPRSMQGAIMGIFFCLSGVGSLLGSSLVALLSLPGGWLHCPKDFGNINNCRMDLYFFLLAGIQAVTALLFVWIAGRYERASQGPASHSRFSRDRG

SEQ ID NO: 12336 - protein, 353 aa, Homo sapiens
MGIFPGIILIFLRVKFATAAVIHQKSTTVSHEMSGLNWKPFVYGGLASIVAEFGTFPVDLTKTRLQVQGQSIDARFKEIKYRGMFHALFRICKEEGVLALYSGIAPALLRQASYGTIKIGIYQSLKRLFVERLEDETLLINMICGVVSGVISSTIANPTDVLKIRMQAQGSLFQGSMIGSFIDIYQQEGTRGLWRCLCSKAVTGCVLWLMPVIPALWEANAGGSLEGVVPTAQRAAIVVGVELPVYDITKKHLILSGMMGDTILTHFVSSFTCGLAGALASNPVDVVRTRMMNQRAIVGHVDLYKGTVDGILKMWKHEGFFALYKGFWPNWLRLGPWNIIFFITYEQLKRLQI

SEQ ID NO: 12337 - protein, 353 aa, Homo sapiens; identical to SEQ ID NO: 12336

SEQ ID NO: 12338 - protein, 322 aa, Homo sapiens
MGIFPGIILIFLRVKFATAAVIHQKSTTVSHEMSGLNWKPFVYGGLASIVAEFGTFPVDLTKTRLQVQGQSIDARFKEIKYRGMFHALFRICKEEGVLALYSGIAPALLRQASYGTIKIGIYQSLKRLFVERLEDETLLINMICGVVSGVISSTIANPTDVLKIRMQAQGSLFQGSMIGSFIDIYQQEGTRGLWRGVVPTAQRAAIVVGVELPVYDITKKHLILSGMMGDTILTHFVSSFTCGLAGALASNPVDVVRTRMMNQRAIVGHVDLYKGTVDGILKMWKHEGFFALYKGFWPNWLRLGPWNIIFFITYEQLKRLQI

SEQ ID NO: 12339 - protein, 198 aa, Homo sapiens
MGIFPGIILIFLRVKFATAAVIVSGHQKSTTVSHEMSGLNWKPFVYGGLASIVAEFGTFPVDLTKTRLQVQGQSIDARFKEIKYRGMFHALFRICKEEGVLALYSGIAPALLRQASYGTIKIGIYQSLKRLFVERLEDETLLINMICGVVSGVISSTIANPTDVLKIRMQAQGSLFQGSMIGSFIDIYQQEGTRGLWR

SEQ ID NO: 12340 - protein, 325 aa, Homo sapiens
MGIFPGIILIFLRVKFATAAVIVSGHQKSTTVSHEMSGLNWKPFVYGGLASIVAEFGTFPVDLTKTRLQVQGQSIDARFKEIKYRGMFHALFRICKEEGVLALYSGIAPALLRQASYGTIKIGIYQSLKRLFVERLEDETLLINMICGVVSGVISSTIANPTDVLKIRMQAQGSLFQGSMIGSFIDIYQQEGTRGLWRGVVPTAQRAAIVVGVELPVYDITKKHLILSGMMGDTILTHFVSSFTCGLAGALASNPVDVVRTRMMNQRAIVGHVDLYKGTVDGILKMWKHEGFFALYKGFWPNWLRLGPWNIIFFITYEQLKRLQI

SEQ ID NO: 12341 - protein, 325 aa, Homo sapiens; identical to SEQ ID NO: 12340

SEQ ID NO: 12342 - protein, 290 aa, Homo sapiens
MSGLNWKPFVYGGLASIVAEFGTFPVDLTKTRLQVQGQSIDARFKEIKYRGMFHALFRICKEEGVLALYSGIAPALLRQASYGTIKIGIYQSLKRLFVERLEDETLLINMICGVVSGVISSTIANPTDVLKIRMQAQGSLFQGSMIGSFIDIYQQEGTRGLWRGVVPTAQRAAIVVGVELPVYDITKKHLILSGMMGDTILTHFVSSFTCGLAGALASNPVDVVRTRMMNQRAIVGHVDLYKGTVDGILKMWKHEGFFALYKGFWPNWLRLGPWNIIFFITYEQLKRLQI

SEQ ID NO: 12343 - protein, 75 aa, Homo sapiens
MLCLCLYVPVIGEAQTEFQYFESKGLPAELKSIFKLSVFIPSQEFSTYRQWKQCPLCTKGDLQIQGRRQKEAQAL

SEQ ID NO: 12344 - protein, 469 aa, Homo sapiens
MLCLCLYVPVIGEAQTEFQYFESKGLPAELKSIFKLSVFIPSQEFSTYRQWKQKIVQAGDKDLDGQLDFEEFVHYLQDHEKKLRLVFKSLDKKNDGRIDAQEIMQSLRDLGVKISEQQAEKILKSMDKNGTMTIDWNEWRDYHLLHPVENIPEIILYWKHSTIFDVGENLTVPDEFTVEERQTGMWWRHLVAGGGAGAVSRTCTAPLDRLKVLMQVHASRSNNMGIVGGFTQMIREGGARSLWRGNGINVLKIAPESAIKFMAYEQIKRLVGSDQETLRIHERLVAGSLAGAIAQSSIYPMEVLKTRMALRKTGQYSGMLDCARRILAREGVAAFYKGYVPNMLGIIPYAGIDLAVYETLKNAWLQHYAVNSADPGVFVLLACGTMSSTCGQLASYPLALVRTRMQAQASIEGAPEVTMSSLFKHILRTEGAFGLYRGLAPNFMKVIPAVSISYVVYENLKITLGVQSR

SEQ ID NO: 12345 - protein, 501 aa, Homo sapiens
MLQMLWHFLASFFPRAGCHGSREGDDREVRGTPAPAWRDQMASFLGKQDGRAEATEKRPTILLVVGPAEQFPKKIVQAGDKDLDGQLDFEEFVHYLQDHEKKLRLVFKSLDKKNDGRIDAQEIMQSLRDLGVKISEQQAEKILKRIRTGHFWGPVTYMDKNGTMTIDWNEWRDYHLLHPVENIPEIILYWKHSTIFDVGENLTVPDEFTVEERQTGMWWRHLVAGGGAGAVSRTCTAPLDRLKVLMQVHASRSNNMGIVGGFTQMIREGGARSLWRGNGINVLKIAPESAIKFMAYEQIKRLVGSDQETLRIHERLVAGSLAGAIAQSSIYPMEVLKTRMALRKTGQYSGMLDCARRILAREGVAAFYKGYVPNMLGIIPYAGIDLAVYETLKNAWLQHYAVNSADPGVFVLLACGTMSSTCGQLASYPLALVRTRMQAQASIEGAPEVTMSSLFKHILRTEGAFGLYRGLAPNFMKVIPAVSISYVVYENLKITLGVQSR

SEQ ID NO: 12346 - protein, 489 aa, Homo sapiens
MLQMLWHFLASFFPRAGCHGSREGDDREVRGTPAPAWRDQMASFLGKQDGRAEATEKRPTILLVVGPAEQFPKKIVQAGDKDLDGQLDFEEFVHYLQDHEKKLRLVFKSLDKKNDGRIDAQEIMQSLRDLGVKISEQQAEKILKSMDKNGTMTIDWNEWRDYHLLHPVENIPEIILYWKHSTIFDVGENLTVPDEFTVEERQTGMWWRHLVAGGGAGAVSRTCTAPLDRLKVLMQVHASRSNNMGIVGGFTQMIREGGARSLWRGNGINVLKIAPESAIKFMAYEQIKRLVGSDQETLRIHERLVAGSLAGAIAQSSIYPMEVLKTRMALRKTGQYSGMLDCARRILAREGVAAFYKGYVPNMLGIIPYAGIDLAVYETLKNAWLQHYAVNSADPGVFVLLACGTMSSTCGQLASYPLALVRTRMQAQASIEGAPEVTMSSLFKHILRTEGAFGLYRGLAPNFMKVIPAVSISYVVYENLKITLGVQSR

SEQ ID NO: 12347 - protein, 515 aa, Homo sapiens
MVSSVLCRCVASPPPDAAATAASSSASSPASVGDPCGGAICGGPDHRLRLWRLFQTLDVNRDGGLCVNDLAVGLRRLGLHRTEGELQKIVQAGDKDLDGQLDFEEFVHYLQDHEKKLRLVFKSLDKKNDGRIDAQEIMQSLRDLGVKISEQQAEKILKRIRTGHFWGPVTYMDKNGTMTIDWNEWRDYHLLHPVENIPEIILYWKHSTIFDVGENLTVPDEFTVEERQTGMWWRHLVAGGGAGAVSRTCTAPLDRLKVLMQVHASRSNNMGIVGGFTQMIREGGARSLWRGNGINVLKIAPESAIKFMAYEQIKRLVGSDQETLRIHERLVAGSLAGAIAQSSIYPMEVLKTRMALRKTGQYSGMLDCARRILAREGVAAFYKGYVPNMLGIIPYAGIDLAVYETLKNAWLQHYAVNSADPGVFVLLACGTMSSTCGQLASYPLALVRTRMQAQASIEGAPEVTMSSLFKHILRTEGAFGLYRGLAPNFMKVIPAVSISYVVYENLKITLGVQSR

SEQ ID NO: 12348 - protein, 503 aa, Homo sapiens
MVSSVLCRCVASPPPDAAATAASSSASSPASVGDPCGGAICGGPDHRLRLWRLFQTLDVNRDGGLCVNDLAVGLRRLGLHRTEGELQKIVQAGDKDLDGQLDFEEFVHYLQDHEKKLRLVFKSLDKKNDGRIDAQEIMQSLRDLGVKISEQQAEKILKSMDKNGTMTIDWNEWRDYHLLHPVENIPEIILYWKHSTIFDVGENLTVPDEFTVEERQTGMWWRHLVAGGGAGAVSRTCTAPLDRLKVLMQVHASRSNNMGIVGGFTQMIREGGARSLWRGNGINVLKIAPESAIKFMAYEQIKRLVGSDQETLRIHERLVAGSLAGAIAQSSIYPMEVLKTRMALRKTGQYSGMLDCARRILAREGVAAFYKGYVPNMLGIIPYAGIDLAVYETLKNAWLQHYAVNSADPGVFVLLACGTMSSTCGQLASYPLALVRTRMQAQASIEGAPEVTMSSLFKHILRTEGAFGLYRGLAPNFMKVIPAVSISYVVYENLKITLGVQSR

SEQ ID NO: 12349 - protein, 165 aa, Homo sapiens
  SITE 1: note = misc_feature - Xaa can be any naturally occurring amino acid
XTVEERQTGMWWRHLVAGGGAGAVSRTCTAPLDRLKVLMQVLKTRMALRKTGQYSGMLDCARRILAREGVAAFYKGYVPNMLGIIPYAGIDLAVYETLKNAWLQHYAVNSADPGVFVLLACGTMSSTCGQLASYPLALVRTRMQAQGKAGPGQSPGRSGGADRSI

SEQ ID NO: 12350 - protein, 81 aa, Homo sapiens
MEQQDQSMKEGRLTLVLALATLIAAFGSSFQYGYNVAAVNSPALLMQQFYNETYYGRTGEFMEDFPLTLLWSVTVSMFPFG

SEQ ID NO: 12351 - protein, 139 aa, Homo sapiens
MEQQDQSMKEGRLTLVLALATLIAAFGSSFQYGYNVAAVNSPALLMQQFYNETYYGRTGEFMEDFPLTLLWSVTVSMFPFGGFIGSLLVGPLVNKFGRKGALLFNNIFSIVPAILMGCSRVATSFELIIISRLLVGICA

SEQ ID NO: 12352 - protein, 166 aa, Homo sapiens
MEQQDQSMKEGRLTLVLALATLIAAFGSSFQYGYNVAAVNSPALLMQQFYNETYYGRTGEFMEDFPLTLLWSVTVSMFPFGGFIGSLLVGPLVNKFGRKGALLFNNIFSIVPAILMGCSRVATSFELIIISRLLVGICAGVSSNVVPMYLGELAPKNLRGALGVVP

SEQ ID NO: 12353 - protein, 190 aa, Homo sapiens
MEQQDQSMKEGRLTLVLALATLIAAFGSSFQYGYNVAAVNSPALLMQQFYNETYYGRTGEFMEDFPLTLLWSVTVSMFPFGGFIGSLLVGPLVNKFGRKGALLFNNIFSIVPAILMGCSRVATSFELIIISRLLVGICAGVSSNVVPMYLGELAPKNLRGALGVVPQLFITVGILVAQIFGLRNLLANVD

SEQ ID NO: 12354 - protein, 190 aa, Homo sapiens; identical to SEQ ID NO: 12353

SEQ ID NO: 12355 - protein, 190 aa, Homo sapiens; identical to SEQ ID NO: 12353

SEQ ID NO: 12356 - protein, 190 aa, Homo sapiens; identical to SEQ ID NO: 12353

SEQ ID NO: 12357 - protein, 244 aa, Homo sapiens
MEQQDQSMKEGRLTLVLALATLIAAFGSSFQYGYNVAAVNSPALLMQQFYNETYYGRTGEFMEDFPLTLLWSVTVSMFPFGGFIGSLLVGPLVNKFGRKGALLFNNIFSIVPAILMGCSRVATSFELIIISRLLVGICAGVSSNVVPMYLGELAPKNLRGALGVVPQLFITVGILVAQIFGLRNLLANVDGEFRTSREHPHPFTTTLGPLLVFQSHHHRTGLSADWSLLTGWMSLGGPSCPEPT

SEQ ID NO: 12358 - protein, 501 aa, Homo sapiens
MEQQDQSMKEGRLTLVLALATLIAAFGSSFQYGYNVAAVNSPALLMQQFYNETYYGRTGEFMEDFPLTLLWSVTVSMFPFGGFIGSLLVGPLVNKFGRKGALLFNNIFSIVPAILMGCSRVATSFELIIISRLLVGICAGVSSNVVPMYLGELAPKNLRGALGVVPQLFITVGILVAQIFGLRNLLANVDGWPILLGLTGVPAALQLLLLPFFPESPRYLLIQKKDEAAAKKALQTLRGWDSVDREVAEIRQEDEAEKAAGFISVLKLFRMRSLRWQLLSIIVLMGGQQLSGVNAIYYYADQIYLSAGVPEEHVQYVTAGTGAVNVVMTFCAVFVVELLGRRLLLLLGFSICLIACCVLTAALALQDTVSWMPYISIVCVISYVIGHALGPSPIPALLITEIFLQSSRPSAFMVGGSVHWLSNFTVGLIFPFIQEGLGPYSFIVFAVICLLTTIYIFLIVPETKAKTFIEINQIFTKMNKVSEVYPEKEELKELPPVTSEQ

SEQ ID NO: 12359 - protein, 313 aa, Homo sapiens
MALLVDRVRGHWRIAAGLLFNLLVSICIVFLNKWIYVYHGFPNMSLTLVHFVVTWLGLYICQKLDIFAPKSLPPSRLLLLALSFCGFVVFTNLSLQNNTIGTYQLAKAMTTPVIIAIQTFCYQKTFSTRIQLTLIPITLGVILNSYYDVKFNFLGMVFAALGVLVTSLYQVWVGAKQHELQVNSMQLLYYQAPMSSAMLLVAVPFFEPVFGEGGIFGPWSVSALLMVLLSGVIAFMVNLSIYWIIGNTSPVTYNMFGHFKFCITLFGGYVLFKDPLSINQALGILCTLFGILAYTHFKLSEQEGSRSKLAQRP

SEQ ID NO: 12360 - protein, 125 aa, Homo sapiens
QAPMSSAMLLVAVPFFEPVFGEGGIFGPWSVSALSTRLECSGTIMAHCSLSLLGSSNPPASTSPVAGTTGAHQHTWLIFIFFVETEFCHVAQADLKLLSSSHLSASASRSAGITGLSHHTWPVIS

SEQ ID NO: 12361 - protein, 39 aa, Homo sapiens
MKNVMVMILVVDTKILILIMKVNFDILEREKHHMLKIMQ

SEQ ID NO: 12362 - protein, 39 aa, Homo sapiens; identical to SEQ ID NO: 12361

SEQ ID NO: 12363 - protein, 38 aa, Homo sapiens
MKVHMHTKFCLICLLTFIFHHCNHCHEEHDHGPEALHR

SEQ ID NO: 12364 - protein, 126 aa, Homo sapiens
MKVHMHTKFCLICLLTFIFHHCNHCHEEHDHGPEALHRQHRGMTELEPSKFSKQAAENEKKYYIEKLFERYGENGRLSFFGLEKLLTNLGLGERKVVEINHEDLGHDHVSHLDILAVQEGKHFHSH

SEQ ID NO: 12365 - protein, 130 aa, Homo sapiens
MKVHMHTKFCLICLLTFIFHHCNHCHEEHDHGPEALHRQHRGMTELEPSKFSKQAAENEKKYYIEKLFERYGENGRLSFFGLEKLLTNLGLGERKVVEINHEDLGHDHVSHLDILAVQEGKHFHSHNHQH

SEQ ID NO: 12366 - protein, 831 aa, Homo sapiens
MKVHMHTKFCLICLLTFIFHHCNHCHEEHDHGPEALHRQHRGMTELEPSKFSKQAAENEKKYYIEKLFERYGENGRLSFFGLEKLLTNLGLGERKVVEINHEDLGHDHVSHLDILAVQEGKHFHSHNHQHSHNHLNSENQTVTSVSTKRNHKCDPEKETVEVSVKSDDKHMHDHNHRLRHHHRLHHHLDHNNTHHFHNDSITPSERGEPSNEPSTETNKTQEQSDVKLPKGKRKKKGRKSNENSEVITPGFPPNHDQGEQYEHNRVHKPDRVHNPGHSHVHLPERNGHDPGRGHQDLDPDNEGELRHTRKREAPHVKNNAIISLRKDLNEDDHHHECLNVTQLLKYYGHGANSPISTDLFTYLCPALLYQIDSRLCIEHFDKLLVEDINKDKNLVPEDEANIGASAWICGIISITVISLLSLLGVILVPIINQGCFKFLLTFLVALAVGTMSGDALLHLLPHSQGGHDHSHQHAHGHGHSHGHESNKFLEEYDAVLKGLVALGGIYLLFIIEHCIRMFKHYKQQRGKQKWFMKQNTEESTIGRKLSDHKLNNTPDSDWLQLKPLAGTDDSVVSEDRLNETELTDLEGQQESPPKNYLCIEEEKIIDHSHSDGLHTIHEHDLHAAAHNHHGENKTVLRKHNHQWHHKHSHHSHGPCHSGSDLKETGIANIAWMVIMGDGIHNFSDGLAIGAAFSAGLTGGISTSIAVFCHELPHELGDFAVLLKAGMTVKQAIVYNLLSAMMAYIGMLIGTAVGQYANNITLWIFAVTAGMFLYVALVDMLPEMLHGDGDNEEHGFCPVGQFILQNLGLLFGFAIMLVIALYEDKIVFDIQF

SEQ ID NO: 12367 - protein, 831 aa, Homo sapiens; identical to SEQ ID NO: 12366

SEQ ID NO: 12368 - protein, 202 aa, Homo sapiens
MKKTFYKRLLLYFIALAIGTLYSNALFQLIPEAFGFNPLEDYYVSKSAVVFGGFYLFFFTEKILKILLKQKNEHHHGHSHYASESLPSKKDQEEGVMEKLQNGDLDHMIPQHCSSELDGKAPMVDEKVIVGSLSVQDLQASQSACYWLKGVRYSDIGTLAWMITLSDGLHNFIDGLAIGASFTVSVFQGISTSVAILCEEFP

SEQ ID NO: 12369 - protein, 53 aa, Homo sapiens
MKLLLLHPAFQSCLLLTLLGLWRTTPEAHASSLGAPAISAASFLQDLIHRYGE

SEQ ID NO: 12370 - protein, 89 aa, Homo sapiens
MKLLLLHPAFQSCLLLTLLGLWRTTPEAHASSLGAPAISAASFLQDLIHRYGEGDSLTLQQLKALLNHLDVGVGRGNVTQHVQGHRNLS

SEQ ID NO: 12371 - protein, 90 aa, Homo sapiens
MKLLLLHPAFQSCLLLTLLGLWRTTPEAHASSLGAPAISAASFLQDLIHRYGEGDSLTLQQLKALLNHLDVGVGRGNVTQHVQGHRNLST

SEQ ID NO: 12372 - protein, 122 aa, Homo sapiens
MKLLLLHPAFQSCLLLTLLGLWRTTPEAHASSLGAPAISAASFLQDLIHRYGEGDSLTLQQLKALLNHLDVGVGRGNVTQHVQGHRNLSTCFSSGDLFTAHNFSEQSRIGSSELQEFCPTIL

SEQ ID NO: 12373 - protein, 127 aa, Homo sapiens
MKLLLLHPAFQSCLLLTLLGLWRTTPEAHASSLGAPAISAASFLQDLIHRYGEGDSLTLQQLKALLNHLDVGVGRGNVTQHVQGHRNLSTCFSSGDLFTAHNFSEQSRIGSSELQEFCPTILQQLDS

SEQ ID NO: 12374 - protein, 155 aa, Homo sapiens
MKLLLLHPAFQSCLLLTLLGLWRTTPEAHASSLGAPAISAASFLQDLIHRYGEGDSLTLQQLKALLNHLDVGVGRGNVTQHVQGHRNLSTCFSSGDLFTAHNFSEQSRIGSSELQEFCPTILQQLDSRACTSENQENEENEQTEEGRPSAVEVWG

SEQ ID NO: 12375 - protein, 492 aa, Homo sapiens
MKLLLLHPAFQSCLLLTLLGLWRTTPEAHASSLGAPAISAASFLQDLIHRYGEGDSLTLQQLKALLNHLDVGVGRGNVTQHVQGHRNLSTCFSSGDLFTAHNFSEQSRIGSSELQEFCPTILQQLDSRACTSENQENEENEQTEEGRPSAVEVWGFGFLSVSLINLASLLGVLVLPCTEKAFFSRVLTYFIALSIGTLLSNALFQLIPEAFGFNPLEDYYVSKSAVVFGGFYLFFFTEKILKILLKQKNEHHHGHSHYASESLPSKKDQEEGVMEKLQNGDLDHMIPQHCSSELDGKAPMVDEKVIVGSLSVQDLQASQSACYWLKGVRYSDIGTLAWMITLSDGLHNFIDGLAIGASFTVSVFQGISTSVAILCEEFPHELGDFVILLNAGMSIQQALFFNFLSACCCYLGLAFGILAGSHFSANWIFALAGGMFLYISLADMFPEMNEVCQEDERKGSILIPFIIQNLGLLTGFTIMVVLTMYSGQIQIG

SEQ ID NO: 12376 - protein, 481 aa, Homo sapiens
MKLLLLHPAFQSCLLLTLLGLWRTTPEAHASSLGAPAISAASFLQDLIHRYGEGDSLTLQQLKALLNHLDVGVGRGNVTQHVQGHRNLSTCFSSGDLFTAHNFSEQSRIGSSELQEFCPTILQQLDSRACTSENQENEENEQTEEGRPSAVEVWGYGLLCVTVISLCSLLGASVVPFMKKTFYKRLLLYFIALAIGTLYSNALFQLIPEAFGFNPLEDYYVSKSAVVFGGFYLFFFTEKILKILLKQKNEHHHGHSHYASESLPSKKDQEEGVMEKLQNGDLDHMIPQHCSSELDGKAPMVDEKVIVGSLSVQDLQASQSACYWLKGVRYSDIGTLAWMITLSDGLHNFIDGLAIGASFTVSVFQGISTSVAILCEEFPHELGDFVILLNAGMSIQQALFFNFLSACCCYLGLAFGILAGSHFSANWIFALAGGMFLYISLADMMEFCSVAQAGVQWCHLSSLQPLPLGLKRLSCLSLPSN

SEQ ID NO: 12377 - protein, 492 aa, Homo sapiens
MKLLLLHPAFQSCLLLTLLGLWRTTPEAHASSLGAPAISAASFLQDLIHRYGEGDSLTLQQLKALLNHLDVGVGRGNVTQHVQGHRNLSTCFSSGDLFTAHNFSEQSRIGSSELQEFCPTILQQLDSRACTSENQENEENEQTEEGRPSAVEVWGYGLLCVTVISLCSLLGASVVPFMKKTFYKRLLLYFIALAIGTLYSNALFQLIPEAFGFNPLEDYYVSKSAVVFGGFYLFFFTEKILKILLKQKNEHHHGHSHYASESLPSKKDQEEGVMEKLQNGDLDHMIPQHCSSELDGKAPMVDEKVIVGSLSVQDLQASQSACYWLKGVRYSDIGTLAWMITLSDGLHNFIDGLAIGASFTVSVFQGISTSVAILCEEFPHELGDFVILLNAGMSIQQALFFNFLSACCCYLGLAFGILAGSHFSANWIFALAGGMFLYISLADMFPEMNEVCQEDERKGSILIPFIIQNLGLLTGFTIMVVLTMYSGQIQIG

SEQ ID NO: 12378 - protein, 492 aa, Homo sapiens; identical to SEQ ID NO: 12377

SEQ ID NO: 12379 - protein, 184 aa, Homo sapiens
MASLVSLELGLLLAVLVVTATASPPAGLLSLLTSGQGALDQEALGGLLNTLADRVHCANGPCGKACVDIPQLLEEAVGAGAPGSAGGVLAALLDHVRSGSCFHALPSPQYFVDFVFQQHSSEVPMTLAELSALMQRLGVGREAHSDHSHRHRGASSRDPVPLISSSNSSSVWDTVCLSARDVMA

SEQ ID NO: 12380 - protein, 647 aa, Homo sapiens
MASLVSLELGLLLAVLVVTATASPPAGLLSLLTSGQGALDQEALGGLLNTLADRVHCANGPCGKCLSVEDALGLGEPEGSGLPPGPVLEARYVARLSAAAVLYLSNPEGTCEDARAGLWASHADHLLALLESPKALTPGLSWLLQRMQARAAGQTPKMACVDIPQLLEEAVGAGAPGSAGGVLAALLDHVRSGSCFHALPSPQYFVDFVFQQHSSEVPMTLAELSALMQRLGVGREAHSDHSHRHRGASSRDPVPLISSSNSSSVWDTVCLSARDVMAAYGLSEQAGVTPEAWAQLSPALLQQQLSGACTSQSRPPVQDQLSQSERYLYGSLATLLICLCAVFGLLLLTCTGCRGVTHYILQTFLSLAVGAVTGDAVLHLTPKVLGLHTHSEEGLSPQPTWRLLAMLAGLYAFFLFENLFNLLLPRDPEDLEDGPCGHSSHSHGGHSHGVSLQLAPSELRQPKPPHEGSRADLVAEESPELLNPEPRRLSPELRLLPYMITLGDAVHNFADGLAVGAAFASSWKTGLATSLAVFCHELPHELGDFAALLHAGLSVRQALLLNLASALTAFAGLYVALAVGVSEESEAWILAVATGLFLYVALCDMLPAMLKVRDPRPWLLFLLHNVGLLGGWTVLLLLSLYEDDITF

SEQ ID NO: 12381 - protein, 622 aa, Homo sapiens
MVDVVGLERETGPRGSPWPGLPLPSLVGPAPLLTCLCPQCLSVEDALGLGEPEGSGLPPGPVLEARYVARLSAAAVLYLSNPEGTCEDARAGLWASHADHLLALLESPKALTPGLSWLLQRMQARAAGQTPKMACVDIPQLLEEAVGAGAPGSAGGVLAALLDHVRSGSCFHALPSPQYFVDFVFQQHSSEVPMTLAELSALMQRLGVGREAHSDHSHRHRGASSRDPVPLISSSNSSSVWDTVCLSARDVMAAYGLSEQAGVTPEAWAQLSPALLQQQLSGACTSQSRPPVQDQLSQSERYLYGSLATLLICLCAVFGLLLLTCTGCRGVTHYILQTFLSLAVGAVTGDAVLHLTPKVLGLHTHSEEGLSPQPTWRLLAMLAGLYAFFLFENLFNLLLPRDPEDLEDGPCGHSSHSHGGHSHGVSLQLAPSELRQPKPPHEGSRADLVAEESPELLNPEPRRLSPELRLLPYMITLGDAVHNFADGLAVGAAFASSWKTGLATSLAVFCHELPHELGDFAALLHAGLSVRQALLLNLASALTAFAGLYVALAVGVSEESEAWILAVATGLFLYVALCDMLPAMLKVRDPRPWLLFLLHNVGLLGGWTVLLLLSLYEDDITF

SEQ ID NO: 12382 - protein, 239 aa, Homo sapiens
MMGSPEQNHYLAQLFGLYGENGTLTAGGLARLLHSLGLGRVQGLRLGQHGPLTGRAASPAADNSTHRPQNPELSVDVWAGMPLGPSGWGDLEESKAPHLPRGPAPSGLDLLHRLLLLDHSLADHLNEDCLNGSQLLVNFGLSPAAPLTPRQFALLCPALLYQIDSRVCIGAPAPAPPGDLLSALLQSALAVLLLSLPSPLSLLLLRLLGPRLLRPLLGFLGALAVGTLCGDALLHLLPH

SEQ ID NO: 12383 - protein, 123 aa, Homo sapiens
MMGSPVSHLLAGFCVWVVLGWVGGSVPNLGPAEQEQNHYLAQLFGLYGENGTLTAGGLARLLHSLGLGRVQGLRLGQHGPLTGRAASPAADNSTHRPQNPELSVDVWAGMPLGPSGWGDLEES

SEQ ID NO: 12384 - protein, 126 aa, Homo sapiens
MMGSPVSHLLAGFCVWVVLGWVGGSVPNLGPAEQEQNHYLAQLFGLYGENGTLTAGGLARLLHSLGLGRVQGLRLGQHGPLTGRAASPAADNSTHRPQNPELSVDVWAGMPLGPSGWGDLEESKAP

SEQ ID NO: 12385 - protein, 129 aa, Homo sapiens
MMGSPVSHLLAGFCVWVVLGWVGGSVPNLGPAEQEQNHYLAQLFGLYGENGTLTAGGLARLLHSLGLGRVQGLRLGQHGPLTGRAASPAADNSTHRPQNPELSVDVWAGMPLGPSGWGDLEESKAPHLP

SEQ ID NO: 12386 - protein, 156 aa, Homo sapiens
MMGSPVSHLLAGFCVWVVLGWVGGSVPNLGPAEQEQNHYLAQLFGLYGENGTLTAGGLARLLHSLGLGRVQGLRLGQHGPLTGRAASPAADNSTHRPQNPELSVDVWAGMPLGPSGWGDLEESKAPHLPRGPAPSGLDLLHRLLLLDHSLADHLNE

SEQ ID NO: 12387 - protein, 540 aa, Homo sapiens
MMGSPVSHLLAGFCVWVVLGWVGGSVPNLGPAEQEQNHYLAQLFGLYGENGTLTAGGLARLLHSLGLGRVQGLRLGQHGPLTGRAASPAADNSTHRPQNPELSVDVWAGMPLGPSGWGDLEESKAPHLPRGPAPSGLDLLHRLLLLDHSLADHLNEDCLNGSQLLVNFGLSPAAPLTPRQFALLCPALLYQIDSRVCIGAPAPAPPGDLLSALLQSALAVLLLSLPSPLSLLLLRLLGPRLLRPLLGFLGALAVGTLCGDALLHLLPHAQEGRHAGPGGLPEKDLGPGLSVLGGLFLLFVLENMLGLLRHRGLRPRCCRRKRRNLETRNLDPENGSGMALQPLQAAPEPGAQGQREKNSQHPPALAPPGHQGHSHGHQGGTDITWMVLLGDGLHNLTDGLAIGAAFSDGFSSGLSTTLAVFCHELPHELGDFAMLLQSGLSFRRLLLLSLVSGALGLGGAVLGVGLSLGPVPLTPWVFGVTAGVFLYVALVDMLPALLRPPEPLPTPHVLLQGLGLLLGGGLMLAITLLEERLLPVTTEG

SEQ ID NO: 12388 - protein, 540 aa, Homo sapiens; identical to SEQ ID NO: 12387

SEQ ID NO: 12389 - protein, 685 aa, Homo sapiens
MAEDKSKRDSIEMSMKGCQTNNGFVHNEDILEQTPDPGSSTDNLKHSTRGILGSQEPDFKGVQPYAGMPKEVLFQFSGQARYRIPREILFWLTVASVLVLIAATIAIIALSPKCLDWWQEGPMYQIYPRSFKDSNKDGNGDLKGIQDKLDYITALNIKTVWITSFYKSSLKDFRYGVEDFREVDPIFGTMEDFENLVAAIHDKGLKLIIDFIPNHTSDKHIWFQLSRTRTGKYTDYYIWHDCTHENGKTIPPNNWLSVYGNSSWHFDEVRNQCYFHQFMKEQPDLNFRNPDVQEEIKEILRFWLTKGVDGFSLDAVKFLLEAKHLRDEIQVNKTQIPDTVTQYSELYHDFTTTQVGMHDIVRSFRQTMDQYSTEPGRYRFMGTEAYAESIDRTVMYYGLPFIQEADFPFNNYLSMLDTVSGNSVYEVITSWMENMPEGKWPNWMIGGPDSSRLTSRLGNQYVNVMNMLLFTLPGTPITYYGEEIGMGNIVAANLNESYDINTLRSKSPMQWDNSSNAGFSEASNTWLPTNSDYHTVNVDVQKTQPRSALKLYQDLSLLHANELLLNRGWFCHLRNDSHYVVYTRELDGIDRIFIVVLNFGESTLLNLHNMISGLPAKMRIRLSTNSADKGSKVDTSGIFLDKGEGLIFEHNTKNLLHRQTAFRDRCFVSNRACYSSVLNILYTSC

SEQ ID NO: 12390 - protein, 564 aa, Homo sapiens
MAEDKSKRDSIEMSMKGCQTNNGFVHNEDILEQTPDPGSSTDNLKHSTRGILGSQEPDFKGVQPYAGMPKEVLFQFSGQARYRIPREILFWLTVASVLVLIAATIAIIALSPKCLDWWQEGPMYQIYPRSFKDSNKDGNGDLKGIQDKLDYITALNIKTVWITSFYKSSLKDFRYGVEDFREVDPIFGTMEDFENLVAAIHDKGLKLIIDFIPNHTSDKHIWFQLSRTRTGKYTDYYIWHDCTHENGKTIPPNNWLSVYGNSSWHFDEVRNQCYFHQFMKEQPDLNFRNPDVQEEIKEILRFWLTKGVDGFSLDAVKFLLEAKHLRDEIQVNKTQIPDTVTQYSELYHDFTTTQVGMHDIVRSFRQTMDQYSTEPGRYRFMGTEAYAESIDRTVMYYGLPFIQEADFPFNNYLSMLDTVSGNSVYEVITSWMENMPEGKWPNWMIGGPDSSRLTSRLGNQYVNVMNMLLFTLPGTPITYYGEEIGMGNIVAANLNESYDINTLRSKSPMQWDNSSNAGFSEASNTWLPTNSDYHTVNVDVSISENFMLILETKKWVSTESTHSP

SEQ ID NO: 12391 - protein, 564 aa, Homo sapiens
MAEDKSKRDSIEMSMKGCQTNNGFVHNEDILEQTPDPGSSTDNLKHSTRGILGSQEPDFKGVQPYAGMPKEVLFQFSGQARYRIPREILFWLTVASVLVLIAATIAIIALSPKCLDWWQEGPMYQIYPRSFKDSNKDGNGDLKGIQDKLDYITALNIKTVWITSFYKSSLKDFRYGVEDFREVDPIFGTMEDFENLVAAIHDKGLKLIIDFIPNHTSDKHIWFQLSRTRTGKYTDYYIWHDCTHENGKTIPPNNWLSVYGNSSWHFDEVRNQCYFHQFMKEQPDLNFRNPDVQEEIKEILRFWLTKGVDGFSLDAVKFLLEAKHLRDEIQVNKTQIPDTVTQYSELYHDFTTTQVGMHDIVRSFRQTMDQYSTEPGRYRFMGTEAYAESIDRTVMYYGLPFIQEADFPFNNYLSMLDTVSGNSVYEVITSWMENMPEGKWPNWMIGGPDSSRLTSRLGNQYVNVMNMLLFTLPGTPITYYGEEIGMGNIVAANLNESYDINTLRSKSPMQWDNSSNAGFSEASNTWLPTNSDYHTVNVDSCSVTHARVQWRDLGTLQPLLPGFK

SEQ ID NO: 12392 - protein, 502 aa, Homo sapiens
MAEDKSKRDSIEMSMKGCQTNNGFVHNEDILEQTPDPGSSTDNLKHSTRGILGSQEPDFKGVQPYAGMPKEVLFQFSGQARYRIPREILFWLTVASVLVLIAATIAIIALSPKCLDWWQEGPMYQIYPRSFKDSNKDGNGDLKGIQDKLDYITALNIKTVWITSFYKSSLKDFRYGVEDFREVDPIFGTMEDFENLVAAIHDKGLKLIIDFIPNHTSDKHIWFQLSRTRTGKYTDYYIWHDCTHENGKTIPPNNWLSVYGNSSWHFDEVRNQCYFHQFMKEQPDLNFRNPDVQEEIKEILRFWLTKGVDGFSLDAVKFLLEAKHLRDEIQVNKTQIPDTVTQYSELYHDFTTTQVGMHDIVRSFRQTMDQYSTEPGRYRFMGTEAYAESIDRTVMYYGLPFIQEADFPFNNYLSMLDTVSGNSVYEVITSWMENMPEGKWPNWMIGGPDSSRLTSRLGNQYVNVMNMLLFTLPGTPITYYGEEIGMGNIVAANLNESYDIVS

SEQ ID NO: 12393 - protein, 391 aa, Homo sapiens
MAEDKSKRDSIEMSMKGCQTNNGFVHNEDILEQTPDPGSSTDNLKHSTRGILGSQEPDFKGVQPYAGMPKEVLFQFSGQARYRIPREILFWLTVASVLVLIAATIAIIALSPKCLDWWQEGPMYQIYPRSFKDSNKDGNGDLKGIQDKLDYITALNIKTVWITSFYKSSLKDFRYGVEDFREVDPIFGTMEDFENLVAAIHDKGLKLIIDFIPNHTSDKHIWFQLSRTRTGKYTDYYIWHDCTHENGKTIPPNNWLSVYGNSSWHFDEVRNQCYFHQFMKEQPDLNFRNPDVQEEIKEILRFWLTKGVDGFSLDAVKFLLEAKHLRDEIQVNKTQIPDTVTQYSELYHDFTTTQVGMHDIVRSFRQTMDQYSTEPGRYRLTTAYALISSQA

SEQ ID NO: 12394 - protein, 552 aa, Homo sapiens
MAEDKSKRDSIEMSMKGCQTNNGFVHNEDILEQTPDPGSSTDNLKHSTRGILGSQEPDFKGVQPYAGMPKEVLFQFSGQARYRIPREILFWLTVASVLVLIAATIAIIALSPKCLDWWQEGPMYQIYPRSFKDSNKDGNGDLKGIQDKLDYITALNIKTVWITSFYKSSLKDFRYGVEDFREVDPIFGTMEDFENLVAAIHDKGLKLIIDFIPNHTSDKHIWFQLSRTRTGKYTDYYIWHDCTHENGKTIPPNNWLSVYGNSSWHFDEVRNQCYFHQFMKEQPDLNFRNPDVQEEIKEILRFWLTKGVDGFSLDAVKFLLEAKHLRDEIQVNKTQIPDTVTQYSELYHDFTTTQVGMHDIVRSFRQTMDQYSTEPGRYRFMGTEAYAESIDRTVMYYGLPFIQEADFPFNNYLSMLDTVSGNSVYEVITSWMENMPEGKWPNWMIGGPDSSRLTSRLGNQYVNVMNMLLFTLPGTPITYYGEEIGMGNIVAANLNESYDINTLRSKSPMQWDNSSNAGFSEASNTWLPTNSDYHTVNVDVILLRHPCSSAVA

SEQ ID NO: 12395 - protein, 184 aa, Homo sapiens
MGTEAYAESIDRTVMYYGLPFIQEADFPFNNYLSMLDTVSGNSVYEVITSWMENMPEGKWPNWMIGGPDSSRLTSRLGNQYVNVMNMLLFTLPGTPITYYGEEIGMGNIVAANLNESYDINTLRSKSPMQWDNSSNAGFSEASNTWLPTNSDYHTVNVDVSISENFMLILETKKWVSTESTHSP

SEQ ID NO: 12396 - protein, 407 aa, Homo sapiens
MKEQPDLNFRNPDVQEEIKEILRFWLTKGVDGFSLDAVKFLLEAKHLRDEIQVNKTQIPDTVTQYSELYHDFTTTQVGMHDIVRSFRQTMDQYSTEPGRYRFMGTEAYAESIDRTVMYYGLPFIQEADFPFNNYLSMLDTVSGNSVYEVITSWMENMPEGKWPNWMIGGPDSSRLTSRLGNQYVNVMNMLLFTLPGTPITYYGEEIGMGNIVAANLNESYDINTLRSKSPMQWDNSSNAGFSEASNTWLPTNSDYHTVNVDVQKTQPRSALKLYQDLSLLHANELLLNRGWFCHLRNDSHYVVYTRELDGIDRIFIVVLNFGESTLLNLHNMISGLPAKMRIRLSTNSADKGSKVDTSGIFLDKGEGLIFEHNTKNLLHRQTAFRDRCFVSNRACYSSVLNILYTSC

SEQ ID NO: 12397 - protein, 143 aa, Homo sapiens
MSGMFLSSKLTTILLLFTNKSLDPGQKIQENTLLSVYGNSSWHFDEVRNQCYFHQFMKEQPDLNFRNPDVQEEIKEILRFWLTKGVDGFSLDAVKFLLEAKHLRDEIQVNKTQIPDTVTQYSELYHDFTTTQVGMHDIVRSFR

SEQ ID NO: 12398 - protein, 316 aa, Homo sapiens
MTLNLVNSYRFMGTEAYAESIDRTVMYYGLPFIQEADFPFNNYLSMLDTVSGNSVYEVITSWMENMPEGKWPNWMIGGPDSSRLTSRLGNQYVNVMNMLLFTLPGTPITYYGEEIGMGNIVAANLNESYDINTLRSKSPMQWDNSSNAGFSEASNTWLPTNSDYHTVNVDVQKTQPRSALKLYQDLSLLHANELLLNRGWFCHLRNDSHYVVYTRELDGIDRIFIVVLNFGESTLLNLHNMISGLPAKMRIRLSTNSADKGSKVDTSGIFLDKGEGLIFEHNTKNLLHRQTAFRDRCFVSNRACYSSVLNILYTSC

SEQ ID NO: 12399 - protein, 340 aa, Homo sapiens
MEPGRTQIKLDPRYTADLLEVLKTNYGIPSACFSQPPTAAQLLRALGPVELALTSILTLLALGSIAIFLEDAVYLYKNTLCPIKRRTLLWKSSAPTVVSVLCCFGLWIPRSLVLVEMTITSFYAVCFYLLMLVMVEGFGGKEAVLRTLRDTPMMVHTGPCCCCCPCCPRLLLTRKKLQLLMLGPFQYAFLKITLTLVGLFLVPDGIYDPADISEGSTALWINTFLGVSTLLALWTLGIISRQARLHLGEQNMGAKFALFQVLLILTALQPSIFSVLANGGQIACSPPYSSKTRSQVMNCHLLILETFLMTVLTRMYYRRKDHKVGYETFSSPDLDLNLKA

SEQ ID NO: 12400 - protein, 58 aa, Homo sapiens
MEPGRTQIKLDPRYTADLLEVLKTNYGIPSACFSQPPTAAQLLRDRVWLCGPGWSAVV

SEQ ID NO: 12401 - protein, 66 aa, Homo sapiens
MLLILMLSLSFNEQASHPAPGPHLPAPPALPHPGACGIAGENAAMEPGRTQIKLDPRYTADLLEVL

SEQ ID NO: 12402 - protein, 23 aa, Homo sapiens
QARLHLGEQNMGAKFALFQQQHG

SEQ ID NO: 12403 - protein, 212 aa, Homo sapiens
  SITE 1: note = misc_feature - Xaa can be any naturally occurring amino acid
XACFSQPPTAAQLLRALGPVELALTSILTLLALGSIAIFLEDAVYLYKNTLCPIKRRTLLWKSSAPTLATFKERCLECVGFASCVLAAKGFRSLRVSLPPSPAPAPSEQVVSVLCCFGLWIPRSLVLVEMTITSFYAVCFYLLMLVMVEGFGGKEAVLRTLRDTPMMVHTGPCCCCCPCCPRLLLTRKKLQLLMLGPFQYAFLKITLTLVGL

SEQ ID NO: 12404 - protein, 175 aa, Homo sapiens
MAAPTPARPVLTHLLVALFGMGSWAAVNGIWVELPVVVKELPEAAAFQGLLLLLPPPPSVPTGELGSGLQVGAPGAEEEVEESSPLQEPPSQAAGTTPGPDPKAYQLLSARSACLLGLLAATNALTNGVLPAVQSFSCLPYGRLAYHLAVVLGSAANPLACFLAMGVLCRSLAGL

SEQ ID NO: 12405 - protein, 111 aa, Homo sapiens
MAAPTPARPVLTHLLVALFGMGSWAAVNGIWVELPVVVKELPEGAVVGAVSWRVLLREGGSQLPAAWRGPAGIAGSRRGHPGGLSARRCCYVPPDQHLSRVPQQKGLCRPL

SEQ ID NO: 12406 - protein, 69 aa, Homo sapiens
MAAPTPARPVLTHLLVALFGMGSWAAVNGIWVELPVVVKELPEGWSLPSYVSVLVALGNLGLLVVTLWR

SEQ ID NO: 12407 - protein, 87 aa, Homo sapiens
MAAPTPARPVLTHLLVALFGMGSWAAVNGIWVELPVVVKELPEGWSLPSYVSVLVALGNLGLLVVTLWRRLAPGKDEQVPIRVVQGS

SEQ ID NO: 12408 - protein, 172 aa, Homo sapiens
MAAPTPARPVLTHLLVALFGMGSWAAVNGIWVELPVVVKELPEGWSLPSYVSVLVALGNLGLLVVTLWRRLAPGKDEQVPIRVVQVLGMVGTALLASLWHHVAPVAGQLHSVAFLALAFVLALACCASNVTFLPFLSHLPPRFLRSFFLGQGLSALLPCVLALVQGVGRLEC

SEQ ID NO: 12409 - protein, 445 aa, Homo sapiens
MAAPTPARPVLTHLLVALFGMGSWAAVNGIWVELPVVVKELPEGWSLPSYVSVLVALGNLGLLVVTLWRRLAPGKDEQVPIRVVQVLGMVGTALLASLWHHVAPVAGQLHSVAFLALAFVLALACCASNVTFLPFLSHLPPRFLRSFFLGQGLSALLPCVLALVQGVGRLECPPAPINGTPGPPLDFLERFPASTFFWALTALLVASAAAFQGLLLLLPPPPSVPTGELGSGLQVGAPGAEEEVEESSPLQEPPSQAAGTTPGPDPKAYQLLSARSACLLGLLAATNALTNGVLPAVQSFSCLPYGRLAYHLAVVLGSAANPLACFLAMGVLCRSLAGLGGLSLLGVFCGGYLMALAVLSPCPPLVGTSAGVVLVVLSWVLCLGVFSYVKVAASSLLHGGGRPALLAAGVAIQVGSLLGAVAMFPPTSIYHVFHSRKDCADPCDS

SEQ ID NO: 12410 - protein, 445 aa, Homo sapiens; identical to SEQ ID NO: 12409

SEQ ID NO: 12411 - protein, 445 aa, Homo sapiens; identical to SEQ ID NO: 12409

SEQ ID NO: 12412 - protein, 445 aa, Homo sapiens; identical to SEQ ID NO: 12409

SEQ ID NO: 12413 - protein, 445 aa, Homo sapiens; identical to SEQ ID NO: 12409

SEQ ID NO: 12414 - protein, 445 aa, Homo sapiens; identical to SEQ ID NO: 12409

SEQ ID NO: 12415 - protein, 27 aa, Homo sapiens
MSVGVSTSAPLSPTSGTSVGMSTFSIM

SEQ ID NO: 12416 - protein, 39 aa, Homo sapiens
MSVGVSTSAPLSPTSGTSVGMSTFSIMDYVVFVLLLVLS

SEQ ID NO: 12417 - protein, 59 aa, Homo sapiens
MSVGVSTSAPLSPTSGTSVGMSTFSIMDYVVFVLLLVLSLAIGLYHACRGWGRHTVGEL

SEQ ID NO: 12418 - protein, 78 aa, Homo sapiens
MSVGVSTSAPLSPTSGTSVGMSTFSIMDYVVFVLLLVLSLAIGLYHACRGWGRHTVGELLMADRKMGCLPVALSLLAT

SEQ ID NO: 12419 - protein, 115 aa, Homo sapiens
MSVGVSTSAPLSPTSGTSVGMSTFSIMDYVVFVLLLVLSLAIGLYHACRGWGRHTVGELLMADRKMGCLPVALSLLATFQSAVAILGVPSEIYRFGTQYWFLGCCYFLGLLIPAH

SEQ ID NO: 12420 - protein, 133 aa, Homo sapiens
MSVGVSTSAPLSPTSGTSVGMSTFSIMDYVVFVLLLVLSLAIGLYHACRGWGRHTVGELLMADRKMGCLPVALSLLATFQSAVAILGVPSEIYRFGTQYWFLGCCYFLGLLIPAHIFIPVFYRLHLTSAYEYL

SEQ ID NO: 12421 - protein, 147 aa, Homo sapiens
MSVGVSTSAPLSPTSGTSVGMSTFSIMDYVVFVLLLVLSLAIGLYHACRGWGRHTVGELLMADRKMGCLPVALSLLATFQSAVAILGVPSEIYRFGTQYWFLGCCYFLGLLIPAHIFIPVFYRLHLTSAYEYLELRFNKTVRVCGTV

SEQ ID NO: 12422 - protein, 153 aa, Homo sapiens
MSVGVSTSAPLSPTSGTSVGMSTFSIMDYVVFVLLLVLSLAIGLYHACRGWGRHTVGELLMADRKMGCLPVALSLLATFQSAVAILGVPSEIYRFGTQYWFLGCCYFLGLLIPAHIFIPVFYRLHLTSAYEYLELRFNKTVRVCGTVTFIFQM

SEQ ID NO: 12423 - protein, 193 aa, Homo sapiens
MSVGVSTSAPLSPTSGTSVGMSTFSIMDYVVFVLLLVLSLAIGLYHACRGWGRHTVGELLMADRKMGCLPVALSLLATFQSAVAILGVPSEIYRFGTQYWFLGCCYFLGLLIPAHIFIPVFYRLHLTSAYEYLELRFNKTVRVCGTVTFIFQMVIYMGVVLYAPSLALNAVTGFDLWLSVLALGIVCTVYTAL

SEQ ID NO: 12424 - protein, 635 aa, Homo sapiens
MSVGVSTSAPLSPTSGTSVGMSTFSIMDYVVFVLLLVLSLAIGLYHACRGWGRHTVGELLMADRKMGCLPVALSLLATFQSAVAILGVPSEIYRFGTQYWFLGCCYFLGLLIPAHIFIPVFYRLHLTSAYEYLELRFNKTVRVCGTVTFIFQMVIYMGVVLYAPSLALNAVTGFDLWLSVLALGIVCTVYTALGGLKAVIWTDVFQTLVMFLGQLAVIIVGSAKVGGLGRVWAVASQHGRISGFELDPDPFVRHTFWTLAFGGVFMMLSLYGVNQAQVQRYLSSRTEKAAVLSCYAVFPFQQVSLCVGCLIGLVMFAYYQEYPMSIQQAQAAPDQFVLYFVMDLLKGLPGLPGLFIACLFSGSLSTISSAFNSLATVTMEDLIRPWFPEFSEARAIMLSRGLAFGYGLLCLGMAYISSQMGPVLQAAISIFGMVGGPLLGLFCLGMFFPCANPPGAVVGLLAGLVMAFWIGIGSIVTSMGSSMPPSPSNGSSFSLPTNLTVATVTTLMPLTTFSKPTGLQRFYSLSYLWYSAHNSTTVIVVGLIVSLLTGRMRGRSLNPATIYPVLPKLLSLLPLSCQKRLHCRSYGQDHLDTGLFPEKPRNGVLGDSRDKEAMALDGTAYQGSSSTCILQETSL

SEQ ID NO: 12425 - protein, 635 aa, Homo sapiens; identical to SEQ ID NO: 12424

SEQ ID NO: 12426 - protein, 574 aa, Homo sapiens
MFPYFIMLIFCGIPLFFMELSFGQFASQGCLGVWRISPMFKGVGYGMMVVSTYIGIYYNVVICIAFYYFFSSMTHVLPWAYCNNPWNTHDCAGVLDASNLTNGSRPAALPSNLSHLLNHSLQRTSPSEEYWRLYVLKLSDDIGNFGEVRLPLLGCLGVSWLVVFLCLIRGVKSSGKVVYFTATFPYVVLTILFVRGVTLEGAFDGIMYYLTPQWDKILEAKVWGDAASQIFYSLGCAWGGLITMASYNKFHNNCYRDSVIISITNCATSVYAGFVIFSILGFMANHLGVDVSRVADHGPGLAFVAYPEALTLLPISPLWSLLFFFMLILLGLGTQFCLLETLVTAIVDEVGNEWILQKKTYVTLGVAVAGFLLGIPLTSQAGIYWLLLMDNYAASFSLVVISCIMCVAIMYIYGHRNYFQDIQMMLGFPPPLFFQICWRFVSPAIIFLQAQVHRRLPQNPLHFASLPERNVLLHQLPQRGGVPEHDPPTPPSPARTYGPQVRVREVPRARRQRSPNPAPLWAPPSPKPHPCSAAGPLGWDCPFRNCQSLALSSARLLADSDAGGPETRQWEPGP

SEQ ID NO: 12427 - protein, 522 aa, Homo sapiens
MMVVSTYIGIYYNVVICIAFYYFFSSMTHVLPWAYCNNPWNTHDCAGVLDASNLTNGSRPAALPSNLSHLLNHSLQRTSPSEEYWRLYVLKLSDDIGNFGEVRLPLLGCLGVSWLVVFLCLIRGVKSSGKVVYFTATFPYVVLTILFVRGVTLEGAFDGIMYYLTPQWDKILEAKVWGDAASQIFYSLGCAWGGLITMASYNKFHNNCYRDSVIISITNCATSVYAGFVIFSILGFMANHLGVDVSRVADHGPGLAFVAYPEALTLLPISPLWSLLFFFMLILLGLGTQFCLLETLVTAIVDEVGNEWILQKKTYVTLGVAVAGFLLGIPLTSQAGIYWLLLMDNYAASFSLVVISCIMCVAIMYIYGHRNYFQDIQMMLGFPPPLFFQICWRFVSPAIIFFILVFTVIQYQPITYNHYQYPGWAVAIGFLMALSSVLCIPLYAMFRLCRTDGDTLLQRLKNATKPSRDWGPALLEHRTGRYAPTIAPSPEDGFEVQPLHPDKAQIPIVGSNGSSRLQDSRI

SEQ ID NO: 12428 - protein, 134 aa, Homo sapiens
MSGGDTRAAIARPRMAAAHGPVAPSSPEQNGAVPSEATKRDQNLKRGNWGNQIEFVLTSVGYAVGLGNVWRFPYLCYRNGGGAFMFPYFIMLIFCGIPLFFMELSFGQFASQGCLGVWRISPMFKGVGYGMMVV

SEQ ID NO: 12429 - protein, 652 aa, Homo sapiens
MSGGDTRAAIARPRMAAAHGPVAPSSPEQNGAVPSEATKRDQNLKRGNWGNQIEFVLTSVGYAVGLGNVWRFPYLCYRNGGGAFMFPYFIMLIFCGIPLFFMELSFGQFASQGCLGVWRISPMFKGVGYGMMVVSTYIGIYYNVVICIAFYYFFSSMTHVLPWAYCNNPWNTHDCAGVLDASNLTNGSRPAALPSNLSHLLNHSLQRTSPSEEYWRLYVLKLSDDIGNFGEVRLPLLGCLGVSWLVVFLCLIRGVKSSGKVVYFTATFPYVVLTILFVRGVTLEGAFDGIMYYLTPQWDKILEAKVWGDAASQIFYSLGCAWGGLITMASYNKFHNNCYRDSVIISITNCATSVYAGFVIFSILGFMANHLGVDVSRVADHGPGLAFVAYPEALTLLPISPLWSLLFFFMLILLGLGTQFCLLETLVTAIVDEVGNEWILQKKTYVTLGVAVAGFLLGIPLTSQAGIYWLLLMDNYAASFSLVVISCIMCVAIMYIYGHRNYFQDIQMMLGFPPPLFFQICWRFVSPAIIFFILVFTVIQYQPITYNHYQYPGWAVAIGFLMALSSVLCIPLYAMFRLCRTDGDTLLQRLKNATKPSRDWGPALLEHRTGRYAPTIAPSPEDGFEVQPLHPDKAQIPIVGSNGSSRLQDSRI

SEQ ID NO: 12430 - protein, 706 aa, Homo sapiens
MSGGDTRAAIARPRMAAAHGPVAPSSPEQVTLLPVQRSFFLPPFSGATPSTSLAESVLKVWHGAYNSGLLPQLMAQHSLAMAQNGAVPSEATKRDQNLKRGNWGNQIEFVLTSVGYAVGLGNVWRFPYLCYRNGGGAFMFPYFIMLIFCGIPLFFMELSFGQFASQGCLGVWRISPMFKGVGYGMMVVSTYIGIYYNVVICIAFYYFFSSMTHVLPWAYCNNPWNTHDCAGVLDASNLTNGSRPAALPSNLSHLLNHSLQRTSPSEEYWRLYVLKLSDDIGNFGEVRLPLLGCLGVSWLVVFLCLIRGVKSSGKVVYFTATFPYVVLTILFVRGVTLEGAFDGIMYYLTPQWDKILEAKVWGDAASQIFYSLGCAWGGLITMASYNKFHNNCYRDSVIISITNCATSVYAGFVIFSILGFMANHLGVDVSRVADHGPGLAFVAYPEALTLLPISPLWSLLFFFMLILLGLGTQFCLLETLVTAIVDEVGNEWILQKKTYVTLGVAVAGFLLGIPLTSQAGIYWLLLMDNYAASFSLVVISCIMCVAIMYIYGHRNYFQDIQMMLGFPPPLFFQICWRFVSPAIIFFILVFTVIQYQPITYNHYQYPGWAVAIGFLMALSSVLCIPLYAMFRLCRTDGDTLLQRLKNATKPSRDWGPALLEHRTGRYAPTIAPSPEDGFEVQPLHPDKAQIPIVGSNGSSRLQDSRI

SEQ ID NO: 12431 - protein, 633 aa, Homo sapiens
MVGKGAKGMLNGAVPSEATKRDQNLKRGNWGNQIEFVLTSVGYAVGLGNVWRFPYLCYRNGGGAFMFPYFIMLIFCGIPLFFMELSFGQFASQGCLGVWRISPMFKGVGYGMMVVSTYIGIYYNVVICIAFYYFFSSMTHVLPWAYCNNPWNTHDCAGVLDASNLTNGSRPAALPSNLSHLLNHSLQRTSPSEEYWRLYVLKLSDDIGNFGEVRLPLLGCLGVSWLVVFLCLIRGVKSSGKVVYFTATFPYVVLTILFVRGVTLEGAFDGIMYYLTPQWDKILEAKVWGDAASQIFYSLGCAWGGLITMASYNKFHNNCYRDSVIISITNCATSVYAGFVIFSILGFMANHLGVDVSRVADHGPGLAFVAYPEALTLLPISPLWSLLFFFMLILLGLGTQFCLLETLVTAIVDEVGNEWILQKKTYVTLGVAVAGFLLGIPLTSQAGIYWLLLMDNYAASFSLVVISCIMCVAIMYIYGHRNYFQDIQMMLGFPPPLFFQICWRFVSPAIIFFILVFTVIQYQPITYNHYQYPGWAVAIGFLMALSSVLCIPLYAMFRLCRTDGDTLLQRLKNATKPSRDWGPALLEHRTGRYAPTIAPSPEDGFEVQPLHPDKAQIPIVGSNGSSRLQDSRI

SEQ ID NO: 12432 - protein, 579 aa, Homo sapiens
MVGKGAKGMLNGAVPSEATKRDQNLKRGNWGNQIEFVLTSVGYAVGLGNVWRFPYLCYRNGGGAFMFPYFIMLIFCGIPLFFMELSFGQFASQGCLGVWRISPMFKGVGYGMMVVSTYIGIYYNVVICIAFYYFFSSMTHVLPWAYCNNPWNTHDCAGVLDASNLTNGSRPAALPSNLSHLLNHSLQRTSPSEEYWRLYVLKLSDDIGNFGEVRLPLLGCLGVSWLVVFLCLIRGVKSSGKVVYFTATFPYVVLTILFVRGVTLEGAFDGIMYYLTPQWDKILEAKVWGDAASQIFYSLGCAWGGLITMASYNKFHNNCYRDSVIISITNCATSVYAGFVIFSILGFMANHLGVDVSRVADHGPGLAFVAYPEALTLLPISPLWSLLFFFMLILLGLGTQFCLLETLVTAIVDEVGNEWILQKKTYVTLGVAVAGFLLGIPLTSQAGIYWLLLMDNYAASFSLVVISCIMCVAIMYIYGEHSSLRPPATRPLARPLCPAGLLTPHLSRAPELLPGHPDDAGIPTTPLLSDLLALRLSRHHLPPGSGPPPPPPESSSLRVAPGAERAPPPAPTARGSAGA

SEQ ID NO: 12433 - protein, 116 aa, Homo sapiens
MVGKGAKGMLVTLLPVQRSFFLPPFSGATPSTSLAESVLKVWHGAYNSGLLPQLMAQHSLAMAQNGAVPSEATKRDQNLKRGNWGNQIEFVLTSVGYAVGLGNVWRFPYLCYRNGG

SEQ ID NO: 12434 - protein, 664 aa, Homo sapiens
MRRLSLSPTFSMGFHLLVTVSLLFSHVDHVIAETEMEGEGNETGECTGSYYCKKGVILPIWEPQDPSFGDKIARATVYFVAMVYMFLGVSIIADRFMSSIEVITSQEKEITIKKPNGETTKTTVRIWNETVSNLTLMALGSSAPEILLSVIEVCGHNFTAGDLGPSTIVGSAAFNMFIIIALCVYVVPDGETRKIKHLRVFFVTAAWSIFAYTWLYIILSVISPGVVEVWEGLLTFFFFPICVVFAWVADRRLLFYKYVYKRYRAGKQRGMIIEHEGDRPSSKTEIEMDGKVVNSHVENFLDGALVLEVDERDQDDEEARREMARILKELKQKHPDKEIEQLIELANYQVLSQQQKSRAFYRIQATRLMTGAGNILKRHAADQARKAVSMHEVNTEVTENDPVSKIFFEQGTYQCLENCGTVALTIIRRGGDLTNTVFVDFRTEDGTANAGSDYEFTEGTVVFKPGDTQKEIRVGIIDDDIFEEDENFLVHLSNVKVSSEASEDGILEANHVSTLACLGSPSTATVTIFDDDHAGIFTFEEPVTHVSESIGIMEVKVLRTSGARGNVIVPYKTIEGTARGGGEDFEDTCGELEFQNDEIVKTISVKVIDDEEYEKNKTFFLEIGEPRLVEMSEKKGRSLPLEYLTVRNMRKSAVSPLCLRNQNG

SEQ ID NO: 12435 - protein, 73 aa, Homo sapiens
MYNMRRLSLSPTFSMGFHLLVTVSLLFSHVDHVIAETEMEGEGNETGECTGSYYCKKGVILPIWEPQDPSFGD

SEQ ID NO: 12436 - protein, 87 aa, Homo sapiens
MYNMRRLSLSPTFSMGFHLLVTVSLLFSHVDHVIAETEMEGEGNETGECTGSYYCKKGVILPIWEPQDPSFGDKIARATVYFVAMVY

SEQ ID NO: 12437 - protein, 87 aa, Homo sapiens; identical to SEQ ID NO: 12436

SEQ ID NO: 12438 - protein, 973 aa, Homo sapiens
MYNMRRLSLSPTFSMGFHLLVTVSLLFSHVDHVIAETEMEGEGNETGECTGSYYCKKGVILPIWEPQDPSFGDKIARATVYFVAMVYMFLGVSIIADRFMSSIEVITSQEKEITIKKPNGETTKTTVRIWNETVSNLTLMALGSSAPEILLSVIEVCGHNFTAGDLGPSTIVGSAAFNMFIIIALCVYVVPDGETRKIKHLRVFFVTAAWSIFAYTWLYIILSVISPGVVEVWEGLLTFFFFPICVVFAWVADRRLLFYKYVYKRYRAGKQRGMIIEHEGDRPSSKTEIEMDGKVVNSHVENFLDGALVLEVDERDQDDEEARREMARILKELKQKHPDKEIEQLIELANYQVLSQQQKSRAFYRIQATRLMTGAGNILKRHAADQARKAVSMHEVNTEVTENDPVSKIFFEQGTYQCLENCGTVALTIIRRGGDLTNTVFVDFRTEDGTANAGSDYEFTEGTVVFKPGDTQKEIRVGIIDDDIFEEDENFLVHLSNVKVSSEASEDGILEANHVSTLACLGSPSTATVTIFDDDHAGIFTFEEPVTHVSESIGIMEVKVLRTSGARGNVIVPYKTIEGTARGGGEDFEDTCGELEFQNDEIVKTISVKVIDDEEYEKNKTFFLEIGEPRLVEMSEKKALLLNELGGFTITGKYLFGQPVFRKVHAREHPILSTVITIADEYDDKQPLTSKEEEERRIAEMGRPILGEHTKLEVIIEESYEFKSTVDKLIKKTNLALVVGTNSWREQFIEAITVSAGEDDDDDECGEEKLPSCFDYVMHFLTVFWKVLFAFVPPTEYWNGWACFIVSILMIGLLTAFIGDLASHFGCTIGLKDSVTAVVFVALGTSVPDTFASKVAATQDQYADASIGNVTGSNAVNVFLGIGVAWSIAAIYHAANGEQFKVSPGTLAFSVTLFTIFAFINVGVLLYRRRPEIGGELGGPRTAKLLTSCLFVLLWLLYIFFSSLEAYCHIKGF

SEQ ID NO: 12439 - protein, 968 aa, Homo sapiens
MYNMRRLSLSPTFSMGFHLLVTVSLLFSHVDHVIAETEMEGEGNETGECTGSYYCKKGVILPIWEPQDPSFGDKIARATVYFVAMVYMFLGVSIIADRFMSSIEVITSQEKEITIKKPNGETTKTTVRIWNETVSNLTLMALGSSAPEILLSVIEVCGHNFTAGDLGPSTIVGSAAFNMFIIIALCVYVVPDGETRKIKHLRVFFVTAAWSIFAYTWLYIILSVISPGVVEVWEGLLTFFFFPICVVFAWVADRRLLFYKYVYKRYRAGKQRGMIIEHEGDRPSSKTEIEMDGKVVNSHVENFLDGALVLEVDERDQDDEEARREMARILKELKQKHPDKEIEQLIELANYQVLSQQQKSRAFYRIQATRLMTGAGNILKRHAADQARKAVSMHEVNTEVTENDPVSKIFFEQGTYQCLENCGTVALTIIRRGGDLTNTVFVDFRTEDGTANAGSDYEFTEGTVVFKPGDTQKEIRVGIIDDDIFEEDENFLVHLSNVKVSSEASEDGILEANHVSTLACLGSPSTATVTIFDDDHAGIFTFEEPVTHVSESIGIMEVKVLRTSGARGNVIVPYKTIEGTARGGGEDFEDTCGELEFQNDEIVKTISVKVIDDEEYEKNKTFFLEIGEPRLVEMSEKKALLLNELGGFTITGQPVFRKVHAREHPILSTVITIADEYDDKQPLTSKEEEERRIAEMGRPILGEHTKLEVIIEESYEFKSTVDKLIKKTNLALVVGTNSWREQFIEAITVSAGEDDDDDECGEEKLPSCFDYVMHFLTVFWKVLFAFVPPTEYWNGWACFIVSILMIGLLTAFIGDLASHFGCTIGLKDSVTAVVFVALGTSVPDTFASKVAATQDQYADASIGNVTGSNAVNVFLGIGVAWSIAAIYHAANGEQFKVSPGTLAFSVTLFTIFAFINVGVLLYRRRPEIGGELGGPRTAKLLTSCLFVLLWLLYIFFSSLEAYCHIKGF

SEQ ID NO: 12440 - protein, 937 aa, Homo sapiens
MYNMRRLSLSPTFSMGFHLLVTVSLLFSHVDHVIAETEMEGEGNETGECTGSYYCKKGVILPIWEPQDPSFGDKIARATVYFVAMVYMFLGVSIIADRFMSSIEVITSQEKEITIKKPNGETTKTTVRIWNETVSNLTLMALGSSAPEILLSVIEVCGHNFTAGDLGPSTIVGSAAFNMFIIIALCVYVVPDGETRKIKHLRVFFVTAAWSIFAYTWLYIILSVISPGVVEVWEGLLTFFFFPICVVFAWVADRRLLFYKYVYKRYRAGKQRGMIIEHEGDRPSSKTEIEMDGKVVNSHVENFLDGALVLEVDERDQDDEEARREMARILKELKQKHPDKEIEQLIELANYQVLSQQQKSRAFYRIQATRLMTGAGNILKRHAADQARKAVSMHEVNTEVTENDPVSKIFFEQGTYQCLENCGTVALTIIRRGGDLTNTVFVDFRTEDGTANAGSDYEFTEGTVVFKPGDTQKEIRVGIIDDDIFEEDENFLVHLSNVKVSSEASEDGILEANHVSTLACLGSPSTATVTIFDDDHAGIFTFEEPVTHVSESIGIMEVKVLRTSGARGNVIVPYKTIEGTARGGGEDFEDTCGELEFQNDEIVKIITIRIFDREEYEKECSFSLVLEEPKWIRRGMKGGFTITDEYDDKQPLTSKEEEERRIAEMGRPILGEHTKLEVIIEESYEFKSTVDKLIKKTNLALVVGTNSWREQFIEAITVSAGEDDDDDECGEEKLPSCFDYVMHFLTVFWKVLFAFVPPTEYWNGWACFIVSILMIGLLTAFIGDLASHFGCTIGLKDSVTAVVFVALGTSVPDTFASKVAATQDQYADASIGNVTGSNAVNVFLGIGVAWSIAAIYHAANGEQFKVSPGTLAFSVTLFTIFAFINVGVLLYRRRPEIGGELGGPRTAKLLTSCLFVLLWLLYIFFSSLEAYCHIKGF

SEQ ID NO: 12441 - protein, 937 aa, Homo sapiens; identical to SEQ ID NO: 12440

SEQ ID NO: 12442 - protein, 965 aa, Homo sapiens
MYNMRRLSLSPTFSMGFHLLVTVSLLFSHVDHVIAETEMEGEGNETGECTGSYYCKKGVILPIWEPQDPSFGDKIARATVYFVAMVYMFLGVSIIADRFMSSIEVITSQEKEITIKKPNGETTKTTVRIWNETVSNLTLMALGSSAPEILLSVIEVCGHNFTAGDLGPSTIVGSAAFNMFIIIALCVYVVPDGETRKIKHLRVFFVTAAWSIFAYTWLYIILSVISPGVVEVWEGLLTFFFFPICVVFAWVADRRLLFYKYVYKRYRAGKQRGMIIEHEGDRPSSKTEIEMDGKVVNSHVENFLDGALVLEVDERDQDDEEARREMARILKELKQKHPDKEIEQLIELANYQVLSQQQKSRAFYRIQATRLMTGAGNILKRHAADQARKAVSMHEVNTEVTENDPVSKIFFEQGTYQCLENCGTVALTIIRRGGDLTNTVFVDFRTEDGTANAGSDYEFTEGTVVFKPGDTQKEIRVGIIDDDIFEEDENFLVHLSNVKVSSEASEDGILEANHVSTLACLGSPSTATVTIFDDDHAGIFTFEEPVTHVSESIGIMEVKVLRTSGARGNVIVPYKTIEGTARGGGEDFEDTCGELEFQNDEIVKIITIRIFDREEYEKECSFSLVLEEPKWIRRGMKGGFTITGKYLFGQPVFRKVHAREHPILSTVITIADEYDDKQPLTSKEEEERRIAEMGRPILGEHTKLEVIIEESYEFKSTVDKLIKKTNLALVVGTNSWREQFIEAITVSAGEDDDDDECGEEKLPSCFDYVMHFLTVFWKVLFAFVPPTEYWNGWACFIVSILMIGLLTAFIGDLASHFGCTIGLKDSVTAVVFVALGTSVPDTFASKVAATQDQYADASIGNVTGSNAVNVFLGIGVAWSIAAIYHAANGEQFKVSPGTLAFSVTLFTIFAFINVGVLLYRRRPEIGGELGGPRTAKLLTSCLFVLLWLLYIFFSSLEAYCHIKGF

SEQ ID NO: 12443 - protein, 973 aa, Homo sapiens; identical to SEQ ID NO: 12438

SEQ ID NO: 12444 - protein, 937 aa, Homo sapiens; identical to SEQ ID NO: 12440

SEQ ID NO: 12445 - protein, 937 aa, Homo sapiens; identical to SEQ ID NO: 12440

SEQ ID NO: 12446 - protein, 99 aa, Homo sapiens
MAFSACFGGIIFNILVGVGLGCLLQISRSHTEVKLEPDGLLVWVLAGALGLSLVFSLVSVPLQCFQLSRVYGFCLLLFYLNFLVVALLTEFGVIHLKSM

SEQ ID NO: 12447 - protein, 103 aa, Homo sapiens
MAGRRLNLRWALSVLCVLLMAETVSGTRGSSTGAHISPQFPASGVNQTPVVDCRKVCGLNVSDRCDFIRTNPDCHSDGGYLDYLEGIFCHFPPSLLPLAVTLY

SEQ ID NO: 12448 - protein, 131 aa, Homo sapiens
MAGRRLNLRWALSVLCVLLMAETVSGTRGSSTGAHISPQFPASGVNQTPVVDCRKVCGLNVSDRCDFIRTNPDCHSDGGYLDYLEGIFCHFPPSLLPLAVTLYVSWLLYLFLILGVTAAKFFCPNLSAIST

SEQ ID NO: 12449 - protein, 231 aa, Homo sapiens
MAGRRLNLRWALSVLCVLLMAETVSGTRGSSTGAHISPQFPASGVNQTPVVDCRKVCGLNVSDRCDFIRTNPDCHSDGGYLDYLEGIFCHFPPSLLPLAVTLYVSWLLYLFLILGVTAAKFFCPNLSAISTTLKLSHNVAGVTFLAFGNGAPDIFSALVAFSDPHTAGLALGALFGAGVLVTTVVAGGITILHPFMAASRPFFRDIVFYMVAVFLTFLMLFRGRVTLAWAL

SEQ ID NO: 12450 - protein, 584 aa, Homo sapiens
MAGRRLNLRWALSVLCVLLMAETVSGTRGSSTGAHISPQFPASGVNQTPVVDCRKVCGLNVSDRCDFIRTNPDCHSDGGYLDYLEGIFCHFPPSLLPLAVTLYVSWLLYLFLILGVTAAKFFCPNLSAISTTLKLSHNVAGVTFLAFGNGAPDIFSALVAFSDPHTAGLALGALFGAGVLVTTVVAGGITILHPFMAASRPFFRDIVFYMVAVFLTFLMLFRGRVTLAWALGYLGLYVFYVVTVILCTWIYQRQRRGSLFCPMPVTPEILSDSEEDRVSSNTNSYDYGDEYRPLFFYQETTAQILVRALNPLDYMKWRRKSAYWKALKVFKLPVEFLLLLTVPVVDPDKDDQNWKRPLNCLHLVISPLVVVLTLQSGTYGVYEIGGLVPVWVVVVIAGTALASVTFFATSDSQPPRLHWLFAFLGFLTSALWINAAATEVVNILRSLGVVFRLSNTVLGLTLLAWGNSIGDAFSDFTLARQGYPRMAFSACFGGIIFNILVGVGLGCLLQISRSHTEVKLEPDGLLVWVLAGALGLSLVFSLVSVPLQCFQLSRVYGFCLLLFYLNFLVVALLTEFGVIHLKSM

SEQ ID NO: 12451 - protein, 584 aa, Homo sapiens; identical to SEQ ID NO: 12450

SEQ ID NO: 12452 - protein, 528 aa, Homo sapiens
MAGRRLNLRWALSVLCVLLMAETVSGTRGSSTGAHISPQFPASGVNQTPVVDCRKVCGLNVSDRCDFIRTNPDCHSDGGYLDYLEGIFCHFPPSLLPLAVTLYVSWLLYLFLILGVTAAKFFCPNLSAISTTLKLSHNVAGVTFLAFGNGAPDIFSALVAFSDPHTAGLALGALFGYLGLYVFYVVTVILCTWIYQRQRRGSLFCPMPVTPEILSDSEEDRVSSNTNSYDYGDEYRPLFFYQETTAQILVRALNPLDYMKWRRKSAYWKALKVFKLPVEFLLLLTVPVVDPDKDDQNWKRPLNCLHLVISPLVVVLTLQSGTYGVYEIGGLVPVWVVVVIAGTALASVTFFATSDSQPPRLHWLFAFLGFLTSALWINAAATEVVNILRSLGVVFRLSNTVLGLTLLAWGNSIGDAFSDFTLARQGYPRMAFSACFGGIIFNILVGVGLGCLLQISRSHTEVKLEPDGLLVWVLAGALGLSLVFSLVSVPLQCFQLSRVYGFCLLLFYLNFLVVALLTEFGVIHLKSM

SEQ ID NO: 12453 - protein, 53 aa, Homo sapiens
MAGRRLNLRWALSVLCVLLMAETVSGTRGSSTGAHISPQFPASVPQGVWPECL

SEQ ID NO: 12454 - protein, 53 aa, Homo sapiens; identical to SEQ ID NO: 12453

SEQ ID NO: 12455 - protein, 143 aa, Homo sapiens
MTVGENEGVDDQGGWGKRLTTAGPSCSCADAFSDFTLARQGYPRMAFSACFGGIIFNILVGVGLGCLLQISRSHTEVKLEPDGLLVWVLAGALGLSLVFSLVSVPLQCFQLSRVYGFCLLLFYLNFLVVALLTEFGVIHLKSM

SEQ ID NO: 12456 - protein, 404 aa, Homo sapiens
  SITE 1: note = misc_feature - Xaa can be any naturally occurring amino acid
XTLKLSHNVAGVTFLAFGNGAPDIFSALVAFSDPHTAGLALGALFGAGVLVTTVVAGGITILHPFMAASRPFFRDIVFYMVAVFLTFLMLFRGRVTLAWALGYLGLYVFYVVTVILCTWIYQRQRRGSLFCPMPVTPEILSDSEEDRVSSNTNSYDYGDEYRPLFFYQETTAQILVRALNPLDYMKWRRKSAYWKALKVFKLPVEFLLLLTVPVVDPDKDDQNWKRPLNCLHLVISPLVVVLTLQSGTYGVYEIGGLVPVWVVVVIAGTALASVTFFATSDSQPPRLHWLFAFLGFLTSALWINAAATEVVNILRSLGVVFRLSNTVLGLTLLAWGNSIGDAFSDFTLARQGYPRMAFSACFGGIIFNILVGVGLGCLLQISRSHTEVKTRRMQVAGKTKRHGA

SEQ ID NO: 12457 - protein, 701 aa, Homo sapiens
MARRGWRRAPLRRGVGSSPRARRLMRPLWLLLAVGVFDWAGASDGGGGEARAMDEEIVSEKQAEESHRQDSANLLIFILLLTLTILTIWLFKHRRARFLHETGLAMIYGLLVGLVLRYGIHVPSDVNNVTLSCEVQSSPTTLLVNVSGKFYEYMLKGEISSHELNNVQDNEMLRKVTFDPEVFFNILLPPIIFYAGYSLKRRHFFRNLGSILAYAFLGTAISCFVIGSIMYGCVTLMKVTGQLAGDFYFTDCLLFGAIVSATDPVTVLAIFHELQVDVELYALLFGESVLNDAVAIVLSSSIVAYQPAGDNSHTFDVTAMFKSIGIFLGIFSGSFAMGAATGVVTALVTKFTKLREFQLLETGLFFLMSWSTFLLAEAWGFTGVVAVLFCGITQAHYTYNNLSTESQHRTKQLFELLNFLAENFIFSYMGLTLFTFQNHVFNPTFVVGAFVAIFLGRAANIYPLSLLLNLGRRSKIGSNFQHMMMFAGLRGAMAFALAIRDTATYARQMMFSTTLLIVFFTVWVFGGGTTAMLSCLHIRVGVDSDQEHLGVPENERRTTKAESAWLFRMWYNFDHNYLKPLLTHSGPPLTTTLPACCGPIARCLTSPQAYENQEQLKDDDSDLILNDGDISLTYGDSTVNTEPATSSAPRRFMGNSSEDALDRELAFGDHELVIRGTRLVLPMDDSEPPLNLLDNTRHGPA

SEQ ID NO: 12458 - protein, 669 aa, Homo sapiens
MARRGWRRAPLRRGVGSSPRARRLMRPLWLLLAVGVFDWAGASDGGGGEARAMDEEIVSEKQAEESHRQDSANLLIFILLLTLTILTIWLFKHRRARFLHETGLAMIYGLLVGLVLRYGIHVPSDVNNVTLSCEVQSSPTTLLVTFDPEVFFNILLPPIIFYAGYSLKRRHFFRNLGSILAYAFLGTAISCFVIGSIMYGCVTLMKVTGQLAGDFYFTDCLLFGAIVSATDPVTVLAIFHELQVDVELYALLFGESVLNDAVAIVLSSSIVAYQPAGDNSHTFDVTAMFKSIGIFLGIFSGSFAMGAATGVVTALVTKFTKLREFQLLETGLFFLMSWSTFLLAEAWGFTGVVAVLFCGITQAHYTYNNLSTESQHRTKQLFELLNFLAENFIFSYMGLTLFTFQNHVFNPTFVVGAFVAIFLGRAANIYPLSLLLNLGRRSKIGSNFQHMMMFAGLRGAMAFALAIRDTATYARQMMFSTTLLIVFFTVWVFGGGTTAMLSCLHIRVGVDSDQEHLGVPENERRTTKAESAWLFRMWYNFDHNYLKPLLTHSGPPLTTTLPACCGPIARCLTSPQAYENQEQLKDDDSDLILNDGDISLTYGDSTVNTEPATSSAPRRFMGNSSEDALDRELAFGDHELVIRGTRLVLPMDDSEPPLNLLDNTRHGPA

SEQ ID NO: 12459 - protein, 184 aa, Homo sapiens
MDEEIVSEKQAEESHRQDSANLLIFILLLTLTILTIWLFKHRRARFLHETGLAMIYGLLVGLVLRYGIHVPSDVNNVTLSCEVQSSPTTLLVNVSGKFYEYMLKGEISSHELNNVQDNEMLRKVTFDPEVFFNILLPPIIFYAGYSLKRRHFFRNLGSILAYAFLGTAISCFVIGSIMYGCVTL

SEQ ID NO: 12460 - protein, 649 aa, Homo sapiens
MDEEIVSEKQAEESHRQDSANLLIFILLLTLTILTIWLFKHRRARFLHETGLAMIYGLLVGLVLRYGIHVPSDVNNVTLSCEVQSSPTTLLVNVSGKFYEYMLKGEISSHELNNVQDNEMLRKVTFDPEVFFNILLPPIIFYAGYSLKRRHFFRNLGSILAYAFLGTAISCFVIGSIMYGCVTLMKVTGQLAGDFYFTDCLLFGAIVSATDPVTVLAIFHELQVDVELYALLFGESVLNDAVAIVLSSSIVAYQPAGDNSHTFDVTAMFKSIGIFLGIFSGSFAMGAATGVVTALVTKFTKLREFQLLETGLFFLMSWSTFLLAEAWGFTGVVAVLFCGITQAHYTYNNLSTESQHRTKQLFELLNFLAENFIFSYMGLTLFTFQNHVFNPTFVVGAFVAIFLGRAANIYPLSLLLNLGRRSKIGSNFQHMMMFAGLRGAMAFALAIRDTATYARQMMFSTTLLIVFFTVWVFGGGTTAMLSCLHIRVGVDSDQEHLGVPENERRTTKAESAWLFRMWYNFDHNYLKPLLTHSGPPLTTTLPACCGPIARCLTSPQAYENQEQLKDDDSDLILNDGDISLTYGDSTVNTEPATSSAPRRFMGNSSEDALDRELAFGDHELVIRGTRLVLPMDDSEPPLNLLDNTRHGPA

SEQ ID NO: 12461 - protein, 649 aa, Homo sapiens; identical to SEQ ID NO: 12460

SEQ ID NO: 12462 - protein, 649 aa, Homo sapiens; identical to SEQ ID NO: 12460

SEQ ID NO: 12463 - protein, 679 aa, Homo sapiens
MDEEIVSEKQAEESHRQDSANLLIFILLLTLTILTIWLFKHRRARFLHETGLAMIYGLLVGLVLRYGIHVPSDVNNVTLSCEVQSSPTTLLVNVSGKFYEYMLKGEISSHELNNVQDNEMLRKVTFDPEVFFNILLPPIIFYAGYSLKRRHFFRNLGSILAYAFLGTAISCFVIGSIMYGCVTLMKVTGQLAGDFYFTDCLLFGAIVSATDPVTVLAIFHELQVDVELYALLFGESVLNDAVAIVLSSSIVAYQPAGDNSHTFDVTAMFKSIGIFLGIFSGSFAMGAATGVVTALVTKFTKLREFQLLETGLFFLMSWSTFLLAEAWGFTGVVAVLFCGITQAHYTYNNLSTESQHRTKQLFELLNFLAENFIFSYMGLTLFTFQNHVFNPTFVVGAFVAIFLGRAANIYPLSLLLNLGRRSKIGSNFQHMMMFAGLRGAMAFALAIRDTATYARQMMFSTTLLIVFFTVWVFGGGTTAMLSCLHIRYCARLWGYRDELRHGLYPQGTHSLFGETDRVGVDSDQEHLGVPENERRTTKAESAWLFRMWYNFDHNYLKPLLTHSGPPLTTTLPACCGPIARCLTSPQAYENQEQLKDDDSDLILNDGDISLTYGDSTVNTEPATSSAPRRFMGNSSEDALDRELAFGDHELVIRGTRLVLPMDDSEPPLNLLDNTRHGPA

SEQ ID NO: 12464 - protein, 649 aa, Homo sapiens; identical to SEQ ID NO: 12460

SEQ ID NO: 12465 - protein, 649 aa, Homo sapiens; identical to SEQ ID NO: 12460

SEQ ID NO: 12466 - protein, 617 aa, Homo sapiens
MDEEIVSEKQAEESHRQDSANLLIFILLLTLTILTIWLFKHRRARFLHETGLAMIYGLLVGLVLRYGIHVPSDVNNVTLSCEVQSSPTTLLVTFDPEVFFNILLPPIIFYAGYSLKRRHFFRNLGSILAYAFLGTAISCFVIGSIMYGCVTLMKVTGQLAGDFYFTDCLLFGAIVSATDPVTVLAIFHELQVDVELYALLFGESVLNDAVAIVLSSSIVAYQPAGDNSHTFDVTAMFKSIGIFLGIFSGSFAMGAATGVVTALVTKFTKLREFQLLETGLFFLMSWSTFLLAEAWGFTGVVAVLFCGITQAHYTYNNLSTESQHRTKQLFELLNFLAENFIFSYMGLTLFTFQNHVFNPTFVVGAFVAIFLGRAANIYPLSLLLNLGRRSKIGSNFQHMMMFAGLRGAMAFALAIRDTATYARQMMFSTTLLIVFFTVWVFGGGTTAMLSCLHIRVGVDSDQEHLGVPENERRTTKAESAWLFRMWYNFDHNYLKPLLTHSGPPLTTTLPACCGPIARCLTSPQAYENQEQLKDDDSDLILNDGDISLTYGDSTVNTEPATSSAPRRFMGNSSEDALDRELAFGDHELVIRGTRLVLPMDDSEPPLNLLDNTRHGPA

SEQ ID NO: 12467 - protein, 170 aa, Homo sapiens
MLSCLHIRVGVDSDQEHLGVPENERRTTKAESAWLFRMWYNFDHNYLKPLLTHSGPPLTTTLPACCGPIARCLTSPQAYENQEQLKDDDSDLILNDGDISLTYGDSTVNTEPATSSAPRRFMGNSSEDALDRELAFGDHELVIRGTRLVLPMDDSEPPLNLLDNTRHGPA

SEQ ID NO: 12468 - protein, 33 aa, Homo sapiens
  SITE 1: note = misc_feature - Xaa can be any naturally occurring amino acid
XAMLSCLHIRVGVDSDQEHLKGPQLFLNHRSYL

SEQ ID NO: 12469 - protein, 32 aa, Homo sapiens
MENGTQILRPTQDPSECTKEVKSLMWVYVLVG

SEQ ID NO: 12470 - protein, 538 aa, Homo sapiens
MENGTQILRPTQDPSECTKEVKSLMWVYVLVGNIVRGMGETPILPLGISYIEDFAKFENSPLYIGLVETGAIIGPLIGLLLASFCANVYVDTGFVNTDDLIITPTDTRWVGAWWFGFLICAGVNVLTAIPFFFLPNTLPKEGLETNADIIKNENEDKQKEEVKKEKYGITKDFLPFMKSLSCNPIYMLFILVSVIQFNAFVNMISFMPKYLEQQYGISSSDAIFLMGIYNLPPICIGYIIGGLIMKKFKITVKQAAHIGCWLSLLEYLLYFLSFLMTCENSSVVGINTSYEGIPQDLYVENDIFADCNVDCNCPSKIWDPVCGNNGLSYLSACLAGCETSIGTGINMVFQNCSCIQTSGNSSAVLGLCDKGPDCSLMLQYFLILSAMSSFIYSLAAIPGYMVLLRCMKSEEKSLGVGLHTFCTRVFAGIPAPIYFGALMDSTCLHWGTLKCGESGACRIYDSTTFRYIYLGLPAALRGSSFVPALIILILLRKCHLPGENASSGTELIETKVKGKENECKDIYQKSTVLKDDELKTKL

SEQ ID NO: 12471 - protein, 93 aa, Homo sapiens
MFLTKNCKQEQERVESAKMFLLAITCAFVSKTLSGSYMNSMLTQIERQFNIPTSLVGFINGSFEIDMNMNLQFQFQATCPQTVSCVWKMEPRF

SEQ ID NO: 12472 - protein, 71 aa, Homo sapiens
MFLTKNCKQEQERVESAKMFLLAITCAFVSKTLSGSYMNSMLTQIERQFNIPTSLVGFINGSFEIGNLLLI

SEQ ID NO: 12473 - protein, 13 aa, Homo sapiens
MGETEKRIETHRI

SEQ ID NO: 12474 - protein, 51 aa, Homo sapiens
MGETEKRIETHRIRCLSKLKMFLLAITCAFVSKTLSGSYMNSMLTQIERQF

SEQ ID NO: 12475 - protein, 95 aa, Homo sapiens
MGETEKRIETHRIRCLSKLKMFLLAITCAFVSKTLSGSYMNSMLTQIERQFNIPTSLVGFINGSFEIDMNMNLQFQFQATCPQTVSCVWKMEPRF

SEQ ID NO: 12476 - protein, 88 aa, Homo sapiens
MGETEKRIETHRIRCLSKLKMFLLAITCAFVSKTLSGSYMNSMLTQIERQFNIPTSLVGFINGSFEIGNLLLIIFVSYFGTKLHRPIM

SEQ ID NO: 12477 - protein, 91 aa, Homo sapiens
MGETEKRIETHRIRCLSKLKMFLLAITCAFVSKTLSGSYMNSMLTQIERQFNIPTSLVGFINGSFEIGNLLLIIFVSYFGTKLHRPIMIGI

SEQ ID NO: 12478 - protein, 99 aa, Homo sapiens
MGETEKRIETHRIRCLSKLKMFLLAITCAFVSKTLSGSYMNSMLTQIERQFNIPTSLVGFINGSFEIGNLLLIIFVSYFGTKLHRPIMIGIGCVVMGLG

SEQ ID NO: 12479 - protein, 137 aa, Homo sapiens
MGETEKRIETHRIRCLSKLKMFLLAITCAFVSKTLSGSYMNSMLTQIERQFNIPTSLVGFINGSFEIGNLLLIIFVSYFGTKLHRPIMIGIGCVVMGLGCFLKSLPHFLMNQYEYESTVSVSGNLSSNSFLCMENGT

SEQ ID NO: 12480 - protein, 147 aa, Homo sapiens
MGETEKRIETHRIRCLSKLKMFLLAITCAFVSKTLSGSYMNSMLTQIERQFNIPTSLVGFINGSFEIGNLLLIIFVSYFGTKLHRPIMIGIGCVVMGLGCFLKSLPHFLMNQYEYESTVSVSGNLSSNSFLCMENGTQILRPTQDPS

SEQ ID NO: 12481 - protein, 670 aa, Homo sapiens
MGETEKRIETHRIRCLSKLKMFLLAITCAFVSKTLSGSYMNSMLTQIERQFNIPTSLVGFINGSFEIGNLLLIIFVSYFGTKLHRPIMIGIGCVVMGLGCFLKSLPHFLMNQYEYESTVSVSGNLSSNSFLCMENGTQILRPTQDPSECTKEVKSLMWVYVLVGNIVRGMGETPILPLGISYIEDFAKFENSPLYIGLVETGAIIGPLIGLLLASFCANVYVDTGFVNTDDLIITPTDTRWVGAWWFGFLICAGVNVLTAIPFFFLPNTLPKEGLETNADIIKNENEDKQKEEVKKEKYGITKDFLPFMKSLSCNPIYMLFILVSVIQFNAFVNMISFMPKYLEQQYGISSSDAIFLMGIYNLPPICIGYIIGGLIMKKFKITVKQAAHIGCWLSLLEYLLYFLSFLMTCENSSVVGINTSYEGIPQDLYVENDIFADCNVDCNCPSKIWDPVCGNNGLSYLSACLAGCETSIGTGINMVFQNCSCIQTSGNSSAVLGLCDKGPDCSLMLQYFLILSAMSSFIYSLAAIPGYMVLLRCMKSEEKSLGVGLHTFCTRVFAGIPAPIYFGALMDSTCLHWGTLKCGESGACRIYDSTTFRYIYLGLPAALRGSSFVPALIILILLRKCHLPGENASSGTELIETKVKGKENECKDIYQKSTVLKDDELKTKL

SEQ ID NO: 12482 - protein, 782 aa, Homo sapiens [sequence omitted]

SEQ ID NO: 12483 - protein, 1534 aa, Homo sapiens
MALTPGWGSSAGPVRPELWLLLWAAAWRLGASACPALCTCTGTTVDCHGTGLQAIPKNIPRNTERLELNGNNITRIHKNDFAGLKQLRVLQLMENQIGAVERGAFDDMKELERLRLNRNQLHMLPELLFQNNQALSRLDLSENAIQAIPRKAFRGATDLKNLQLDKNQISCIEEGAFRALRGLEVLTLNNNNITTIPVSSFNHMPKLRTFRLHSNHLFCDCHLAWLSQWLRQRPTIGLFTQCSGPASLRGLNVAEVQKSEFSCSGQGEAGRVPTCTLSSGSCPAMCTCSNGIVDCRGKGLTAIPANLPETMTEIRLELNGIKSIPPGAFSPYRKLRRIDLSNNQIAEIAPDAFQGLRSLNSLVLYGNKITDLPRGVFGGLYTLQLLLLNANKINCIRPDAFQDLQNLSLLSLYDNKIQSLAKGTFTSLRAIQTLHLAQNPFICDCNLKWLADFLRTNPIETSGARCASPRRLANKRIGQIKSKKFRCSAKEQYFIPGTEDYQLNSECNSDVVCPHKCRCEANVVECSSLKLTKIPERIPQSTAELRLNNNEISILEATGMFKKLTHLKKINLSNNKVSEIEDGAFEGAASVSELHLTANQLESIRSGMFRGLDGLRTLMLRNNRISCIHNDSFTGLRNVRLLSLYDNQITTVSPGAFDTLQSLSTLNLLANPFNCNCQLAWLGGWLRKRKIVTGNPRCQNPDFLRQIPLQDVAFPDFRCEEGQEEGGCLPRPQCPQECACLDTVVRCSNKHLRALPKGIPKNVTELYLDGNQFTLVPGQLSTFKYLQLVDLSNNKISSLSNSSFTNMSQLTTLILSYNALQCIPPLAFQGLRSLRLLSLHGNDISTLQEGIFADVTSLSHLAIGANPLYCDCHLRWLSSWVKTGYKEPGIARCAGPQDMEGKLLLTTPAKKFECQGPPTLAVQAKCDLCLSSPCQNQGTCHNDPLEVYRCACPSGYKGRDCEVSLDSCSSGPCENGGTCHAQEGEDAPFTCSCPTGFEGPTCGVNTDDCVDHACANGGVCVDGVGNYTCQCPLQYEGKACEQLVDLCSPDLNPCQHEAQCVGTPDGPRCECMPGYAGDNCSENQDDCRDHRCQNGAQCMDEVNSYSCLCAEGYSGQLCEIPPHLPAPKSPCEGTECQNGANCVDQGNRPVCQCLPGFGGPECEKLLSVNFVDRDTYLQFTDLQNWPRANITLQVSTAEDNGILLYNGDNDHIAVELYQGHVRVSYDPGSYPSSAIYSAETINDGQFHTVELVAFDQMVNLSIDGGSPMTMDNFGKHYTLNSEAPLYVGGMPVDVNSAAFRLWQILNGTGFHGCIRNLYINNELQDFTKTQMKPGVVPGCEPCRKLYCLHGICQPNATPGPMCHCEAGWVGLHCDQPADGPCHGHKCVHGQCVPLDALSYSCQCQDGYSGALCNQAGALAEPCRGLQCLHGHCQASGTKGAHCVCDPGFSGELCEQESECRGDPVRDFHQVQRGYAICQTTRPLSWVECRGSCPGQGCCQGLRLKRRKFTFECSDGTSFAEEVEKPTKCGCALCA

SEQ ID NO: 12484 - protein, 1461 aa, Homo sapiens
MALTPGWGSSAGPVRPELWLLLWAAAWRLGASACPALCTCTGTTVDCHGTGLQAIPKNIPRNTERLELNGNNITRIHKNDFAGLKQLRVLQLMENQIGAVERGAFDDMKELERLRLNRNQLHMLPELLFQNNQALSRLDLSENAIQAIPRKAFRGATDLKNLQLDKNQISCIEEGAFRALRGLEVLTLNNNNITTIPVSSFNHMPKLRTFRLHSNHLFCDCHLAWLSQWLRQRPTIGLFTQCSGPASLRGLNVAEVQKSEFSCSGQGEAGRVPTCTLSSGSCPAMCTCSNGIVDCRGKGLTAIPANLPETMTEIRLELNGIKSIPPGAFSPYRKLRRIDLSNNQIAEIAPDAFQGLRSLNSLVLYGNKITDLPRGVFGGLYTLQLLLLNANKINCIRPDAFQDLQNLSLLSLYDNKIQSLAKGTFTSLRAIQTLHLAQNPFICDCNLKWLADFLRTNPIETSGARCASPRRLANKRIGQIKSKKFRCSAKEQYFIPGTEDYQLNSECNSDVVCPHKCRCEANVVECSSLKLTKIPERIPQSTAELRLNNNEISILEATGMFKKLTHLKKINLSNNKVSEIEDGAFEGAASVSELHLTANQLESIRSGMFRGLDGLRTLMLRNNRISCIHNDSFTGLRNVRLLSLYDNQITTVSPGAFDTLQSLSTLNLLANPFNCNCQLAWLGGWLRKRKIVTGNPRCQNPDFLRQIPLQDVAFPDFRCEEGQEEGGCLPRPQCPQECACLDTVVRCSNKHLRALPKGIPKNVTELYLDGNQFTLVPGQLSTFKYLQLVDLSNNKISSLSNSSFTNMSQLTTLILSYNALQCIPPLAFQGLRSLRLLSLHGNDISTLQEGIFADVTSLSHLAIGANPLYCDCHLRWLSSWVKTGYKEPGIARCAGPQDMEGKLLLTTPAKKFECQGPPTLAVQAKCDLCLSSPCQNQGTCHNDPLEVYRCACPSGYKGRDCEVSLDSCSSGPCENGGTCHAQEGEDAPFTCSCPTGFEGPTCGVNTDDCVDHACANGGVCVDGVGNYTCQCPLQYEGKACEQLVDLCSPDLNPCQHEAQCVGTPDGPRCECMPGYAGDNCSENQDDCRDHRCQNGAQCMDEVNSYSCLCAEGYSGQLCEIPPHLPAPKSPCEGTECQNGANCVDQGNRPVCQCLPGFGGPECEKLLSVNFVDRDTYLQFTDLQNWPRANITLQVSTAEDNGILLYNGDNDHIAVELYQGHVRVSYDPGSYPSSAIYSAETINDGQFHTVELVAFDQMVNLSIDGGSPMTMDNFGKHYTLNSEAPLYVGGMPVDVNSAAFRLWQILNGTGFHGCIRNLYINNELQDFTKTQMKPGVVPGCEPCRKLYCLHGICQPNATPGPMCHCEAGWVGLHCDQPADGPCHGHKCVHGQCVPLDALSYSCQCQDGYSGALCNQSPSAGGTLSGTFTRSRGAMPSARPRAPCHGWSAGARAQARAAARAFG

SEQ ID NO: 12485 - protein, 409 aa, Homo sapiens
MALTPGWGSSAGPVRPELWLLLWAAAWRLGASACPALCTCTGTTVDCHGTGLQAIPKNIPRNTERLELNGNNITRIHKNDFAGLKQLRVLQLMENQIGAVERGAFDDMKELERLRLNRNQLHMLPELLFQNNQALSRLDLSENAIQAIPRKAFRGATDLKNLQLDKNQISCIEEGAFRALRGLEVLTLNNNNITTIPVSSFNHMPKLRTFRLHSNHLFCDCHLAWLSQWLRQRPTIGLFTQCSGPASLRGLNVAEVQKSEFSCSGQGEAGRVPTCTLSSGSCPAMCTCSNGIVDCRGKGLTAIPANLPETMTEIRLELNGIKSIPPGAFSPYRKLRRIDLSNNQIAEIAPDAFQGLRSLNSLHTGPVTCPHTTGTHSSHCRAFAVAVPHSRNDLEAMFEEEVPRIFYSA

SEQ ID NO: 12486 - protein, 146 aa, Homo sapiens
MEAVLFVNAEAAAPRQSGRPRDLNGNNITRITKTDFAGLRHLRVLQLMENKISTIERGAFQDLKELERLRLNRNHLQLFPELLFLGTAKLYRLDLSENQIQAIPRKAFRGAVDIKNLQLDYNQISCIEDGAFRALRDLEVLTLNNN

SEQ ID NO: 12487 - protein, 1439 aa, Homo sapiens
MENKISTIERGAFQDLKELERLRLNRNHLQLFPELLFLGTAKLYRLDLSENQIQAIPRKAFRGAVDIKNLQLDYNQISCIEDGAFRALRDLEVLTLNNNNITRLSVASFNHMPKLRTFRLHSNNLYCDCHLAWLSDWLRQRPRVGLYTQCMGPSHLRGHNVAEVQKREFVCSARHGGHQSFMAPSCSVLHCPAACTCSNNIVDCRGKGLTEIPTNLPETITEIRLEQNTIKVIPPGAFSPYKKLRRIDLSNNQISELAPDAFQGLRSLNSLVLYGNKITELPKSLFEGLFSLQLLLLNANKINCLRVDAFQDLHNLNLLSLYDNKLQTIAKGTFSPLRAIQTMHLAQNPFICDCHLKWLADYLHTNPIETSGARCTSPRRLANKRIGQIKSKKFRCSGTEDYRSKLSGDCFADLACPEKCRCEGTTVDCSNQKLNKIPEHIPQYTAELRLNNNEFTVLEATGIFKKLPQLRKINFSNNKITDIEEGAFEGASGVNEILLTSNRLENVQHKMFKGLESLKTLMLRSNRITCVGNDSFIGLSSVRLLSLYDNQITTVAPGAFDTLHSLSTLNLLANPFNCNCYLAWLGEWLRKKRIVTGNPRCQKPYFLKEIPIQDVAIQDFTCDDGNDDNSCSPLSRCPTECTCLDTVVRCSNKGLKVLPKGIPRDVTELYLDGNQFTLVPKELSNYKHLTLIDLSNNRISTLSNQSFSNMTQLLTLILSYNRLRCIPPRTFDGLKSLRLLSLHGNDISVVPEGAFNDLSALSHLAIGANPLYCDCNMQWLSDWVKSEYKEPGIARCAGPGEMADKLLLTTPSKKFTCQGPVDVNILAKCNPCLSNPCKNDGTCNSDPVDFYRCTCPYGFKGQDCDVPIHACISNPCKHGGTCHLKEGEEDGFWCICADGFEGENCEVNVDDCEDNDCENNSTCVDGINNYTCLCPPEYTGELCEEKLDFCAQDLNPCQHDSKCILTPKGFKCDCTPGYVGEHCDIDFDDCQDNKCKNGAHCTDAVNGYTCICPEGYSGLFCEFSPPMVLPRTSPCDNFDCQNGAQCIVRINEPICQCLPGYQGEKCEKLVSVNFINKESYLQIPSAKVRPQTNITLQIATDEDSGILLYKGDKDHIAVELYRGRVRASYDTGSHPASAIYSVETINDGNFHIVELLALDQSLSLSVDGGNPKIITNLSKQSTLNFDSPLYVGGMPGKSNVASLRQAPGQNGTSFHGCIRNLYINSELQDFQKVPMQTGILPGCEPCHKKVCAHGTCQPSSQAGFTCECQEGWMGPLCDQRTNDPCLGNKCVHGTCLPINAFSYSCKCLEGHGGVLCDEEEDLFNPCQAIKCKHGKCRLSGLGQPYCECSSGYTGDSCDREISCRGERIRDYYQKQQGYAACQTTKKVSRLECRGGCAGGQCCGPLRSKRRKYSFECTDGSSFVDEVEKVVKCGCTRCVS

SEQ ID NO: 12488 - protein, 1542 aa, Homo sapiens
MRGVGWQMLSLSLGLVLAILNKVAPQACPAQCSCSGSTVDCHGLALRSVPRNIPRNTERLDLNGNNITRITKTDFAGLRHLRVLQLMENKISTIERGAFQDLKELERLRLNRNHLQLFPELLFLGTAKLYRLDLSENQIQAIPRKAFRGAVDIKNLQLDYNQISCIEDGAFRALRDLEVLTLNNNNITRLSVASFNHMPKLRTFRLHSNNLYCDCHLAWLSDWLRQRPRVGLYTQCMGPSHLRGHNVAEVQKREFVCSDEEEGHQSFMAPSCSVLHCPAACTCSNNIVDCRGKGLTEIPTNLPETITEIRLEQNTIKVIPPGAFSPYKKLRRIDLSNNQISELAPDAFQGLRSLNSLVLYGNKITELPKSLFEGLFSLQLLLLNANKINCLRVDAFQDLHNLNLLSLYDNKLQTIAKGTFSPLRAIQTMHLAQNPFICDCHLKWLADYLHTNPIETSGARCTSPRRLANKRIGQIKSKKFRCSAKEQYFIPGTEDYRSKLSGDCFADLACPEKCRCEGTTVDCSNQKLNKIPEHIPQYTAELRLNNNEFTVLEATGIFKKLPQLRKINFSNNKITDIEEGAFEGASGVNEILLTSNRLENVQHKMFKGLESLKTLMLRSNRITCVGNDSFIGLSSVRLLSLYDNQITTVAPGAFDTLHSLSTLNLLANPFNCNCYLAWLGEWLRKKRIVTGNPRCQKPYFLKEIPIQDVAIQDFTCDDGNDDNSCSPLSRCPTECTCLDTVVRCSNKGLKVLPKGIPRDVTELYLDGNQFTLVPKELSNYKHLTLIDLSNNRISTLSNQSFSNMTQLLTLILSYNRLRCIPPRTFDGLKSLRLLSLHGNDISVVPEGAFNDLSALSHLAIGANPLYCDCNMQWLSDWVKSEYKEPGIARCAGPGEMADKLLLTTPSKKFTCQGPVDVNILAKCNPCLSNPCKNDGTCNSDPVDFYRCTCPYGFKGQDCDVPIHACISNPCKHGGTCHLKEGEEDGFWCICADGFEGENCEVNVDDCEDNDCENNSTCVDGINNYTCLCPPEYTAANLNEVEKGELCEEKLDFCAQDLNPCQHDSKCILTPKGFKCDCTPGYVGEHCDIDFDDCQDNKCKNGAHCTDAVNGYTCICPEGYSGLFCEFSPPMVLPRTSPCDNFDCQNGAQCIVRINEPICQCLPGYQGEKCEKLVSVNFINKESYLQIPSAKVRPQTNITLQIATDEDSGILLYKGDKDHIAVELYRGRVRASYDTGSHPASAIYSVETINDGNFHIVELLALDQSLSLSVDGGNPKIITNLSKQSTLNFDSPLYVGGMPGKSNVASLRQAPGQNGTSFHGCIRNLYINSELQDFQKVPMQTGILPGCEPCHKKVCAHGTCQPSSQAGFTCECQEGWMGPLCDQRTNDPCLGNKCVHGTCLPINAFSYSCKCLEGHGGVLCDEEEDLFNPCQAIKCKHGKCRLSGLGQPYCECSSGYTGDSCDREISCRGERIRDYYQKQQGYAACQTTKKVSRLECRGGCAGGQCCGPLRSKRRKYSFECTDGSSFVDEVEKVVKCGCTRCVS

SEQ ID NO: 12489 - protein, 1529 aa, Homo sapiens
MRGVGWQMLSLSLGLVLAILNKVAPQACPAQCSCSGSTVDCHGLALRSVPRNIPRNTERLDLNGNNITRITKTDFAGLRHLRVLQLMENKISTIERGAFQDLKELERLRLNRNHLQLFPELLFLGTAKLYRLDLSENQIQAIPRKAFRGAVDIKNLQLDYNQISCIEDGAFRALRDLEVLTLNNNNITRLSVASFNHMPKLRTFRLHSNNLYCDCHLAWLSDWLRQRPRVGLYTQCMGPSHLRGHNVAEVQKREFVCSGHQSFMAPSCSVLHCPAACTCSNNIVDCRGKGLTEIPTNLPETITEIRLEQNTIKVIPPGAFSPYKKLRRIDLSNNQISELAPDAFQGLRSLNSLVLYGNKITELPKSLFEGLFSLQLLLLNANKINCLRVDAFQDLHNLNLLSLYDNKLQTIAKGTFSPLRAIQTMHLAQNPFICDCHLKWLADYLHTNPIETSGARCTSPRRLANKRIGQIKSKKFRCSAKEQYFIPGTEDYRSKLSGDCFADLACPEKCRCEGTTVDCSNQKLNKIPEHIPQYTAELRLNNNEFTVLEATGIFKKLPQLRKINFSNNKITDIEEGAFEGASGVNEILLTSNRLENVQHKMFKGLESLKTLMLRSNRITCVGNDSFIGLSSVRLLSLYDNQITTVAPGAFDTLHSLSTLNLLANPFNCNCYLAWLGEWLRKKRIVTGNPRCQKPYFLKEIPIQDVAIQDFTCDDGNDDNSCSPLSRCPTECTCLDTVVRCSNKGLKVLPKGIPRDVTELYLDGNQFTLVPKELSNYKHLTLIDLSNNRISTLSNQSFSNMTQLLTLILSYNRLRCIPPRTFDGLKSLRLLSLHGNDISVVPEGAFNDLSALSHLAIGANPLYCDCNMQWLSDWVKSEYKEPGIARCAGPGEMADKLLLTTPSKKFTCQGPVDVNILAKCNPCLSNPCKNDGTCNSDPVDFYRCTCPYGFKGQDCDVPIHACISNPCKHGGTCHLKEGEEDGFWCICADGFEGENCEVNVDDCEDNDCENNSTCVDGINNYTCLCPPEYTGELCEEKLDFCAQDLNPCQHDSKCILTPKGFKCDCTPGYVGEHCDIDFDDCQDNKCKNGAHCTDAVNGYTCICPEGYSGLFCEFSPPMVLPRTSPCDNFDCQNGAQCIVRINEPICQCLPGYQGEKCEKLVSVNFINKESYLQIPSAKVRPQTNITLQIATDEDSGILLYKGDKDHIAVELYRGRVRASYDTGSHPASAIYSVETINDGNFHIVELLALDQSLSLSVDGGNPKIITNLSKQSTLNFDSPLYVGGMPGKSNVASLRQAPGQNGTSFHGCIRNLYINSELQDFQKVPMQTGILPGCEPCHKKVCAHGTCQPSSQAGFTCECQEGWMGPLCDQRTNDPCLGNKCVHGTCLPINAFSYSCKCLEGHGGVLCDEEEDLFNPCQAIKCKHGKCRLSGLGQPYCECSSGYTGDSCDREISCRGERIRDYYQKQQGYAACQTTKKVSRLECRGGCAGGQCCGPLRSKRRKYSFECTDGSSFVDEVEKVVKCGCTRCVS

SEQ ID NO: 12490 - protein, 1521 aa, Homo sapiens
MRGVGWQMLSLSLGLVLAILNKVAPQACPAQCSCSGSTVDCHGLALRSVPRNIPRNTERLDLNGNNITRITKTDFAGLRHLRVLQLMENKISTIERGAFQDLKELERLRLNRNHLQLFPELLFLGTAKLYRLDLSENQIQAIPRKAFRGAVDIKNLQLDYNQISCIEDGAFRALRDLEVLTLNNNNITRLSVASFNHMPKLRTFRLHSNNLYCDCHLAWLSDWLRQRPRVGLYTQCMGPSHLRGHNVAEVQKREFVCSGHQSFMAPSCSVLHCPAACTCSNNIVDCRGKGLTEIPTNLPETITEIRLEQNTIKVIPPGAFSPYKKLRRIDLSNNQISELAPDAFQGLRSLNSLVLYGNKITELPKSLFEGLFSLQLLLLNANKINCLRVDAFQDLHNLNLLSLYDNKLQTIAKGTFSPLRAIQTMHLAQNPFICDCHLKWLADYLHTNPIETSGARCTSPRRLANKRIGQIKSKKFRCSGTEDYRSKLSGDCFADLACPEKCRCEGTTVDCSNQKLNKIPEHIPQYTAELRLNNNEFTVLEATGIFKKLPQLRKINFSNNKITDIEEGAFEGASGVNEILLTSNRLENVQHKMFKGLESLKTLMLRSNRITCVGNDSFIGLSSVRLLSLYDNQITTVAPGAFDTLHSLSTLNLLANPFNCNCYLAWLGEWLRKKRIVTGNPRCQKPYFLKEIPIQDVAIQDFTCDDGNDDNSCSPLSRCPTECTCLDTVVRCSNKGLKVLPKGIPRDVTELYLDGNQFTLVPKELSNYKHLTLIDLSNNRISTLSNQSFSNMTQLLTLILSYNRLRCIPPRTFDGLKSLRLLSLHGNDISVVPEGAFNDLSALSHLAIGANPLYCDCNMQWLSDWVKSEYKEPGIARCAGPGEMADKLLLTTPSKKFTCQGPVDVNILAKCNPCLSNPCKNDGTCNSDPVDFYRCTCPYGFKGQDCDVPIHACISNPCKHGGTCHLKEGEEDGFWCICADGFEGENCEVNVDDCEDNDCENNSTCVDGINNYTCLCPPEYTGELCEEKLDFCAQDLNPCQHDSKCILTPKGFKCDCTPGYVGEHCDIDFDDCQDNKCKNGAHCTDAVNGYTCICPEGYSGLFCEFSPPMVLPRTSPCDNFDCQNGAQCIVRINEPICQCLPGYQGEKCEKLVSVNFINKESYLQIPSAKVRPQTNITLQIATDEDSGILLYKGDKDHIAVELYRGRVRASYDTGSHPASAIYSVETINDGNFHIVELLALDQSLSLSVDGGNPKIITNLSKQSTLNFDSPLYVGGMPGKSNVASLRQAPGQNGTSFHGCIRNLYINSELQDFQKVPMQTGILPGCEPCHKKVCAHGTCQPSSQAGFTCECQEGWMGPLCDQRTNDPCLGNKCVHGTCLPINAFSYSCKCLEGHGGVLCDEEEDLFNPCQAIKCKHGKCRLSGLGQPYCECSSGYTGDSCDREISCRGERIRDYYQKQQGYAACQTTKKVSRLECRGGCAGGQCCGPLRSKRRKYSFECTDGSSFVDEVEKVVKCGCTRCVS

SEQ ID NO: 12491 - protein, 1525 aa, Homo sapiens
MRGVGWQMLSLSLGLVLAILNKVAPQACPAQCSCSGSTVDCHGLALRSVPRNIPRNTERLDLNGNNITRITKTDFAGLRHLRVLQLMENKISTIERGAFQDLKELERLRLNRNHLQLFPELLFLGTAKLYRLDLSENQIQAIPRKAFRGAVDIKNLQLDYNQISCIEDGAFRALRDLEVLTLNNNNITRLSVASFNHMPKLRTFRLHSNNLYCDCHLAWLSDWLRQRPRVGLYTQCMGPSHLRGHNVAEVQKREFVCSDEEEGHQSFMAPSCSVLHCPAACTCSNNIVDCRGKGLTEIPTNLPETITEIRLEQNTIKVIPPGAFSPYKKLRRIDLSNNQISELAPDAFQGLRSLNSLVLYGNKITELPKSLFEGLFSLQLLLLNANKINCLRVDAFQDLHNLNLLSLYDNKLQTIAKGTFSPLRAIQTMHLAQNPFICDCHLKWLADYLHTNPIETSGARCTSPRRLANKRIGQIKSKKFRCSGTEDYRSKLSGDCFADLACPEKCRCEGTTVDCSNQKLNKIPEHIPQYTAELRLNNNEFTVLEATGIFKKLPQLRKINFSNNKITDIEEGAFEGASGVNEILLTSNRLENVQHKMFKGLESLKTLMLRSNRITCVGNDSFIGLSSVRLLSLYDNQITTVAPGAFDTLHSLSTLNLLANPFNCNCYLAWLGEWLRKKRIVTGNPRCQKPYFLKEIPIQDVAIQDFTCDDGNDDNSCSPLSRCPTECTCLDTVVRCSNKGLKVLPKGIPRDVTELYLDGNQFTLVPKELSNYKHLTLIDLSNNRISTLSNQSFSNMTQLLTLILSYNRLRCIPPRTFDGLKSLRLLSLHGNDISVVPEGAFNDLSALSHLAIGANPLYCDCNMQWLSDWVKSEYKEPGIARCAGPGEMADKLLLTTPSKKFTCQGPVDVNILAKCNPCLSNPCKNDGTCNSDPVDFYRCTCPYGFKGQDCDVPIHACISNPCKHGGTCHLKEGEEDGFWCICADGFEGENCEVNVDDCEDNDCENNSTCVDGINNYTCLCPPEYTGELCEEKLDFCAQDLNPCQHDSKCILTPKGFKCDCTPGYVGEHCDIDFDDCQDNKCKNGAHCTDAVNGYTCICPEGYSGLFCEFSPPMVLPRTSPCDNFDCQNGAQCIVRINEPICQCLPGYQGEKCEKLVSVNFINKESYLQIPSAKVRPQTNITLQIATDEDSGILLYKGDKDHIAVELYRGRVRASYDTGSHPASAIYSVETINDGNFHIVELLALDQSLSLSVDGGNPKIITNLSKQSTLNFDSPLYVGGMPGKSNVASLRQAPGQNGTSFHGCIRNLYINSELQDFQKVPMQTGILPGCEPCHKKVCAHGTCQPSSQAGFTCECQEGWMGPLCDQRTNDPCLGNKCVHGTCLPINAFSYSCKCLEGHGGVLCDEEEDLFNPCQAIKCKHGKCRLSGLGQPYCECSSGYTGDSCDREISCRGERIRDYYQKQQGYAACQTTKKVSRLECRGGCAGGQCCGPLRSKRRKYSFECTDGSSFVDEVEKVVKCGCTRCVS

SEQ ID NO: 12492 - protein, 212 aa, Homo sapiens
MTQLLTLILSYNRLRCIPPRTFDGLKSLRLLSLHGNDISVVPEGAFNDLSALSHLAIGANPLYCDCNMQWLSDWVKSEYKEPGIARCAGPGEMADKLLLTTPSKKFTCQGLPGPCGFLIPGPVDVNILAKCNPCLSNPCKNDGTCNSDPVDFYRCTCPYGFKGQDCDVPIHACISNPCKHGGTCHLKEGEEDGFWCICADGFEGENCEVNVD

SEQ ID NO: 12493 - protein, 196 aa, Homo sapiens
  SITE 1: note = misc_feature - Xaa can be any naturally occurring amino acid
XSDWVKSEYKEPGIARCAGPGEMADKLLLTTPSKKFTCQGPVDVNILAKCNPCLSNPCKNDGTCNSDPVDFYRCTCPYGFKGQDCDVPIHACISNPCKHGGTCHLKEGEEDGFWCICADGFEGENCEVNVDDCEDNDCENNSTCVDGINNYTCLCPPEYTGTNNRKYFAFHQYICLKASLELCYICLVNLFLFDKW

SEQ ID NO: 12494 - protein, 82 aa, Homo sapiens
  SITE 1: note = misc_feature - Xaa can be any naturally occurring amino acid
XSYDTGSHPASAIYSVETINDGNFHIVELLALDQSLSLSVDGGNPKIITNLSKQSTLNFDSPLYVGGMPGKSNVASLRQGAL

SEQ ID NO: 12495 - protein, 1530 aa, Homo sapiens
MAPGWAGVGAAVRARLALALALASVLSGPPAVACPTKCTCSAASVDCHGLGLRAVPRGIPRNAERLDLDRNNITRITKMDFAGLKNLRVLHLEDNQVSVIERGAFQDLKQLERLRLNKNKLQVLPELLFQSTPKLTRLDLSENQIQGIPRKAFRGITDVKNLQLDNNHISCIEDGAFRALRDLEILTLNNNNISRILVTSFNHMPKIRTLRLHSNHLYCDCHLAWLSDWLRQRRTVGQFTLCMAPVHLRGFNVADVQKKEYVCPAPHSEPPSCNANSISCPSPCTCSNNIVDCRGKGLMEIPANLPEGIVEIRLEQNSIKAIPAGAFTQYKKLKRIDISKNQISDIAPDAFQGLKSLTSLVLYGNKITEIVKGLFDGLVSLQLLLLNANKINCLRVNTFQDLQNLNLLSLYDNKLQTISKGLFAPLQSIQTLHLAQNPFVCDCHLKWLADYLQDNPIETSGARCSSPRRLANKRISQIKSKKFRCSGSEDYRSRFSSECFMDLVCPEKCRCEGTIVDCSNQKLVRIPSHLPEYVTDLRLNDNEVSVLEATGIFKKLPNLRKINLSNNKIKEVREGAFDGAASVQELMLTGNQLETVHGRVFRGLSGLKTLMLRSNLIGCVSNDTFAGLSSVRLLSLYDNRITTITPGAFTTLVSLSTINLLSNPFNCNCHLAWLGKWLRKRRIVSGNPRCQKPFFLKEIPIQDVAIQDFTCDGNEESSCQLSPRCPEQCTCMETVVRCSNKGLRALPRGMPKDVTELYLEGNHLTAVPRELSALRHLTLIDLSNNSISMLTNYTFSNMSHLSTLILSYNRLRCIPVHAFNGLRSLRVLTLHGNDISSVPEGSFNDLTSLSHLALGTNPLHCDCSLRWLSEWVKAGYKEPGIARCSSPEPMADRLLLTTPTHRFQCKVLWFCCPGPVDINIVAKCNACLSSPCKNNGTCTQDPVELYRCACPYSYKGKDCTVPINTCIQNPCQHGGTCHLSDSHKDGFSCSCPLGFEGQRCEINPDDCEDNDCENNATCVDGINNYVCICPPNYTGELCDEVIDHCVPELNLCQHEAKCIPLDKGFSCECVPGYSGKLCETDNDDCVAHKCRHGAQCVDTINGYTCTCPQGFSGPFCEHPPPMVLLQTSPCDQYECQNGAQCIVVQQEPTCRCPPGFAGPRCEKLITVNFVGKDSYVELASAKVRPQANISLQVATDKDNGILLYKGDNDPLALELYQGHVRLVYDSLSSPPTTVYSVETVNDGQFHSVELVTLNQTLNLVVDKGTPKSLGKLQKQPAVGINSPLYLGGIPTSTGLSALRQGTDRPLGGFHGCIHEVRINNELQDFKALPPQSLGVSPGCKSCTVCKHGLCRSVEKDSVVCECRPGWTGPLCDQEARDPCLGHRCHHGKCVATGTSYMCKCAEGYGGDLCDNKNDSANACSAFKCHHGQCHISDQGEPYCLCQPGFSGEHCQQENPCLGQVVREVIRRQKGYASCATASKVPIMECRGGCGPQCCQPTRSKRRKYVFQCTDGSSFVEEVERHLECGCLACS

SEQ ID NO: 12496 - protein, 1523 aa, Homo sapiens
MAPGWAGVGAAVRARLALALALASVLSGPPAVACPTKCTCSAASVDCHGLGLRAVPRGIPRNAERLDLDRNNITRITKMDFAGLKNLRVLHLEDNQVSVIERGAFQDLKQLERLRLNKNKLQVLPELLFQSTPKLTRLDLSENQIQGIPRKAFRGITDVKNLQLDNNHISCIEDGAFRALRDLEILTLNNNNISRILVTSFNHMPKIRTLRLHSNHLYCDCHLAWLSDWLRQRRTVGQFTLCMAPVHLRGFNVADVQKKEYVCPAPHSEPPSCNANSISCPSPCTCSNNIVDCRGKGLMEIPANLPEGIVEIRLEQNSIKAIPAGAFTQYKKLKRIDISKNQISDIAPDAFQGLKSLTSLVLYGNKITEIVKGLFDGLVSLQLLLLNANKINCLRVNTFQDLQNLNLLSLYDNKLQTISKGLFAPLQSIQTLHLAQNPFVCDCHLKWLADYLQDNPIETSGARCSSPRRLANKRISQIKSKKFRCSGSEDYRSRFSSECFMDLVCPEKCRCEGTIVDCSNQKLVRIPSHLPEYVTDLRLNDNEVSVLEATGIFKKLPNLRKINLSNNKIKEVREGAFDGAASVQELMLTGNQLETVHGRVFRGLSGLKTLMLRSNLIGCVSNDTFAGLSSVRLLSLYDNRITTITPGAFTTLVSLSTINLLSNPFNCNCHLAWLGKWLRKRRIVSGNPRCQKPFFLKEIPIQDVAIQDFTCDGNEESSCQLSPRCPEQCTCMETVVRCSNKGLRALPRGMPKDVTELYLEGNHLTAVPRELSALRHLTLIDLSNNSISMLTNYTFSNMSHLSTLILSYNRLRCIPVHAFNGLRSLRVLTLHGNDISSVPEGSFNDLTSLSHLALGTNPLHCDCSLRWLSEWVKAGYKEPGIARCSSPEPMADRLLLTTPTHRFQCKGPVDINIVAKCNACLSSPCKNNGTCTQDPVELYRCACPYSYKGKDCTVPINTCIQNPCQHGGTCHLSDSHKDGFSCSCPLGFEGQRCEINPDDCEDNDCENNATCVDGINNYVCICPPNYTGELCDEVIDHCVPELNLCQHEAKCIPLDKGFSCECVPGYSGKLCETDNDDCVAHKCRHGAQCVDTINGYTCTCPQGFSGPFCEHPPPMVLLQTSPCDQYECQNGAQCIVVQQEPTCRCPPGFAGPRCEKLITVNFVGKDSYVELASAKVRPQANISLQVATDKDNGILLYKGDNDPLALELYQGHVRLVYDSLSSPPTTVYSVETVNDGQFHSVELVTLNQTLNLVVDKGTPKSLGKLQKQPAVGINSPLYLGGIPTSTGLSALRQGTDRPLGGFHGCIHEVRINNELQDFKALPPQSLGVSPGCKSCTVCKHGLCRSVEKDSVVCECRPGWTGPLCDQEARDPCLGHRCHHGKCVATGTSYMCKCAEGYGGDLCDNKNDSANACSAFKCHHGQCHISDQGEPYCLCQPGFSGEHCQQENPCLGQVVREVIRRQKGYASCATASKVPIMECRGGCGPQCCQPTRSKRRKYVFQCTDGSSFVEEVERHLECGCLACS

SEQ ID NO: 12497 - protein, 1393 aa, Homo sapiens
RDLSENQIQGIPRKAFRGITDVKNLQLDNNHISCIEDGAFRALRDLEILTLNNNNISRILVTSFNHMPKIRTLRLHSNHLYCDCHLAWLSDWLRQRRTVGQFTLCMAPVHLRGFNVADVQKKEYVCPAPHSEPPSCNANSISCPSPCTCSNNIVDCRGKGLMEIPANLPEGIVEIRLEQNSIKAIPAGAFTQYKKLKRIDISKNQISDIAPDAFQGLKSLTSLVLYGNKITEIVKGLFDGLVSLQLLLLNANKINCLRVNTFQDLQNLNLLSLYDNKLQTISKGLFAPLQSIQTLHLAQNPFVCDCHLKWLADYLQDNPIETSGARCSSPRRLANKRISQIKSKKFRCSGSEDYRSRFSSECFMDLVCPEKCRCEGTIVDCSNQKLVRIPSHLPEYVTDLRLNDNEVSVLEATGIFKKLPNLRKINLSNNKIKEVREGAFDGAASVQELMLTGNQLETVHGRVFRGLSGLKTLMLRSNLIGCVSNDTFAGLSSVRLLSLYDNRITTITPGAFTTLVSLSTINLLSNPFNCNCHLAWLGKWLRKRRIVSGNPRCQKPFFLKEIPIQDVAIQDFTCDGNEESSCQLSPRCPEQCTCMETVVRCSNKGLRALPRGMPKDVTELYLEGNHLTAVPRELSALRHLTLIDLSNNSISMLTNYTFSNMSHLSTLILSYNRLRCIPVHAFNGLRSLRVLTLHGNDISSVPEGSFNDLTSLSHLALGTNPLHCDCSLRWLSEWVKAGYKEPGIARCSSPEPMADRLLLTTPTHRFQCKVLWFCCPGPVDINIVAKCNACLSSPCKNNGTCTQDPVELYRCACPYSYKGKDCTVPINTCIQNPCQHGGTCHLSDSHKDGFSCSCPLGFEGQRCEINPDDCEDNDCENNATCVDGINNYVCICPPNYTGELCDEVIDHCVPELNLCQHEAKCIPLDKGFSCECVPGYSGKLCETDNDDCVAHKCRHGAQCVDTINGYTCTCPQGFSGPFCEHPPPMVLLQTSPCDQYECQNGAQCIVVQQEPTCRCPPGFAGPRCEKLITVNFVGKDSYVELASAKVRPQANISLQVATDKDNGILLYKGDNDPLALELYQGHVRLVYDSLSSPPTTVYSVETVNDGQFHSVELVTLNQTLNLVVDKGTPKSLGKLQKQPAVGINSPLYLGGIPTSTGLSALRQGTDRPLGGFHGCIHEVRINNELQDFKALPPQSLGVSPGCKSCTVCKHGLCRSVEKDSVVCECRPGWTGPLCDQEARDPCLGHRCHHGKCVATGTSYMCKCAEGYGGDLCDNKNDSANACSAFKCHHGQCHISDQGEPYCLCQPGFSGEHCQQENPCLGQVVREVIRRQKGYASCATASKVPIMECRGGCGPQCCQPTRSKRRKYVFQCTDGSSFVEEVERHLECGCLACS

SEQ ID NO: 12498 - protein, 163 aa, Homo sapiens
MKPSIAEMLHRGRMLWIILLSTIALGWTTPIPLIEDSEEIDEPCFDPCYCEVKESLFHIHCDSKGFTNISQITEFWSRPFKLYLQRNSMRKLYTNSFLHLNNAVSINLGNNALQDIQTGAFNGLKILKRLYLHENKLDVFRNDTFLGLESLEYLQADYNVIKR

SEQ ID NO: 12499 - protein, 977 aa, Homo sapiens
MKPSIAEMLHRGRMLWIILLSTIALGWTTPIPLIEDSEEIDEPCFDPCYCEVKESLFHIHCDSKGFTNISQITEFWSRPFKLYLQRNSMRKLYTNSFLHLNNAVSINLGNNALQDIQTGAFNGLKILKRLYLHENKLDVFRNDTFLGLESLEYLQADYNVIKRIESGAFRNLSKLRVLILNDNLIPMLPTNLFKAVSLTHLDLRGNRLKVLFYRGMLDHIGRSLMELQLEENPWNCTCEIVQLKSWLERIPYTALVGDITCETPFHFHGKDLREIRKTELCPLLSDSEVEASLGIPHSSSSKENAWPTKPSSMLSSVHFTASSVEYKSSNKQPKPTKQPRTPRPPSTSQALYPGPNQPPIAPYQTRPPIPIICPTGCTCNLHINDLGLTVNCKERGFNNISELLPRPLNAKKLYLSSNLIQKIYRSDFWNFSSLDLLHLGNNRISYVQDGAFINLPNLKSLFLNGNDIEKLTPGMFRGLQSLHYLYFEFNVIREIQPAAFSLMPNLKLLFLNNNLLRTLPTDAFAGTSLARLNLRKNYFLYLPVAGVLEHLNAIVQIDLNENPWDCTCDLVPFKQWIETISSVSVVGDVLCRSPENLTHRDVRTIELEVLCPEMLHVAPAGESPAQPGDSHLIGAPTSASPYEFSPPGGPVPLSVLILSLLVLFFSAVFVAAGLFAYVLRRRRKKLPFRSKRQEGVDLTGIQMQCHRLFEDGGGGGGGSGGGGRPTLSSPEKAPPVGHVYEYIPHPVTQMCNNPIYKPREEEEVAVSSAQEAGSAERGGPGTQPPGMGEALLGSEQFAETPKENHSNYRTLLEKEKEWALAVSSSQLNTIVTVNHHHPHHPAVGGVSGVVGGTGGDLAGFRHHEKNGGVVLFPPGGGCGSGSMLLDRERPQPAPCTVGFVDCLYGTVPKLKELHVHPPGMQYPDLQQDARLKETLLFSAGKGFTDHQTQKSDYLELRAKLQTKPDYLEVLEKTTYRF

SEQ ID NO: 12500 - protein, 977 aa, Homo sapiens; identical to SEQ ID NO: 12499

SEQ ID NO: 12501 - protein, 132 aa, Homo sapiens
MKSSGLFPFLVLLALGTLAPWAVEGSGKSFKAGVCPPKKSAQCLRYKKPECQSDWQCPGKKRCCPDTCGIKCLDPVDTPNPTRRKPGKCPVTYGQCLMLNPPNFCEMDGQCKRDLKCCMGMCGKSCVSPVKA

SEQ ID NO: 12502 - protein, 600 aa, Homo sapiens
GKVLSAKVVTNARSPGAKCYGIVTMSSSTEVSRCIAHLHRTELHGQLISVEKVKGDPSKKEMKKENDEKSSSRSSGDKKNTSDRSSKTQASVKKEEKRSSEKSEKKESKDTKKIEGSKSPGHMVILDQTKGDHCRPSRRGRYEKIHGRSKEKERASLDKKRDKDYRRKEILPFEKMKEQRLREHLVRFERLRRAMELRRRREIAERERRERERIRIIREREERERLQRERERLEIERQKLERERMERERLERERIRIEQERRKEAERIAREREELRRQQQQLRYEQEKRNSLKRPRDVDHRRDDPYWSENKKLSLDTDARFGHGSDYSRQQNRFNDFDHRERGRFPESSAVQSSSFERRDRFVGQSEGKKARPTARREDPSFERYPKNFSDSRRNEPPPPRNELRESDRREVRGERDERRTVIIHDRPDITHPRHPREAGPNPSRPTSWKSEGSMSTDKRETRVERPERSGREVSGHSVRGAPPGNRSSASGYGSREGDRGVITDRGGGSQHYPEERHVVERHGRDTSGPRKEWHGPPSQGPSYHDTRRMGDGRAGAGMITQHSSNASPINRIVQISGNSMPRGSGSGFKPFKGGPPRRF

SEQ ID NO: 12503 - protein, 100 aa, Homo sapiens
GVITDRGGGSQHYPEERHVVERHGRDTSGPRKEWHGPPSQGPSYHDTRRMGDGRAGAGMITQHSSNASPINRIVQISGNSMPRGSGSGFKPFKGGPPRRF

SEQ ID NO: 12504 - protein, 89 aa, Homo sapiens
MAAATGAVAASAASGQAEGKKITDLRVIDLKSELKRRNLDITGVKTVLISRLKQAIEEEGGDPDNIELTVSTDTPNKKPTKGKDYKLKH

SEQ ID NO: 12505 - protein, 1034 aa, Homo sapiens
MAAATGAVAASAASGQAEGKKITDLRVIDLKSELKRRNLDITGVKTVLISRLKQAIEEEGGDPDNIELTVSTDTPNKKPTKGKGKKHEADELSGDASVEDDAFIKDCELENQEAHEQDGNDELKDSEEFGENEEENVHSKELLSAEENKRAHELIEAEGIEDIEKEDIESQEIEAQEGEDDTFLTAQDGEEEENEKDIAGSGDGTQEVSKPLPSEGSLAEADHTAHEEMEAHTTVKEAEDDNISVTIQAEDAITLDFDGDDLLETGKNVKITDSEASKPKDGQDAIAQSPEKESKDYEMNANHKDGKKEDCVKGDPVEKEARESSKKAESGDKEKDTLKKGPSSTGASGQAKSSSKESKDSKTSSKDDKGSTSSTSGSSGSSTKNIWVSGLSSNTKAADLKNLFGKYGKVLSAKVVTNARSPGAKCYGIVTMSSSTEVSRCIAHLHRTELHGQLISVEKVKGDPSKKEMKKENDEKSSSRSSGDKKNTSDRSSKTQASVKKEEKRSSEKSEKKESKDTKKIEGKDEKNDNGASGQTSESIKKSEEKKRISSKSPGHMVILDQTKGDHCRPSRRGRYEKIHGRSKEKERASLDKKRDKDYRRKEILPFEKMKEQRLREHLVRFERLRRAMELRRRREIAERERRERERIRIIREREERERLQRERERLEIERQKLERERMERERLERERIRIEQERRKEAERIAREREELRRQQQQLRYEQEKRNSLKRPRDVDHRRDDPYWSENKKLSLDTDARFGHGSDYSRQQNRFNDFDHRERGRFPESSAVQSSSFERRDRFVGQSEGKKARPTARREDPSFERYPKNFSDSRRNEPPPPRNELRESDRREVRGERDERRTVIIHDRPDITHPRHPREAGPNPSRPTSWKSEGSMSTDKRETRVERPERSGREVSGHSVRGAPPGNRSSASGYGSREGDRGVITDRGGGSQHYPEERHVVERHGRDTSGPRKEWHGPPSQGPSYHDTRRMGDGRAGAGMITQHSSNASPINRIVQISGNSMPRGSGSGFKPFKGGPPRRF

SEQ ID NO: 12506 - protein, 229 aa, Homo sapiens
MAAATGAVAASAASGQAEGKKITDLRVIDLKSELKRRNLDITGVKTVLISRLKQAIEEEGGDPDNIELTVSTDTPNKKPTKGKGKKHEADELSGDASVEDDAFIKDCELENQEAHEQDGNDELKDSEEFGENEEENVHSKELLSAEENKRAHELIEAEGIEDIEKEDIESQEIEAQEGEDDTFLTAQDGEEEENEKDSEASKPKDGQDAIAQSPEKESKDYEMNANHKD

SEQ ID NO: 12507 - protein, 453 aa, Homo sapiens
MAAATGAVAASAASGQAEGKKITDLRVIDLKSELKRRNLDITGVKTVLISRLKQAIEEEGGDPDNIELTVSTDTPNKKPTKGKGKKHEADELSGDASVEDDAFIKDCELENQEAHEQDGNDELKDSEEFGENEEENVHSKELLSAEENKRAHELIEAEGIEDIEKEDIESQEIEAQEGEDDTFLTAQDGEEEENEKEGSLAEADHTAHEEMEAHTTVKEAEDDNISVTIQAEDAITLDFDGDDLLETGKNVKITDSEASKPKDGQDAIAQSPEKESKDYEMNANHKDGKKEDCVKGDPVEKEARESSKKAESGDKEKDTLKKGPSSTGASGQAKSSSKESKDSKTSSKDDKGSTSSTSGSSGSSTKNIWVSGLSSNTKAADLKNLFGKYGKVLSAKVVTNARSPGAKCYGIVTMSSSTEVSRCIAHLHRTELHGQLISVEKVKGDPSKKEMKK

SEQ ID NO: 12508 - protein, 192 aa, Homo sapiens
MAAATGAVAASAASGQAEGKKITDLRVIDLKSELKRRNLDITGVKTVLISRLKQAIEEEGGDPDNIELTVSTDTPNKKPTKGKGKKHEADELSGDASVEDDAFIKDGEEEENEKDIAGSGDGTQEVSKPLPSEGSLAEADHTAHEEMEAHTTVKEAEDDNISVTIQAEDAITLDFDGDDLLETGKNVKITDS

SEQ ID NO: 12509 - protein, 177 aa, Homo sapiens
MAAATGAVAASAASGQAEGKKITDLRVIDLKSELKRRNLDITGVKTVLISRLKQAIEEEGGDPDNIELTVSTDTPNKKPTKGKGKKHEADELSGDASVEDDAFIKEIEAQEGEDDTFLTAQDGEEEENEKALQRNLKTARHHLKMTKEVQVVLVVAVEAQLKISGLVDFHLIPKLLI

SEQ ID NO: 12510 - protein, 161 aa, Homo sapiens
MAAATGAVAASAASGQAEGKKITDLRVIDLKSELKRRNLDITGVKTVLISRLKQAIEEEGGDPDNIELTVSTDTPNKKPTKGKGKKHEADELSGDASVEDDAFIKEIEAQEGEDDTFLTAQDGEEEENEKEGSLAEADHTAHEEMEAHTTVKEAEDDNISV

SEQ ID NO: 12511 - protein, 62 aa, Homo sapiens
MAAATGAVAASAASGQAEGKKITDLRVIDLKSELKRRNLDITGVKTVLISRLKQVKNMKQMS

SEQ ID NO: 12512 - protein, 62 aa, Homo sapiens; identical to SEQ ID NO: 12511

SEQ ID NO: 12513 - protein, 62 aa, Homo sapiens; identical to SEQ ID NO: 12511

SEQ ID NO: 12514 - protein, 205 aa, Homo sapiens
  SITE 1: note = misc_feature - Xaa can be any naturally occurring amino acid
XDITGVKTVLISRLKQAIEEEGGDPDNIELTVSTDTPNKKPTKGKGKKHEADELSGDASVEDDAFIKDCELENQEAHEQDGNDELKDSEEFGENEEENVHSKELLSAEENKRAHELIEAEGIEDIEKEDIESQEIEAQEGEDDTFLTAQDGEEEENEKALQRNLKTARHHLKMTKEVQVVLVVAVEAQLKISGLVDFHLIPKLLI

SEQ ID NO: 12515 - protein, 112 aa, Homo sapiens
  SITE 1: note = misc_feature - Xaa can be any naturally occurring amino acid
XLRYEQEKRNSLKRPRDVDHSKYFSSRRDDPYWSENKKLSLDTDARFGHGSDYSRQQNRFNDFDHRERGRFPESSAVQSSSFERRDRFVGQSEGKKARPTARREDPSFERYP

SEQ ID NO: 12516 - protein, 103 aa, Homo sapiens
MASRWAVQLLLVAAWSMGCGEALKCYTCKEPMTSASCRTITRCKPEDTACMTTLVTVEAEYPFNQSPVVTRSCSSSCVATDPDSIGAAHLIFCCFRDLCNSEL

SEQ ID NO: 12517 - protein, 57 aa, Homo sapiens
AAAQPPAAAVPGPSVPQPAPGQPSPVLQLQQKQSRISPIQKPQGLDPVEILQEREYR

SEQ ID NO: 12518 - protein, 37 aa, Homo sapiens
AEGGESALGPDGECFVEGVRGKNHWPIDESSQMSDLP

SEQ ID NO: 12519 - protein, 68 aa, Homo sapiens
MAIEDGNLEEMEEEVRLKKRKRRRNVDKDPAKEDVEKAKKRRGRPPAEKLSPNPPKLTKQMNAIIDTV

SEQ ID NO: 12520 - protein, 254 aa, Homo sapiens
MEEEVRLKKRKRRRNVDKDPAKEDVEKAKKRRGRPPAEKLSPNPPKLTKQMNAIIDTVINYKDRCNVEKVPSNSQLEIEGNSSGRQLSEVFIQLPSRKELPEYYELIRKPVDFKKIKERIRNHKYRSLGDLEKDVMLLCHNAQTFNLEGSQIYEDSIVLQSVFKSARQKIAKEEESEDESNEEEEEEDEEESESEAKSVKVKIKLNKKDDKGRDKGKGKKRPNRGKAKPVVSDFDSDEEQDEREQSEGSGTDDE

SEQ ID NO: 12521 - protein, 254 aa, Homo sapiens; identical to SEQ ID NO: 12520

SEQ ID NO: 12522 - protein, 149 aa, Homo sapiens
MEEEVRLKKRKRRRNVDKDPAKEDVEKAKKRRGRPPAEKLSPNPPKLTKQMNAIIDTVINYKDSSGRQLSEVFIQLPSRKELPEYYELIRKPVDFKKIKERIRNHKYRSLGDLEKDVMLLCHNAQTFNLEGSQIYEDSIVLQSVFKSAR

SEQ ID NO: 12523 - protein, 169 aa, Homo sapiens
MEEEVRLKKRKRRRNVDKDPAKEDVEKAKKRRGRPPAEKLSPNPPKLTKQMNAIIDTVINYKDSSGRQLSEVFIQLPSRKELPEYYELIRKPVDFKKIKERIRNHKYRSLGDLEKDVMLLCHNAQTFNLEGSQIYEDSIVLQSVFKSARQKIAKEEESEDESNEEEEEE

SEQ ID NO: 12524 - protein, 192 aa, Homo sapiens
MEEEVRLKKRKRRRNVDKDPAKEDVEKAKKRRGRPPAEKLSPNPPKLTKQMNAIIDTVINYKDSSGRQLSEVFIQLPSRKELPEYYELIRKPVDFKKIKERIRNHKYRSLGDLEKDVMLLCHNAQTFNLEGSQIYEDSIVLQSVFKSARQKIAKEEESEDESNEEEEEEDEEESESEAKSVKVKIKLNKKDD

SEQ ID NO: 12525 - protein, 202 aa, Homo sapiens
MEEEVRLKKRKRRRNVDKDPAKEDVEKAKKRRGRPPAEKLSPNPPKLTKQMNAIIDTVINYKDSSGRQLSEVFIQLPSRKELPEYYELIRKPVDFKKIKERIRNHKYRSLGDLEKDVMLLCHNAQTFNLEGSQIYEDSIVLQSVFKSARQKIAKEEESEDESNEEEEEEDEEESESEAKSVKVKIKLNKKDDKGRDKGKGKK

SEQ ID NO: 12526 - protein, 236 aa, Homo sapiens
MEEEVRLKKRKRRRNVDKDPAKEDVEKAKKRRGRPPAEKLSPNPPKLTKQMNAIIDTVINYKDSSGRQLSEVFIQLPSRKELPEYYELIRKPVDFKKIKERIRNHKYRSLGDLEKDVMLLCHNAQTFNLEGSQIYEDSIVLQSVFKSARQKIAKEEESEDESNEEEEEEDEEESESEAKSVKVKIKLNKKDDKGRDKGKGKKRPNRGKAKPVVSDFDSDEEQDEREQSEGSGTDDE

SEQ ID NO: 12527 - protein, 260 aa, Homo sapiens
MIINISHVWCCGEMKAIEDGNLEEMEEEVRLKKRKRRRNVDKDPAKEDVEKAKKRRGRPPAEKLSPNPPKLTKQMNAIIDTVINYKDSSGRQLSEVFIQLPSRKELPEYYELIRKPVDFKKIKERIRNHKYRSLGDLEKDVMLLCHNAQTFNLEGSQIYEDSIVLQSVFKSARQKIAKEEESEDESNEEEEEEDEEESESEAKSVKVKIKLNKKDDKGRDKGKGKKRPNRGKAKPVVSDFDSDEEQDEREQSEGSGTDDE

SEQ ID NO: 12528 - protein, 62 aa, Homo sapiens
MKGTGMRPPHPGMGPPQSPMDQHSQGYMSPHPSPLGAPEHVSSPMSGGGPTPPQMPPSQPGA

SEQ ID NO: 12529 - protein, 244 aa, Homo sapiens
MKRLAARCFAGLLILSPLTVISDSRPADSGKAIEDGNLEEMEEEVRLKKRKRRRNVDKDPAKEDVEKAKKRRGRPPAEKLSPNPPKLTKQMNAIIDTVINYKDRCNVEKVPSNSQLEIEGNSSGRQLSEVFIQLPSRKELPEYYELIRKPVDFKKIKERIRNHKYRSLGDLEKDVMLLCHNAQTFNLEGSQIYEDSIVLQSVFKSARQKIAKEEESEDESNEEEEEEDEEESESEAKSVKVKIK

SEQ ID NO: 12530 - protein, 245 aa, Homo sapiens
MKRLAARCFAGLLILSPLTVISDSRPADSGKAIEDGNLEEMEEEVRLKKRKRRRNVDKDPAKEDVEKAKKRRGRPPAEKLSPNPPKLTKQMNAIIDTVINYKDRCNVEKVPSNSQLEIEGNSSGRQLSEVFIQLPSRKELPEYYELIRKPVDFKKIKERIRNHKYRSLGDLEKDVMLLCHNAQTFNLEGSQIYEDSIVLQSVFKSARQKIAKEEESEDESNEEEEEEDEEESESEAKSVKVKIKL

SEQ ID NO: 12531 - protein, 200 aa, Homo sapiens
MKRLAARCFAGLLILSPLTVISDSRPADSGKAIEDGNLEEMEEEVRLKKRKRRRNVDKDPAKEDVEKAKKRRGRPPAEKLSPNPPKLTKQMNAIIDTVINYKDSSGRQLSEVFIQLPSRKELPEYYELIRKPVDFKKIKERIRNHKYRSLGDLEKDVMLLCHNAQTFNLEGSQIYEDSIVLQSVFKSARQKIAKEEESED

SEQ ID NO: 12532 - protein, 228 aa, Homo sapiens
MKRLAARCFAGLLILSPLTVISDSRPADSGKAIEDGNLEEMEEEVRLKKRKRRRNVDKDPAKEDVEKAKKRRGRPPAEKLSPNPPKLTKQMNAIIDTVINYKDSSGRQLSEVFIQLPSRKELPEYYELIRKPVDFKKIKERIRNHKYRSLGDLEKDVMLLCHNAQTFNLEGSQIYEDSIVLQSVFKSARQKIAKEEESEDESNEEEEEEDEEESESEAKSVKVKIKLN

SEQ ID NO: 12533 - protein, 229 aa, Homo sapiens
MKRLAARCFAGLLILSPLTVISDSRPADSGKAIEDGNLEEMEEEVRLKKRKRRRNVDKDPAKEDVEKAKKRRGRPPAEKLSPNPPKLTKQMNAIIDTVINYKDSSGRQLSEVFIQLPSRKELPEYYELIRKPVDFKKIKERIRNHKYRSLGDLEKDVMLLCHNAQTFNLEGSQIYEDSIVLQSVFKSARQKIAKEEESEDESNEEEEEEDEEESESEAKSVKVKIKLNK

SEQ ID NO: 12534 - protein, 276 aa, Homo sapiens
MKRLAARCFAGLLILSPLTVISDSRPADSGKAIEDGNLEEMEEEVRLKKRKRRRNVDKDPAKEDVEKAKKRRGRPPAEKLSPNPPKLTKQMNAIIDTVINYKDSSGRQLSEVFIQLPSRKELPEYYELIRKPVDFKKIKERIRNHKYRSLGDLEKDVMLLCHNAQTFNLEGSQIYEDSIVLQSVFKSARQKIAKEEESEDESNEEEEEEDEEESESEAKSVKVKIKLNKKDDKGRDKGKGKKRPNRGKAKPVVSDFDSDEEQDEREQSEGSGTDDE

SEQ ID NO: 12535 - protein, 276 aa, Homo sapiens; identical to SEQ ID NO: 12534

SEQ ID NO: 12536 - protein, 98 aa, Homo sapiens
MKRLAARCFAGLLILSPLTVISDSRPADSGKCCWLWFKASVCRPSKTAIWRKWKRKYGLRSEKDEEMWIKILQKKMWKKLRREEAALPLRNCHQIPPN

SEQ ID NO: 12537 - protein, 98 aa, Homo sapiens; identical to SEQ ID NO: 12536

SEQ ID NO: 12538 - protein, 98 aa, Homo sapiens; identical to SEQ ID NO: 12536

SEQ ID NO: 12539 - protein, 232 aa, Homo sapiens [sequence omitted]

SEQ ID NO: 12540 - protein, 278 aa, Homo sapiens
MLMKRLAARCFAGLLILSPLTVISDSRPADSGKAIEDGNLEEMEEEVRLKKRKRRRNVDKDPAKEDVEKAKKRRGRPPAEKLSPNPPKLTKQMNAIIDTVINYKDSSGRQLSEVFIQLPSRKELPEYYELIRKPVDFKKIKERIRNHKYRSLGDLEKDVMLLCHNAQTFNLEGSQIYEDSIVLQSVFKSARQKIAKEEESEDESNEEEEEEDEEESESEAKSVKVKIKLNKKDDKGRDKGKGKKRPNRGKAKPVVSDFDSDEEQDEREQSEGSGTDDE

SEQ ID NO: 12541 - protein, 5 aa, Homo sapiens
MSTPT

SEQ ID NO: 12542 - protein, 7 aa, Homo sapiens
MSTPTDP

SEQ ID NO: 12543 - protein, 9 aa, Homo sapiens
MSTPTDPGA

SEQ ID NO: 12544 - protein, 193 aa, Homo sapiens
MSTPTDPGAMPHPGPSPGPGPSPGPILGPSPGPGPSPGSVHSMMGPSPGPPSVSHPMPTMGSTDFPQEGMHQMHKPIDGIHDKGIVEDIHCGSMKGTGMRPPHPGMGPPQSPMDQHSQGYMSPHPSPLGAPEHVSSPMSGGGPTPPQMPPSQPGALIPGDPQAMSQPNRGPSPFSPVQLHQLRAQILAYKMLA

SEQ ID NO: 12545 - protein, 215 aa, Homo sapiens
MSTPTDPGAMPHPGPSPGPGPSPGPILGPSPGPGPSPGSVHSMMGPSPGPPSVSHPMPTMGSTDFPQEGMHQMHKPIDGIHDKGIVEDIHCGSMKGTGMRPPHPGMGPPQSPMDQHSQGYMSPHPSPLGAPEHVSSPMSGGGPTPPQMPPSQPGALIPGDPQAMSQPNRGPSPFSPVQLHQLRAQILAYKMLARGQPLPETLQLAVQGKRTLPGL

SEQ ID NO: 12546 - protein, 1590 aa, Homo sapiens
MSTPTDPGAMPHPGPSPGPGPSPGPILGPSPGPGPSPGSVHSMMGPSPGPPSVSHPMPTMGSTDFPQEGMHQMHKPIDGIHDKGIVEDIHCGSMKGTGMRPPHPGMGPPQSPMDQHSQGYMSPHPSPLGAPEHVSSPMSGGGPTPPQMPPSQPGALIPGDPQAMSQPNRGPSPFSPVQLHQLRAQILAYKMLARGQPLPETLQLAVQGKRTLPGLQQQQQQQQQQQQQQQQQQQQQQQPQQQPPQPQTQQQQQPALVNYNRPSGPGPELSGPSTPQKLPVPAPGGRPSPAPPAAAQPPAAAVPGPSVPQPAPGQPSPVLQLQQKQSRISPIQKPQGLDPVEILQEREYRLQARIAHRIQELENLPGSLPPDLRTKATVELKALRLLNFQRQLRQEVVACMRRDTTLETALNSKAYKRSKRQTLREARMTEKLEKQQKIEQERKRRQKHQEYLNSILQHAKDFKEYHRSVAGKIQKLSKAVATWHANTEREQKKETERIEKERMRRLMAEDEEGYRKLIDQKKDRRLAYLLQQTDEYVANLTNLVWEHKQAQAAKEKKKRRRRKKKAEENAEGGESALGPDGEPIDESSQMSDLPVKVTHTETGKVLFGPEAPKASQLDAWLEMNPGYEVAPRSDSEESDSDYEEEDEEEESSRQETEEKILLDPNSEEVSEKDAKQIIETAKQDVDDEYSMQYSARGSQSYYTVAHAISERVEKQSALLINGTLKHYQLQGLEWMVSLYNNNLNGILADEMGLGKTIQTIALITYLMEHKRLNGPYLIIVPLSTLSNWTYEFDKWAPSVVKISYKGTPAMRRSLVPQLRSGKFNVLLTTYEYIIKDKHILAKIRWKYMIVDEGHRMKNHHCKLTQVLNTHYVAPRRILLTGTPLQNKLPELWALLNFLLPTIFKSCSTFEQWFNAPFAMTGERVDLNEEETILIIRRLHKVLRPFLLRRLKKEVESQLPEKVEYVIKCDMSALQKILYRHMQAKGILLTDGSEKDKKGKGGAKTLMNTIMQLRKICNHPYMFQHIEESFAEHLGYSNGVINGAELYRASGKFELLDRILPKLRATNHRVLLFCQMTSLMTIMEDYFAFRNFLYLRLDGTTKSEDRAALLKKFNEPGSQYFIFLLSTRAGGLGLNLQAADTVVIFDSDWNPHQDLQAQDRAHRIGQQNEVRVLRLCTVNSVEEKILAAAKYKLNVDQKVIQAGMFDQKSSSHERRAFLQAILEHEEENEEEDEVPDDETLNQMIARREEEFDLFMRMDMDRRREDARNPKRKPRLMEEDELPSWIIKDDAEVERLTCEEEEEKIFGRGSRQRRDVDYSDALTEKQWLRAIEDGNLEEMEEEVRLKKRKRRRNVDKDPAKEDVEKAKKRRGRPPAEKLSPNPPKLTKQMNAIIDTVINYKDRCNVEKVPSNSQLEIEGNSSGRQLSEVFIQLPSRKELPEYYELIRKPVDFKKIKERIRNHKYRSLGDLEKDVMLLCHNAQTFNLEGSQIYEDSIVLQSVFKSARQKIAKEEESEDESNEEEEEEDEEESESEAKSVKVKIKLNKKDDKGRDKGKGKKRPNRGKAKPVVSDFDSDEEQDEREQSEGSGTDDE

SEQ ID NO: 12547 - protein, 1572 aa, Homo sapiens
MSTPTDPGAMPHPGPSPGPGPSPGPILGPSPGPGPSPGSVHSMMGPSPGPPSVSHPMPTMGSTDFPQEGMHQMHKPIDGIHDKGIVEDIHCGSMKGTGMRPPHPGMGPPQSPMDQHSQGYMSPHPSPLGAPEHVSSPMSGGGPTPPQMPPSQPGALIPGDPQAMSQPNRGPSPFSPVQLHQLRAQILAYKMLARGQPLPETLQLAVQGKRTLPGLQQQQQQQQQQQQQQQQQQQQQQQPQQQPPQPQTQQQQQPALVNYNRPSGPGPELSGPSTPQKLPVPAPGGRPSPAPPAAAQPPAAAVPGPSVPQPAPGQPSPVLQLQQKQSRISPIQKPQGLDPVEILQEREYRLQARIAHRIQELENLPGSLPPDLRTKATVELKALRLLNFQRQLRQEVVACMRRDTTLETALNSKAYKRSKRQTLREARMTEKLEKQQKIEQERKRRQKHQEYLNSILQHAKDFKEYHRSVAGKIQKLSKAVATWHANTEREQKKETERIEKERMRRLMAEDEEGYRKLIDQKKDRRLAYLLQQTDEYVANLTNLVWEHKQAQAAKEKKKRRRRKKKAEENAEGGESALGPDGEPIDESSQMSDLPVKVTHTETGKVLFGPEAPKASQLDAWLEMNPGYEVAPRSDSEESDSDYEEEDEEEESSRQETEEKILLDPNSEEVSEKDAKQIIETAKQDVDDEYSMQYSARGSQSYYTVAHAISERVEKQSALLINGTLKHYQLQGLEWMVSLYNNNLNGILADEMGLGKTIQTIALITYLMEHKRLNGPYLIIVPLSTLSNWTYEFDKWAPSVVKISYKGTPAMRRSLVPQLRSGKFNVLLTTYEYIIKDKHILAKIRWKYMIVDEGHRMKNHHCKLTQVLNTHYVAPRRILLTGTPLQNKLPELWALLNFLLPTIFKSCSTFEQWFNAPFAMTGERVDLNEEETILIIRRLHKVLRPFLLRRLKKEVESQLPEKVEYVIKCDMSALQKILYRHMQAKGILLTDGSEKDKKGKGGAKTLMNTIMQLRKICNHPYMFQHIEESFAEHLGYSNGVINGAELYRASGKFELLDRILPKLRATNHRVLLFCQMTSLMTIMEDYFAFRNFLYLRLDGTTKSEDRAALLKKFNEPGSQYFIFLLSTRAGGLGLNLQAADTVVIFDSDWNPHQDLQAQDRAHRIGQQNEVRVLRLCTVNSVEEKILAAAKYKLNVDQKVIQAGMFDQKSSSHERRAFLQAILEHEEENEEEDEVPDDETLNQMIARREEEFDLFMRMDMDRRREDARNPKRKPRLMEEDELPSWIIKDDAEVERLTCEEEEEKIFGRGSRQRRDVDYSDALTEKQWLRAIEDGNLEEMEEEVRLKKRKRRRNVDKDPAKEDVEKAKKRRGRPPAEKLSPNPPKLTKQMNAIIDTVINYKDSSGRQLSEVFIQLPSRKELPEYYELIRKPVDFKKIKERIRNHKYRSLGDLEKDVMLLCHNAQTFNLEGSQIYEDSIVLQSVFKSARQKIAKEEESEDESNEEEEEEDEEESESEAKSVKVKIKLNKKDDKGRDKGKGKKRPNRGKAKPVVSDFDSDEEQDEREQSEGSGTDDE

SEQ ID NO: 12548 - protein, 1590 aa, Homo sapiens; identical to SEQ ID NO: 12546

SEQ ID NO: 12549 - protein, 1514 aa, Homo sapiens
MSTPTDPGAMPHPGPSPGPGPSPGPILGPSPGPGPSPGSVHSMMGPSPGPPSVSHPMPTMGSTDFPQEGMHQMHKPIDGIHDKGIVEDIHCGSMKGTGMRPPHPGMGPPQSPMDQHSQGYMSPHPSPLGAPEHVSSPMSGGGPTPPQMPPSQPGALIPGDPQAMSQPNRGPSPFSPVQLHQLRAQILAYKMLARGQPLPETLQLAVQGKRTLPGLQQQQQQQQQQQQQQQQQQQQQQQPQQQPPQPQTQQQQQPALVNYNRPSGPGPELSGPSTPQKLPVPAPGGRPSPAPPAAAQPPAAAVPGPSVPQPAPGQPSPVLQLQQKQSRISPIQKPQGLDPVEILQEREYRLQARIAHRIQELENLPGSLPPDLRTKATVELKALRLLNFQRQLRQEVVACMRRDTTLETALNSKAYKRSKRQTLREARMTEKLEKQQKIEQERKRRQKHQEYLNSILQHAKDFKEYHRSVAGKIQKLSKAVATWHANTEREQKKETERIEKERMRRLMAEDEEGYRKLIDQKKDRRLAYLLQQTDEYVANLTNLVWEHKQAQAAKEKKKRRRRKKKAEENAEGGESALGPDGEPIDESSQMSDLPVKVTHTETGKVLFGPEAPKASQLDAWLEMNPGYEVAPRSDSEESDSDYEEEDEEEESSRQETEEKILLDPNSEEVSEKDAKQIIETAKQDVDDEYSMQYSARGSQSYYTVAHAISERVEKQSALLINGTLKHYQLQGLEWMVSLYNNNLNGILADEMGLGKTIQTIALITYLMEHKRLNGPYLIIVPLSTLSNWTYEFDKWAPSVVKISYKGTPAMRRSLVPQLRSGKFNVLLTTYEYIIKDKHILAKIRWKYMIVDEGHRMKNHHCKLTQVDLNEEETILIIRRLHKVLRPFLLRRLKKEVESQLPEKVEYVIKCDMSALQKILYRHMQAKGILLTDGSEKDKKGKGGAKTLMNTIMQLRKICNHPYMFQHIEESFAEHLGYSNGVINGAELYRASGKFELLDRILPKLRATNHRVLLFCQMTSLMTIMEDYFAFRNFLYLRLDGTTKSEDRAALLKKFNEPGSQYFIFLLSTRAGGLGLNLQAADTVVIFDSDWNPHQDLQAQDRAHRIGQQNEVRVLRLCTVNSVEEKILAAAKYKLNVDQKVIQAGMFDQKSSSHERRAFLQAILEHEEENEEEDEVPDDETLNQMIARREEEFDLFMRMDMDRRREDARNPKRKPRLMEEDELPSWIIKDDAEVERLTCEEEEEKIFGRGSRQRRDVDYSDALTEKQWLRAIEDGNLEEMEEEVRLKKRKRRRNVDKDPAKEDVEKAKKRRGRPPAEKLSPNPPKLTKQMNAIIDTVINYKDSSGRQLSEVFIQLPSRKELPEYYELIRKPVDFKKIKERIRNHKYRSLGDLEKDVMLLCHNAQTFNLEGSQIYEDSIVLQSVFKSARQKIAKEEESEDESNEEEEEEDEEESESEAKSVKVKIKLNKKDDKGRDKGKGKKRPNRGKAKPVVSDFDSDEEQDEREQSEGSGTDDE

SEQ ID NO: 12550 - protein, 1572 aa, Homo sapiens; identical to SEQ ID NO: 12547

SEQ ID NO: 12551 - protein, 1428 aa, Homo sapiens
MSTPTDPGAMPHPGPSPGPGPSPGPILGPSPGPGPSPGSVHSMMGPSPGPPSVSHPMPTMGSTDFPQEGMHQMHKPIDGIHDKGIVEDIHCGSMKGTGMRPPHPGMGPPQSPMDQHSQGYMSPHPSPLGAPEHVSSPMSGGGPTPPQMPPSQPGALIPGDPQAMSQPNRGPSPFSPVQLHQLRAQILAYKMLARGQPLPETLQLAVQGKRTLPGLQQQQQQQQQQQQQQQQQQQQQQQPQQQPPQPQTQQQQQPALVNYNRPSGPGPELSGPSTPQKLPVPAPGGRPSPAPPAAAQPPAAAVPGPSVPQPAPGQPSPVLQLQQKQSRISPIQKPQGLDPVEILQEREYRLQARIAHRIQELENLPGSLPPDLRTKATVELKALRLLNFQRQLRQEVVACMRRDTTLETALNSKAYKRSKRQTLREARMTEKLEKQQKIEQERKRRQKHQEYLNSILQHAKDFKEYHRSVAGKIQKLSKAVATWHANTEREQKKETERIEKERMRRLMAEDEEGYRKLIDQKKDRRLAYLLQQTDEYVANLTNLVWEHKQAQAAKEKKKRRRRKKKAEENAEGGESALGPDGEPIDESSQMSDLPVKVTHTETGKVLFGPEAPKASQLDAWLEMNPGYEVAPRSDSEESDSDYEEEDEEEESSRQETEEKILLDPNSEEVSEKDAKQIIETAKQDVDDEYSMQYSARGSQSYYTVAHAISERVEKQSALLINGTLKHYQLQGLEWMVSLYNNNLNGILADEMGLGKTIQTIALITYLMEHKRLNGPYLIIVPLSTLSNWTYEFDKWAPSVVKISYKGTPAMRRSLVPQLRSGKFNVLLTTYEYIIKDKHILAKIRWKYMIVDEGHRMKNHHCKLTQVLNTHYVAPRRILLTGTPLQNKLPELWALLNFLLPTIFKSCSTFEQWFNAPFAMTGERVDLNEEETILIIRRLHKVLRPFLLRRLKKEVESQLPEKVEYVIKCDMSALQKILYRHMQAKGILLTDGSEKDKKGKGGAKTLMNTIMQLRKICNHPYMFQHIEESFAEHLGYSNGVINGAELYRASGKFELLDRILPKLRATNHRVLLFCQMTSLMTIMEDYFAFRNFLYLRLDGTTKSEDRAALLKKFNEPGSQYFIFLLSTRAGGLGLNLQAADTVVIFDSDWNPHQDLQAQDRAHRIGQQNEVRVLRLCTVNSVEEKILAAAKYKLNVDQKVIQAGMFDQKSSSHERRAFLQAILEHEEENEEEDEVPDDETLNQMIARREEEFDLFMRMDMDRRREDARNPKRKPRLMEEDELPSWIIKDDAEVERLTCEEEEEKIFGRGSRQRRDVDYSDALTEKQWLRAIEDGNLEEMEEEVRLKKRKRRRNVDKDPAKEDVEKAKKRRGRPPAEKLSPNPPKLTKQMNAIIDTVINYKDRCNVEKVPSNSQLEIEGNRKGFVIISTGA

SEQ ID NO: 12552 - protein, 279 aa, Homo sapiens
MSTPTDPGAMPHPGPSPGPGPSPGPILGPSPGPGPSPGSVHSMMGPSPGPPSVSHPMPTMGSTDFPQEGMHQMHKPIDGIHDKGIVEDIHCGSMKGTGMRPPHPGMGPPQSPMDQHSQGYMSPHPSPLGAPEHVSSPMSGGGPTPPQMPPSQPGALIPGDPQAMSQPNRGPSPFSPVQLHQLRAQILAYKMLARGQPLPETLQLAVQGKRTLPGLQQQQQQQQQQQQQQQQQQQQQQQPQQQPPQPQTQQQQQPALVNYNRPSGRLIRNQMNNAMVQLG

SEQ ID NO: 12553 - protein, 288 aa, Homo sapiens
MSTPTDPGAMPHPGPSPGPGPSPGPILGPSPGPGPSPGSVHSMMGPSPGPPSVSHPMPTMGSTDFPQEGMHQMHKPIDGIHDKGIVEDIHCGSMKGTGMRPPHPGMGPPQSPMDQHSQGYMSPHPSPLGAPEHVSSPMSGGGPTPPQMPPSQPGALIPGDPQAMSQPNRGPSPFSPVQLHQLRAQILAYKMLARGQPLPETLQLAVQGKRTLPGLQQQQQQQQQQQQQQQQQQQQQQQPQQQPPQPQTQQQQQPALVNYNRPSALNAGNSNLKTPADSVSGEGLLPDS

SEQ ID NO: 12554 - protein, 279 aa, Homo sapiens; identical to SEQ ID NO: 12552

SEQ ID NO: 12555 - protein, 288 aa, Homo sapiens; identical to SEQ ID NO: 12553

SEQ ID NO: 12556 - protein, 183 aa, Homo sapiens [sequence omitted]

SEQ ID NO: 12557 - protein, 248 aa, Homo sapiens
MWLAIEDGNLEEMEEEVRLKKRKRRRNVDKDPAKEDVEKAKKRRGRPPAEKLSPNPPKLTKQMNAIIDTVINYKDSSGRQLSEVFIQLPSRKELPEYYELIRKPVDFKKIKERIRNHKYRSLGDLEKDVMLLCHNAQTFNLEGSQIYEDSIVLQSVFKSARQKIAKEEESEDESNEEEEEEDEEESESEAKSVKVKIKLNKKDDKGRDKGKGKKRPNRGKAKPVVSDFDSDEEQDEREQSEGSGTDDE

SEQ ID NO: 12558 - protein, 271 aa, Homo sapiens
  SITE 1: note = misc_feature - Xaa can be any naturally occurring amino acid
XEEEKIFGRGSRQRRDVDYSDALTEKQWLRAIEDGNLEEMEEEVRLKKRKRRRNVDKDPAKEDVEKAKKRRGRPPAEKLSPNPPKLTKQMNAIIDTVINYKDSSGRQLSEVFIQLPSRKELPEYYELIRKPVDFKKIKERIRNHKYRSLGDLEKDVMLLCHNAQTFNLEGSQIYEDSIVLQSVFKSARQKIAKEEESEDESNEEEEEEDEEESESEAKSVKVKIKLNKKDDKGRDKGKGKKRPNRGKAKPVVSDFDSDEEQDERVSVADWD

SEQ ID NO: 12559 - protein, 270 aa, Homo sapiens
  SITE 1: note = misc_feature - Xaa can be any naturally occurring amino acid
XLNLQAADTVVIFDSDWNPHQEEDEVPDDETLNQMIARREEEFDLFMRMDMDRRREDARNPKRKPRLMEEDELPSWIIKDDAEVERLTCEEEEEKIFGRGSRQRRDVDYSDALTEKQWLRAIEDGNLEEMEEEVRLKKRKRRRNVDKDPAKEDVEKAKKRRGRPPAEKLSPNPPKLTKQMNAIIDTVINYKDSSGRQLSEVFIQLPSRKELPEYYELIRKPVDFKKIKERIRNHKYRSLGDLEKDVMLLCHNAQTFNLEGSQIYEDSIVL

SEQ ID NO: 12560 - protein, 228 aa, Homo sapiens
  SITE 1: note = misc_feature - Xaa can be any naturally occurring amino acid
XNSEEVSEKDAKQIIETAKQDVDDEYSMQYSARGSQSYYTVAHAISERVEKQSALLINGTLKHYQLQGLEWMVSLYNNNLNGILADEMGLGKTIQTIALITYLMEHKRLNGPYLIIVPLSTLSNWTYEFDKWAPSVVKISYKGTPAMRRSLVPQLRSGKFNVLLTTYEYIIKDKHILAKVDLNEEETILIIRRLHKVLRPFLLRRLKKEVESQLPEKVEYVIKCDMSA

SEQ ID NO: 12561 - protein, 58 aa, Homo sapiens
  SITE 1: note = misc_feature - Xaa can be any naturally occurring amino acid
XPFPSSLFFPDQLMKRLAARCFAGLLILSPLTVISDSRPADSGHRRRQFGGNGRGSTA

SEQ ID NO: 12562 - protein, 38 aa, Homo sapiens
  SITE 1: note = misc_feature - Xaa can be any naturally occurring amino acid
XSGRQLSEVFIQLPSRKELPEYYELIRKPVDFKKIKDS

SEQ ID NO: 12563 - protein, 1419 aa, Homo sapiens
MAEGLERVRISASELRGILATLAPQAGSRENMKELKEARPRKDNRRPDLEIYKPGLSRLRNKPKIKEPPGSEEFKDEIVNDRDCSAVENGTQPVKDVCKELNNQEQNGPIDPENNRGQESFPRTAGQEDRSLKIIKRTKKPDLQIYQPGRRLQTVSKESASRVEEEEVLNQVEQLRVEEDECRGNVAKEEVANKPDRAEIEKSPGGGRVGAAKGEKGKRMGKGEGVRETHDDPARGRPGSAKRYSRSDKRRNRYRTRSTSSAGSNNSAEGAGLTDNGCRRRRQDRTKERPRLKKQVSVSSTDSLDEDRIDEPDGLGPRRSSERKRHLERNWSGRGEGEQKNSAKEYRGTLRVTFDAEAMNKESPMVRSARDDMDRGKPDKGLSSGGKGSEKQESKNPKQELRGRGRGILILPAHTTLSVNSAGSPESAPLGPRLLFGSGSKGSRSWGRGGTTRRLWDPNNPDQKPALKTQTPQLHFLDTDDEVSPTSWGDSRQAQASYYKFQNSDNPYYYPRTPGPASQYPYTGYNPLQYPVGPTNGVYPGPYYPGYPTPSGQYVCSPLPTSTMSPEEVEQHMRNLQQQELHRLLRVADNQELQLSNLLSRDRISPEGLEKMAQLRAELLQLYERCILLDIEFSDNQNVDQILWKNAFYQVIEKFRQLVKDPNVENPEQIRNRLLELLDEGSDFFDSLLQKLQVTYKFKLEDYMDGLAIRSKPLRKTVKYALISAQRCMICQGDIARYREQASDTANYGKARSWYLKAQHIAPKNGRPYNQLALLAVYTRRKLDAVYYYMRSLAASNPILTAKESLMSLFEETKRKAEQMEKKQHEEFDLSPDQWRKGKKSTFRHVGDDTTRLEIWIHPSHPRSSQGTESGKDSEQENGLGSLSPSDLNKRFILSFLHAHGKLFTRIGMETFPAVAEKVLKEFQVLLQHSPSPIGSTRMLQLMTINMFAVHNSQLKDCFSEECRSVIQEQAAALGLAMFSLLVRRCTCLLKESAKAQLSSPEDQDDQDDIKVSSFVPDLKELLPSVKVWSDWMLGYPDTWNPPPTSLDLPSHVAVDVWSTLADFCNILTAVNQSEVPLYKDPDDDLTLLILEEDRLLSGFVPLLAAPQDPCYVEKTSDKVIAADCKRVTVLKYFLEALCGQEEPLLAFKGGKYVSVAPVPDTMGKEMGSQEGTRLEDEEEDVVIEDFEEDSEAEGSGGEDDIRELRAKKLALARKIAEQQRRQEKIQAVLEDHSQMRQMELEIRPLFLVPDTNGFIDHLASLARLLESRKYILVVPLIVINELDGLAKGQETDHRAGGYARVVQEKARKSIEFLEQRFESRDSCLRALTSRGNELESIAFRSEDITGQLGNNDDLILSCCLHYCKDKAKDFMPASKEEPIRLLREVVLLTDDRNLRVKALTRNVPVRDIPAFLTWAQVG

SEQ ID NO: 12564 - protein, 119 aa, Homo sapiens
METFPAVAEKVLKEFQVLLQHSPSPIGSTRMLQLMTINMFAVHNSQLKDCFSEECRSVIQEQAAALGLAMFSLLVRRCTCLLKESAKAQLSSPEDQDDQDDIKVSSFVPDLKELLPSVK

SEQ ID NO: 12565 - protein, 123 aa, Homo sapiens
METFPAVAEKVLKEFQVLLQHSPSPIGSTRMLQLMTINMFAVHNSQLKDCFSEECRSVIQEQAAALGLAMFSLLVRRCTCLLKESAKAQLSSPEDQDDQDDIKVSSFVPDLKELLPSVKVWSD

SEQ ID NO: 12566 - protein, 162 aa, Homo sapiens
METFPAVAEKVLKEFQVLLQHSPSPIGSTRMLQLMTINMFAVHNSQLKDCFSEECRSVIQEQAAALGLAMFSLLVRRCTCLLKESAKAQLSSPEDQDDQDDIKVSSFVPDLKELLPSVKVWSDWMLGYPDTWNPPPTSLDLPSHVAVDVWSTLADFCNILTA

SEQ ID NO: 12567 - protein, 163 aa, Homo sapiens
METFPAVAEKVLKEFQVLLQHSPSPIGSTRMLQLMTINMFAVHNSQLKDCFSEECRSVIQEQAAALGLAMFSLLVRRCTCLLKESAKAQLSSPEDQDDQDDIKVSSFVPDLKELLPSVKVWSDWMLGYPDTWNPPPTSLDLPSHVAVDVWSTLADFCNILTAV

SEQ ID NO: 12568 - protein, 164 aa, Homo sapiens
METFPAVAEKVLKEFQVLLQHSPSPIGSTRMLQLMTINMFAVHNSQLKDCFSEECRSVIQEQAAALGLAMFSLLVRRCTCLLKESAKAQLSSPEDQDDQDDIKVSSFVPDLKELLPSVKVWSDWMLGYPDTWNPPPTSLDLPSHVAVDVWSTLADFCNILTAVN

SEQ ID NO: 12569 - protein, 511 aa, Homo sapiens
METFPAVAEKVLKEFQVLLQHSPSPIGSTRMLQLMTINMFAVHNSQLKDCFSEECRSVIQEQAAALGLAMFSLLVRRCTCLLKESAKAQLSSPEDQDDQDDIKVSSFVPDLKELLPSVKVWSDWMLGYPDTWNPPPTSLDLPSHVAVDVWSTLADFCNILTAVNQSEVPLYKDPDDDLTLLILEEDRLLSGFVPLLAAPQDPCYVEKTSDKVIAADCKRVTVLKYFLEALCGQEEPLLAFKGGKYVSVAPVPDTMGKEMGSQEGTRLEDEEEDVVIEDFEEDSEAEGSGGEDDIRELRAKKLALARKIAEQQRRQEKIQAVLEDHSQMRQMELEIRPLFLVPDTNGFIDHLASLARLLESRKYILVVPLIVINELDGLAKGQETDHRAGGYARVVQEKARKSIEFLEQRFESRDSCLRALTSRGNELESIAFRSEDITGQLGNNDDLILSCCLHYCKDKAKDFMPASKEEPIRLLREVVLLTDDRNLRVKALTRNVPVRDIPAFLTWAQVG

SEQ ID NO: 12570 - protein, 511 aa, Homo sapiens; identical to SEQ ID NO: 12569

SEQ ID NO: 12571 - protein, 115 aa, Homo sapiens
MFSLLVRRCTCLLKESAKAQLSSPEDQDDQDDIKVSSFVPDLKELLPSVKVWSDWMLGYPDTWNPPPTSLDLPSHVAVDVWSTLADFCNILTAVNQSEVPLYKDPDDDLTLLILE

SEQ ID NO: 12572 - protein, 124 aa, Homo sapiens
MFSLLVRRCTCLLKESAKAQLSSPEDQDDQDDIKVSSFVPDLKELLPSVKVWSDWMLGYPDTWNPPPTSLDLPSHVAVDVWSTLADFCNILTAVNQSEVPLYKDPDDDLTLLILEEDRLLSGFV

SEQ ID NO: 12573 - protein, 139 aa, Homo sapiens
MFSLLVRRCTCLLKESAKAQLSSPEDQDDQDDIKVSSFVPDLKELLPSVKVWSDWMLGYPDTWNPPPTSLDLPSHVAVDVWSTLADFCNILTAVNQSEVPLYKDPDDDLTLLILEEDRLLSGFVPLLAAPQDPCYVEKT

SEQ ID NO: 12574 - protein, 208 aa, Homo sapiens
MTGPCIRQLSLQILFPLCVAVDVWSTLADFCNILTAVNQSEVPLYKDPDDDLTLLILEEDRLLSGFVPLLAAPQDPCYVEKTSDKVIAADCKRVTVLKYFLEALCGQEEPLLAFKGGKYVSVAPVPDTMGKEMGSQEGTRLEDEEEDVVIEDFEEDSEAEGSGGEDDIRELRAKKLALARKIAEQQRRQEKIQAVLEDHSQMRQMELE

SEQ ID NO: 12575 - protein, 49 aa, Homo sapiens
MIGDILLFGTLLMNAGAVLNFKLKKKDTQGFGEESREPSTGCSALESQR

SEQ ID NO: 12576 - protein, 49 aa, Homo sapiens; identical to SEQ ID NO: 12575

SEQ ID NO: 12577 - protein, 49 aa, Homo sapiens; identical to SEQ ID NO: 12575

SEQ ID NO: 12578 - protein, 49 aa, Homo sapiens; identical to SEQ ID NO: 12575

SEQ ID NO: 12579 - protein, 75 aa, Homo sapiens
MIGDILLFGTLLMNAGAVLNFKLKKKDTQGFGEESREPSTGDNIREFLLSLRYFRIFIALWNIFMMFCMIVLFGS

SEQ ID NO: 12580 - protein, 75 aa, Homo sapiens; identical to SEQ ID NO: 12579

SEQ ID NO: 12581 - protein, 75 aa, Homo sapiens; identical to SEQ ID NO: 12579

SEQ ID NO: 12582 - protein, 75 aa, Homo sapiens; identical to SEQ ID NO: 12579

SEQ ID NO: 12583 - protein, 75 aa, Homo sapiens; identical to SEQ ID NO: 12579

SEQ ID NO: 12584 - protein, 75 aa, Homo sapiens; identical to SEQ ID NO: 12579

SEQ ID NO: 12585 - protein, 103 aa, Homo sapiens
MIGDILLFGTLLMNAGAVLNFKLKKKDTQGFGEESREPSTGDNIREFLLSLRYFRIFIALWNIFMMFCMIVLRKLKQIAFPSSTGAITLILLLTNCEICCKWI

SEQ ID NO: 12586 - protein, 103 aa, Homo sapiens; identical to SEQ ID NO: 12585

SEQ ID NO: 12587 - protein, 103 aa, Homo sapiens; identical to SEQ ID NO: 12585

SEQ ID NO: 12588 - protein, 47 aa, Homo sapiens
MIGDILLFGTLLMNAGAVLNFKLKKKDTQGFGEESREPSTGLERESD

SEQ ID NO: 12589 - protein, 56 aa, Homo sapiens
MIGDILLFGTLLMNAGAVLNFKLKKKDTQGFGEESREPSTGWSAVVRSWLTADSTS

SEQ ID NO: 12590 - protein, 63 aa, Homo sapiens
MNAGAVLNFKLKKKDTQGFGEESREPSTGDNIREFLLSLRYFRIFIALWNIFMMFCMIVLFGS

SEQ ID NO: 12591 - protein, 63 aa, Homo sapiens; identical to SEQ ID NO: 12590

SEQ ID NO: 12592 - protein, 435 aa, Homo sapiens
MLPARCARLLTPHLLLVLVQLSPARGHRTTGPRFLISDRDPQCNLHCSRTQPKPICASDGRSYESMCEYQRAKCRDPTLGVVHRGRCKDAGQSKCRLERAQALEQAKKPQEAVFVPECGEDGSFTQVQCHTYTGYCWCVTPDGKPISGSSVQNKTPVCSGSVTDKPLSQGNSGRKDDGSKPTPTMETQPVFDGDEITAPTLWIKHLVIKDSKLNNTNIRNSEKVYSCDQERQSALEEAQQNPREGIVIPECAPGGLYKPVQCHQSTGYCWCVLVDTGRPLPGTSTRYVMPSCESDARAKTTEADDPFKDRELPGCPEGKKMEFITSLLDALTTDMVQAINSAAPTGGGRFSEPDPSHTLEERVVHWYFSQLDSNSSNDINKREMKPFKRYVKKKAKPKKCARRFTDYCDLNKDKVISLPELKGCLGVSKEVGRLV

SEQ ID NO: 12593 - protein, 434 aa, Homo sapiens
MLPARCARLLTPHLLLVLVQLSPARGHRTTGPRFLISDRDPQCNLHCSRTQPKPICASDGRSYESMCEYQRAKCRDPTLGVVHRGRCKDAGQSKCRLERAQALEQAKKPQEAVFVPECGEDGSFTQVQCHTYTGYCWCVTPDGKPISGSSVQNKTPVCSGSVTDKPLSQGNSGRKDDGSKPTPTMETQPVFDGDEITAPTLWIKHLVIKDSKLNNTNIRNSEKVYSCDQERQSALEEAQQNPREGIVIPECAPGGLYKPVQCHQSTGYCWCVLVDTGRPLPGTSTRYVMPSCESDARAKTTEADDPFKDRELPGCPEGKKMEFITSLLDALTTDMVQAINSAAPTGGGRFSEPDPSHTLEERVVHWYFSQLDSNSSNDINKREMKPFKRYVKKKAKPKKCARRFTDYCDLNKDKVISLPELKGCLGVSKEGRLV

SEQ ID NO: 12594 - protein, 67 aa, Homo sapiens
GKKEIKPFKRFLRKKSKPKKCVKKFVEYCDVNNDKSISVQELMGCLGVAKEDGKADTKKRHRSKRNL

SEQ ID NO: 12595 - protein, 84 aa, Homo sapiens
KKSKPKKCVKKFVEYCDVNNDKSISVQELMGCLGVAKEDGKADTKKRHTPRGHAESTSNRQDAMVVSSRPKATTHRKSRTLSRR

SEQ ID NO: 12596 - protein, 446 aa, Homo sapiens
MLLPQLCWLPLLAGLLPPVPAQKFSALTFLRVDQDKDKDCSLDCAGSPQKPLCASDGRTFLSRCEFQRAKCKDPQLEIAYRGNCKDVSRCVAERKYTQEQARKEFQQVFIPECNDDGTYSQVQCHSYTGYCWCVTPNGRPISGTAVAHKTPRCPGSVNEKLPQREGTGKTDDAAAPALETQPQGDEEDIASRYPTLWTEQVKSRQNKTNKNSVSSCDQEHQSALEEAKQPKNDNVVIPECAHGGLYKPVQCHPSTGYCWCVLVDTGRPIPGTSTRYEQPKCDNTARAHPAKARDLYKGRQLQGCPGAKKHEFLTSVLDALSTDMVHAASDPSSSSGRLSEPDPSHTLEERVVHWYFKLLDKNSSGDIGKKEIKPFKRFLRKKSKPKKCVKKFVEYCDVNNDKSISVQELMGCLGVAKEDGKADTKKRHTPRGHAESTSNRQPRKQG

SEQ ID NO: 12597 - protein, 457 aa, Homo sapiens
MLLPQLCWLPLLAGLLPPVPAQKFSALTFLRVDQDKDKDCSLDCAGSPQKPLCASDGRTFLSRCEFQRAKCKDPQLEIAYRGNCKDVSRCVAERKYTQEQARKEFQQVFIPECNDDGTYSQVQCHSYTGYCWCVTPNGRPISGTAVAHKTPRCPGSVNEKLPQREGTGKTVSLQIFSVLNSDDAAAPALETQPQGDEEDIASRYPTLWTEQVKSRQNKTNKNSVSSCDQEHQSALEEAKQPKNDNVVIPECAHGGLYKPVQCHPSTGYCWCVLVDTGRPIPGTSTRYEQPKCDNTARAHPAKARDLYKGRQLQGCPGAKKHEFLTSVLDALSTDMVHAASDPSSSSGRLSEPDPSHTLEERVVHWYFKLLDKNSSGDIGKKEIKPFKRFLRKKSKPKKCVKKFVEYCDVNNDKSISVQELMGCLGVAKEDGKADTKKRHTPRGHAESTSNRQPRKQG

SEQ ID NO: 12598 - protein, 136 aa, Homo sapiens
MVGGCLGGSKSSHSAWEGPILPKCKSSRGVTELANRLVCLVFLLHVDIILLILLPGPPQGYRKVKSSPEPIMSSLLTEGTAGYVVPPGLVLAAGGGAGSPRFLSAFLNASRVRELANGKFIRVALAEKDRSGMPTQ

SEQ ID NO: 12599 - protein, 453 aa, Homo sapiens
MALVRALVCCLLTAWHCRSGLGLPVAPAGGRNPPPAIGQFWHVTDLHLDPTYHITDDHTKVCASSKGANASNPGPFGDVLCDSPYQLILSAFDFIKNSGQEASFMIWTGDSPPHVPVPELSTDTVINVITNMTTTIQSLFPNLQVFPALGNHDYWPQDQLPVVTSKVYNAVANLWKPWLDEEAISTLRKGGFYSQKVTTNPNLRIISLNTNLYYGPNIMTLNKTDPANQFEWLESTLNNSQQNKEKVYIIAHVPVGYLPSSQNITAMREYYNEKLIDIFQKYSDVIAGQFYGHTHRDSIMVLSDKKGSPVNSLFVAPAVTPVKSVLEKQTNNPGIRLFQYDPRDYKLLDMLQYYLNLTEANLKGESIWKLEYILTQTYDIEDLQPESLYGLAKQFTILDSKQFIKYYNYFFVSYDSSVTCDKTCKAFQICAIMNLDNISYADCLKQLYIKHNY

SEQ ID NO: 12600 - protein, 322 aa, Homo sapiens
MTTTIQSLFPNLQVFPALGNHDYWPQDQLPVVTSKVYNAVANLWKPWLDEEAISTLRKGGFYSQKVTTNPNLRIISLNTNLYYGPNIMTLNKTDPANQFEWLESTLNNSQQNKEKVYIIAHVPVGYLPSSQNITAMREYYNEKLIDIFQKYSDVIAGQFYGHTHRDSIMVLSDKKGSPVNSLFVAPAVTPVKSVLEKQTNNPGIRLFQYDPRDYKLLDMLQYYLNLTEANLKGESIWKLEYILTQTYDIEDLQPESLYGLAKQFTILDSKQFIKYYNYFFVSYDSSVTCDKTCKAFQICAIMNLDNISYADCLKQLYIKHNY

SEQ ID NO: 12601 - protein, 269 aa, Homo sapiens
MRLLAWLIFLANWGGARAEPEEAQGPCAQEKGKGPPPTSILASLAPGLEAGKFWHIADLHLDPDYKVSKDPFQVCPSAGSQPVPDAGPWGDYLCDSPWALINSSIYAMKEIEPEPDFILWTGDDTPHVPDEKLGEAAVLEIVERLTKLIREVFPDTKVYAALGNHDFHPKNQFPAGSNNIYNQIAELWKPWLSNESIALFKKGAFYCEKLPGPSGAGRIVVLNTNLYYTSNALTADMADPGQQFQWLEDVLTDASKAGDMVYIVGHVPP

SEQ ID NO: 12602 - protein, 102 aa, Homo sapiens
MRLLAWLIFLANWGGARAEPGKFWHIADLHLDPDYKVSKDPFQVCPSAGSQPVPDAGPWGDYLCDSPWALINSSIYAMKEIEPEPDFILWTGAVPSFSSAAS

SEQ ID NO: 12603 - protein, 455 aa, Homo sapiens
MRLLAWLIFLANWGGARAEPGKFWHIADLHLDPDYKVSKDPFQVCPSAGSQPVPDAGPWGDYLCDSPWALINSSIYAMKEIEPEPDFILWTGDDTPHVPDEKLGEAAVLEIVERLTKLIREVFPDTKVYAALGNHDFHPKNQFPAGSNNIYNQIAELWKPWLSNESIALFKKGAFYCEKLPGPSGAGRIVVLNTNLYYTSNALTADMADPGQQFQWLEDVLTDASKAGDMVYIVGHVPPGFFEKTQNKAWFREGFNEKYLKVVRKHHRVIAGQFFGHHHTDSFRMLYDDAGVPISAMFITPGVTPWKTTLPGVVNGANNPAIRVFEYDRATLSLKDMVTYFMNLSQANAQGTPRWELEYQLTEAYGVPDASAHSMHTVLDRIAGDQSTLQRYYVYNSVSYSAGVCDEACSMQHVCAMRQVDIDAYTTCLYASGTTPVPQLPLLLMALLGLCTLVL

SEQ ID NO: 12604 - protein, 373 aa, Homo sapiens
MRLLAWLIFLANWGGARAEPGKFWHIADLHLDPDYKVSKDPFQVCPSAGSQPVPDAGPWGDYLCDSPWALINSSIYAMKEIEPEPDFILWTGDDTPHVPDEKLGEAAVLEIVERLTKLIREVFPDTKVYAALGNHDFHPKNQFPAGSNNIYNQIAELWKPWLSNESIALFKKGAFYCEKLPGPSGAGRIVVLNTNLYYTSNALTADMADPGQQFQWLEDVLTDASKAGDMVYIVGHVPPGFFEKTQNKAWFREGFNEKYLKVVRKHHRVIAGQFFGHHHTDSFRMLYDDAGVPISAMFITPGVTPWKTTLPGVVNGANNPAIRVFEYDRATLSLKVRSPAEARGGGWEGLKCITTFPHSQLIHLPLTTEPQEG

SEQ ID NO: 12605 - protein, 407 aa, Homo sapiens
MRLLAWLIFLANWGGARAEPGKFWHIADLHLDPDYKVSKDPFQVCPSAGSQPVPDAGPWGDYLCDSPWALINSSIYAMKEIEPEPDFILWTGDDTPHVPDEKLGEAAVLEIVERLTKLIREVFPGAFYCEKLPGPSGAGRIVVLNTNLYYTSNALTADMADPGQQFQWLEDVLTDASKAGDMVYIVGHVPPGFFEKTQNKAWFREGFNEKYLKVVRKHHRVIAGQFFGHHHTDSFRMLYDDAGVPISAMFITPGVTPWKTTLPGVVNGANNPAIRVFEYDRATLSLKDMVTYFMNLSQANAQGTPRWELEYQLTEAYGVPDASAHSMHTVLDRIAGDQSTLQRYYVYNSVSYSAGVCDEACSMQHVCAMRQVDIDAYTTCLYASGTTPVPQLPLLLMALLGLCTLVL

SEQ ID NO: 12606 - protein, 134 aa, Homo sapiens
MKSLTWILGLWALAACFTPGESQRGPRGPYPPGPLAPPPPPCFPFGTGFVPPPHPPPYGPGRFPPPLSPPYGPGRIPPSPPPPYGPGRIQSHSLPPPYGPGYPQPPSQPRPYPPGPPFFPVNSPTDPALPTPAP

SEQ ID NO: 12607 - protein, 79 aa, Homo sapiens
MKSLTWILGLWALAACFTPGESQRGPRGPYPPGPLAPPQPFGPGFVPPPPPPPYGPGRIPPPPPAPYGPGIFPPPPPQP

SEQ ID NO: 12608 - protein, 79 aa, Homo sapiens; identical to SEQ ID NO: 12607

SEQ ID NO: 12609 - protein, 79 aa, Homo sapiens; identical to SEQ ID NO: 12607

SEQ ID NO: 12610 - protein, 599 aa, Homo sapiens
MHGILGACGRLRLEPATPLTPLLCAERDECRAHPCRNGGSCRNLPGAYVCRCPAGFVGVHCETEVDACDSSPCQHGGRCESGGGAYLCVCPESFFGYHCETVSDPCFSSPCGGRGYCLASNGSHSCTCKVGYTGEDCAKELFPPTALKMERVEESGVSISWNPPNGPAARQMLDGYAVTYVSSDGSYRRTDFVDRTRSSHQLQALAAGRAYNISVFSVKRNSNNKNDISRPAVLLARTRPRPVEGFEVTNVTASTISVQWALHRIRHATVSGVRVSIRHPEALRDQATDVDRSVDRFTFRALLPGKRYTIQLTTLSGLRGEEHPTESLATAPTHVWTRPLPPANLTAARVTATSAHVVWDAPTPGSLLEAYVINVTTSQSTKSRYVPNGKLASYTVRDLLPGRRYQLSVIAVQSTELGPQHSEPAHLYIITSPRDGADRRWHQGGHHPRVLKNRPPPARLPELRLLNDHSAPETPTQPPRFSELVDGRGRVSARFGGSPSKAATVRSHVPGNCSENPCQNGGTCVPGADAHSCDCGPGFKGRRCELACIKVSRPCTRLFSETKAFPVWEGGVCHHVYKRVYRVHQDICFKESCESTSLK

SEQ ID NO: 12611 - protein, 1413 aa, Homo sapiens
MRHGVAWALLVAAALGLGARGVRGAVALADFYPFGAERGDAVTPKQDDGGSGLRPLSVPFPFFGAEHSGLYVNNNGIISFLKEVSQFTPVAFPIAKDRCVVAAFWADVDNRRAGDVYYREATDPAMLRRATEDVRHYFPELLDFNATWVFVATWYRVTFFGGSSSSPVNTFQTVLITDGKLSFTIFNYESIVWTTGTHASSGGNATGLGGIAAQAGFNAGDGQRYFSIPGSRTADMAEVETTTNVGVPGRWAFRIDDAQVRVGGCGHTTSVCLALRPCLNGGKCIDDCVTGNPSYTCSCLSGFTGRRCHLDVNECASQPCQNGGTCTHGINSFRCQCPAGFGGPTCETAQSPCDTKECQHGGQCQVENGSAVCVCQAGYTGAACEMDVDDCSPDPCLNGGSCVDLVGNYTCLCAEPFKGLRCETGDHPVPDACLSAPCHNGGTCVDADQGYVCECPEGFMGLDCRERVPDDCECRNGGRCLGANTTLCQCPLGFFGLLCEFEITAMPCNMNTQCPDGGYCMEHGGSYLCVCHTDHNASHSLPSPCDSDPCFNGGSCDAHDDSYTCECPRGFHGKHCEKARPHLCSSGPCRNGGTCKEAGGEYHCSCPYRFTGRHCEIGKPDSCASGPCHNGGTCFHYIGKYKCDCPPGFSGRHCEIAPSPCFRSPCVNGGTCEDRDTDFFCHCQAGYMGRRCQAEVDCGPPEEVKHATLRFNGTRLGAVALYACDRGYSLSAPSRIRVCQPHGVWSEPPQCLEIDECRSQPCLHGGSCQDRVAGYLCLCSTGYEGAHCELERDECRAHPCRNGGSCRNLPGAYVCRCPAGFVGVHCETEVDACDSSPCQHGGRCESGGGAYLCVCPESFFGYHCETVSDPCFSSPCGGRGYCLASNGSHSCTCKVGYTGEDCAKELFPPTALKMERVEESGVSISWNPPNGPAARQMLDGYAVTYVSSDGSYRRTDFVDRTRSSHQLQALAAGRAYNISVFSVKRNSNNKNDISRPAVLLARTRPRPVEGFEVTNVTASTISVQWALHRIRHATVSGVRVSIRHPEALRDQATDVDRSVDRFTFRALLPGKRYTIQLTTLSGLRGEEHPTESLATAPTHVWTRPLPPANLTAARVTATSAHVVWDAPTPGSLLEAYVINVTTSQSTKSRYVPNGKLASYTVRDLLPGRRYQLSVIAVQSTELGPQHSEPAHLYIITSPRDGADRRWHQGGHHPRVLKNRPPPARLPELRLLNDHSAPETPTQPPRFSELVDGRGRVSARFGGSPSKAATVRSQPTASAQLENMEEAPKRVSLALQLPEHGSKDIGNVPGNCSENPCQNGGTCVPGADAHSCDCGPGFKGRRCELACIKVSRPCTRLFSETKAFPVWEGGVCHHVYKRVYRVHQDICFKESCESTSLKKTPNRKQSKSQTLEKS

SEQ ID NO: 12612 - protein, 1324 aa, Homo sapiens
MRHGVAWALLVAAALGLGARGVRGAVALADFYPFGAERGDAVTPKQDDGGSGLRPLSVPFPFFGAEHSGLYVNNNGIISFLKEVSQFTPVAFPIAKDRCVVAAFWADVDNRRAGDVYYREATDPAMLRRATEDVRHYFPELLDFNATWVFVATWYRVTFFGGSSSSPVNTFQTVLITDGKLSFTIFNYESIVWTTGTHASSGGNATGLGGIAAQAGFNAGDGQRYFSIPGSRTADMAEVETTTNVGVPGRWAFRIDDAQVRVGGCGHTTSVCLALRPCLNGGKCIDDCVTGNPSYTCSCLSGFTGRRCHLDVNECASQPCQNGGTCTHGINSFRCQCPAGFGGPTCETAQSPCDTKECQHGGQCQVENGSAVCVCQAGYTGAACEMDVDDCSPDPCLNGGSCVDLVGNYTCLCAEPFKGLRCETGDHPVPDACLSAPCHNGGTCVDADQGYVCECPEGFMGLDCRERVPDDCECRNGGRCLGANTTLCQCPLGFFGLLCEFEITAMPCNMNTQCPDGGYCMEHGGSYLCVCHTDHNASHSLPSPCDSDPCFNGGSCDAHDDSYTCECPRGFHGKHCEKARPHLCSSGPCRNGGTCKEAGGEYHCSCPYRFTGRHCEIGKPDSCASGPCHNGGTCFHYIGKYKCDCPPGFSGRHCEIAPSPCFRSPCVNGGTCEDRDTDFFCHCQAGYMGRRCQAEVDCGPPEEVKHATLRFNGTRLGAVALYACDRGYSLSAPSRIRVCQPHGVWSEPPQCLEIDECRSQPCLHGGSCQDRVAGYLCLCSTGYEGAHCELERDECRAHPCRNGGSCRNLPGAYVCRCPAGFVGVHCETEVDACDSSPCQHGGRCESGGGAYLCVCPESFFGYHCETVSDPCFSSPCGGRGYCLASNGSHSCTCKVGYTGEDCAKELFPPTALKMERVEESGVSISWNPPNGPAARQMLDGYAVTYVSSDGSYRRTDFVDRTRSSHQLQALAAGRAYNISVFSVKRNSNNKNDISRPAVLLARTRPRPVEGFEVTNVTASTISVQWALHRIRHATVSGVRVSIRHPEALRDQATDVDRSVDRFTFRALLPGKRYTIQLTTLSGLRGEEHPTESLATAPTHVWTRPLPPANLTAARVTATSAHVVWDAPTPGSLLEAYVINVTTSQSTKSRYVPNGKLASYTVRDLLPGRRYQLSVIAVQSTELGPQHSEPAHLYIITSPRDGADRRWHQGGHHPRVLKNRPPPARLPELRLLNDHSAPETPTQPPRFSELVDGRGRVSARFGGSPSKAATVRSQPTASAQLENMEEAPKRVSLALQLPEHGSKDIGSESAALVGTLGLTDCSQGP

SEQ ID NO: 12613 - protein, 1352 aa, Homo sapiens
MRHGVAWALLVAAALGLGARGVRGAVALADFYPFGAERGDAVTPKQDDGGSGLRPLSVPFPFFGAEHSGLYVNNNGIISFLKEVSQFTPVAFPIAKDRCVVAAFWADVDNRRAGDVYYREATDPAMLRRATEDVRHYFPELLDFNATWVFVATWYRVTFFGGSSSSPVNTFQTVLITDGKLSFTIFNYESIVWTTGTHASSGGNATGLGGIAAQAGFNAGDGQRYFSIPGSRTADMAEVETTTNVGVPGRWAFRIDDAQVRVGGCGHTTSVCLALRPCLNGGKCIDDCVTGNPSYTCSCLSGFTGRRCHLDVNECASQPCQNGGTCTHGINSFRCQCPAGFGGPTCETAQSPCDTKECQHGGQCQVENGSAVCVCQAGYTGAACEMDVDDCSPDPCLNGGSCVDLVGNYTCLCAEPFKGLRCETGDHPVPDACLSAPCHNGGTCVDADQGYVCECPEGFMGLDCRERVPDDCECRNGGRCLGANTTLCQCPLGFFGLLCEFEITAMPCNMNTQCPDGGYCMEHGGSYLCVCHTDHNASHSLPSPCDSDPCFNGGSCDAHDDSYTCECPRGFHGKHCEKARPHLCSSGPCRNGGTCKEAGGEYHCSCPYRFTGRHCEIGKPDSCASGPCHNGGTCFHYIGKYKCDCPPGFSGRHCEIAPSPCFRSPCVNGGTCEDRDTDFFCHCQAGYMGRRCQAEVDCGPPEEVKHATLRFNGTRLGAVALYACDRGYSLSAPSRIRVCQPHGVWSEPPQCLEIDECRSQPCLHGGSCQDRVAGYLCLCSTGYEGAHCELERDECRAHPCRNGGSCRNLPGAYVCRCPAGFVGVHCETEVDACDSSPCQHGGRCESGGGAYLCVCPESFFGYHCETVSDPCFSSPCGGRGYCLASNGSHSCTCKVGYTGEDCAKELFPPTALKMERVEESGVSISWNPPNGPAARQMLDGYAVTYVSSDGSYRRTDFVDRTRSSHQLQALAAGRAYNISVFSVKRNSNNKNDISRPAVLLARTRPRPVEGFEVTNVTASTISVQWALHRIRHATVSGVRVSIRHPEALRDQATDVDRSVDRFTFRALLPGKRYTIQLTTLSGLRGEEHPTESLATAPTHVWTRPLPPANLTAARVTATSAHVVWDAPTPGSLLEAYVINVTTSQSTKSRYVPNGKLASYTVRDLLPGRRYQLSVIAVQSTELGPQHSEPAHLYIITSPRDGADRRWHQGGHHPRVLKNRPPPARLPELRLLNDHSAPETPTQPPRFSELVDGRGRVSARFGGSPSKAATVRSHVPGNCSENPCQNGGTCVPGADAHSCDCGPGFKGRRCELACIKVSRPCTRLFSETKAFPVWEGGVCHHVKQSKSQTLEKS

SEQ ID NO: 12614 - protein, 66 aa, Homo sapiens
QCQVENGSAVCVCQAGYTGAACEMDVDDCSPDPCLNGGSCVDLVGNYTCLCAEPFKGLRCETVVTC

SEQ ID NO: 12615 - protein, 272 aa, Homo sapiens
  SITE 1: note = misc_feature - Xaa can be any naturally occurring amino acid
XPTCETAQSPCDTKECQHGGQCQVENGSAVCVCQAGYTGAACEMDVDDCSPDPCLNGGSCVDLVGNYTCLCAEPFKGLRCETGDHPVPDACLSAPCHNGGTCVDADQGYVCECPEGFMGLDCRERVPDDCECRNGGRCLGANTTLCQCPLGFFGLLCEFEITAMPCNMNTQCPDGGYCMEHGGSYLCVCHTDHNASHSLPSPCDSDPCFNGGSCDAHDDSYTCECPRGFHGKHCEKGMAGRGVRAGVSTLESARGPPSCFSAVSLLVSRIAD

SEQ ID NO: 12616 - protein, 300 aa, Homo sapiens
  SITE 1: note = misc_feature - Xaa can be any naturally occurring amino acid
XSLPHVSDVNECASQPCQNGGTCTHGINSFRCQCPAGFGGPTCETAQSPCDTKECQHGGQCQVENGSAVCVCQAGYTGAACEMDVDDCSPDPCLNGGSCVDLVGNYTCLCAEPFKGLRCETGDHPVPDACLSAPCHNGGTCVDADQGYVCECPEGFMGLDCRERVPDDCECRNGGRCLGANTTLCQCPLGFFGLLCEFEITAMPCNMNTQCPDGGYCMEHGGSYLCVCHTDHNASHSLPSPCDSDPCFNGGSCDAHDDSYTCECPRGFHGKHCEKARPHLCSSGPCRNGGTCKEAGGEYH

SEQ ID NO: 12617 - protein, 28 aa, Homo sapiens
MAVAAAAAAAGPAGAGGGRAQRSGLLEV

SEQ ID NO: 12618 - protein, 538 aa, Homo sapiens [sequence omitted]

SEQ ID NO: 12619 - protein, 538 aa, Homo sapiens [sequence omitted]

SEQ ID NO: 12620 - protein, 540 aa, Homo sapiens
MRVAAATAAAGAGPAMAVWTRATKAGLVELLLRERWVRVVAELSGESLSLTGDAAAAELEPALGPAAAAFNGLPNGGGAGDSLPGSPSRGLGPPSPPAPPRGPAGEAGASPPVRRVRVVKQEAGGLGISIKGGRENRMPILISKIFPGLAADQSRALRLGDAILSVNGTDLRQATHDQAVQALKRAGKEVLLEVKFIREVTPYIKKPSLVSDLPWEGAAPQSPSFSGSEDSGSPKHQNSTKDRKIIPLKMCFAARNLSMPDLENRLIELHSPDSRNTLILRCKDTATAHSWFVAIHTNIMALLPQVLAELNAMLGATSTAGGSKEVKHIAWLAEQAKLDGGRQQWRPVLMAVTEKDLLLYDCMPWTRDAWASPCHSYPLVATRLVHSGSGCRSPSLGSDLTFATRTGSRQGIEMHLFRVETHRDLSSWTRILVQGCHAAAELIKEVSLGCMLNGQEVRLTIHYENGFTISRENGGSSSILYRYPFERLKMSADDGIRNLYLDFGGPEGELTMDLHSCPKPIVFVLHTFLSAKVTRMGLLV

SEQ ID NO: 12621 - protein, 267 aa, Homo sapiens
MRVAAATAAAGAGPAMAVWTRATKAGLVELLLRERWVRVVAELSGESLSLTGDAAAAELEPALGPAAAAFNGLPNGGGAGDSLPGSPSRGLGPPSPPAPPRGPAGEAGASPPVRRVRVVKQEAGGLGISIKGGRENRMPILISKIFPGLAADQSRALRLGDAILSVNGTDLRQATHDQAVQALKRAGKEVLLEVKFIREVTPYIKKPSLVSDLPWEGAAPQSPSFSGSEDSGSPKHQNSTKDRKIIPLKMCFAARNLSMPDLENRQN

SEQ ID NO: 12622 - protein, 64 aa, Homo sapiens
  SITE 1: note = misc_feature - Xaa can be any naturally occurring amino acid
XGRENRMPILISKIFPGLAADQSRALRLGDAILSVNGTDLRQATHDQAVQALKRAGKEVLLEGL

SEQ ID NO: 12623 - protein, 162 aa, Homo sapiens
  SITE 1: note = misc_feature - Xaa can be any naturally occurring amino acid
XGRENRMPILISKIFPGLAADQSRALRLGDAILSVNGTDLRQATHDQAVQALKRAGKEVLLEVKFIREVTPYIKKPSLVSDLPWEGAAPQSPSFSGSEDSGSPKHQNSTKDRKIIPLKMCFAARNLSMPDLENRLIELHSPDSRNTLILRCKDTATAHSWQN

SEQ ID NO: 12624 - protein, 139 aa, Homo sapiens
  SITE 1: note = misc_feature - Xaa can be any naturally occurring amino acid
XPHLQDLPRAGCRPEPGAAAGRRHPVGERHRPAPGHPRPGRAGAEARGQGVKFIREVTPYIKKPSLVSDLPWEGAAPQSPSFSGSEDSGSPKHQNSTKDRKIIPLKMCFAARNLSMPDLENRLIELHSPDSRNTLILRC

SEQ ID NO: 12625 - protein, 212 aa, Homo sapiens
DAQLPSKRIIGPKNYEFLKSKREEFQEYLQKLLQHPELSNSQLLADFLSPNGGETQFLDKILPDVNLGKIIKSVPGKLMKEKGQHLEPFIMNFINSCESPKPKPSRPELTILSPTSENNKKLFNDLFKNNANRAENTERKQNQNYFMEVMTVEGVYDYLMYVDAIFCENTEPRSLQDKQKGAKQTFEEMMNYIPDLLVKCIGEETKYESIRL

SEQ ID NO: 12626 - protein, 91 aa, Homo sapiens
MIFWSFVAGVVTFYCSLGPDSLLPNIFFTIKYKPKQLGLQELFPQGHSCAVCGKVKCKRHRPSLLLENYQPWLDLKISSKVDASLSEGCDR

SEQ ID NO: 12627 - protein, 145 aa, Homo sapiens
MIFWSFVAGVVTFYCSLGPDSLLPNIFFTIKYKPKQLGLQELFPQGHSCAVCGKVKCKRHRPSLLLENYQPWLDLKISSKVDASLSEVDIPSIITKKLLKAAMKHIEVIVKARQKVKNTEFLQQAALEEYGPELHVALRSRRDEL

SEQ ID NO: 12628 - protein, 894 aa, Homo sapiens
MIFWSFVAGVVTFYCSLGPDSLLPNIFFTIKYKPKQLGLQELFPQGHSCAVCGKVKCKRHRPSLLLENYQPWLDLKISSKVDASLSEVLELVLENFVYPWYRDVTDDESFVDELRITLRFFASVLIRRIHKVDIPSIITKKLLKAAMKHIEVIVKARQKVKNTEFLQQAALEEYGPELHVALRSRRDELHYLRKLTELLFPYILPPKATDCRSLTLLIREILSGSVFLPSLDFLADPDTVNHLLIIFIDDSPPEKATEPASPLVPFLQKFAEPRNKKPSVLKLELKQIREQQDLLFRFMNFLKQEGAVHVLQFCLTVEEFNDRILRPELSNDEMLSLHEELQKIYKTYCLDESIDKIRFDPFIVEEIQRIAEGPYIDVVKLQTMRCLFEAYEHVLSLLENVFTPMFCHSDEYFRQLLRGAESPTRNSKLNRGSLSLDDFRNTQKRGESFGISRIGSKIKGVFKSTTMEGAMLPNYGVAEGEDDFIEEGIVVMEDDSPVEAVSTPNTPRNLAAWKISIPYVDFFEDPSSERKEKKERIPVFCIDVERNDRRAVGHEPEHWSVYRRYLEFYVLESKLTEFHGAFPDAQLPSKRIIGPKNYEFLKSKREEFQEYLQKLLQHPELSNSQLLADFLSPNGGETQFLDKILPDVNLGKIIKSVPGKLMKEKGQHLEPFIMNFINSCESPKPKPSRPELTILSPTSENNKKLFNDLFKNNANRAENTERKQNQNYFMEVMTVEGVYDYLMYVGRVVFQVPDWLHHLLMGTRILFKNTLEMYTDYYLQCKLEQLFQEHRLVSLITLLRDAIFCENTEPRSLQDKQKGAKQTFEEMMNYIPDLLVKCIGEETKYESIRLLFDGLQQPVLNKQLTYVLLDIVIQELFPELNKVQKEVTSVTSWM

SEQ ID NO: 12629 - protein, 833 aa, Homo sapiens
MKMKTFVIIHFHLIQLGLQELFPQGHSCAVCGKVKCKRHRPSLLLENYQPWLDLKISSKVDASLSEVLELVLENFVYPWYRDVTDDESFVDELRITLRFFASVLIRRIHKVDIPSIITKKLLKAAMKHIEVIVKARQKVKNTEFLQQAALEEYGPELHVALRSRRDELHYLRKLTELLFPYILPPKATDCRSLTLLIREILSGSVFLPSLDFLADPDTVNHLLIIFIDDSPPEKATEPASPLVPFLQKFAEPRNKKPSVLKLELKQIREQQDLLFRFMNFLKQEGAVHVLQFCLTVEEFNDRILRPELSNDEMLSLHEELQKIYKTYCLDESIDKIRFDPFIVEEIQRIAEGPYIDVVKLQTMRCLFEAYEHVLSLLENVFTPMFCHSDEYFRQLLRGAESPTRNSKLNRNTQKRGESFGISRIGSKIKGVFKSTTMEGAMLPNYGVAEGEDDFIEEGIVVMEDDSPVEAVSTPNTPRNLAAWKISIPYVDFFEDPSSERKEKKERIPVFCIDVERNDRRAVGHEPEHWSVYRRYLEFYVLESKLTEFHGAFPDAQLPSKRIIGPKNYEFLKSKREEFQEYLQKLLQHPELSNSQLLADFLSPNGGETQFLDKILPDVNLGKIIKSVPGKLMKEKGQHLEPFIMNFINSCESPKPKPSRPELTILSPTSENNKKLFNDLFKNNANRAENTERKQNQNYFMEVMTVEGVYDYLMYVGRVVFQVPDWLHHLLMGTRILFKNTLEMYTDYYLQCKLEQLFQEHRLVSLITLLRDAIFCENTEPRSLQDKQKGAKQTFEEMMNYIPDLLVKCIGEETKYESIRLLFDGLQQPVLNKQ

SEQ ID NO: 12630 - protein, 236 aa, Homo sapiens
MVPWVRTMGQKLKQRLRLDVGREICRQYPLFCFLLLCLSAASLLLNRYIHILMIFWSFVAGVVTFYCSLGPDSLLPNIFFTIKYKPKLGLQELFPQGHSCAVCGKVKCKRHRPSLLLENYQPWLDLKISSKVDASLSEVLELVLENFVYPWYRDVTDDESFVDELRITLRFFASVLIRRIHKVDIPSIITKKLLKAAMKHIEVIVKARQKVKNTEFLQQAALEEYGPELHVALRSR

SEQ ID NO: 12631 - protein, 893 aa, Homo sapiens
MVPWVRTMGQKLKQRLRLDVGREICRQYPLFCFLLLCLSAASLLLNRYIHILMIFWSFVAGVVTFYCSLGPDSLLPNIFFTIKYKPKQLGLQELFPQGHSCAVCGKVKCKRHRPSLLLENYQPWLDLKISSKVDASLSEVDIPSIITKKLLKAAMKHIEVIVKARQKVKNTEFLQQAALEEYGPELHVALRSRRDELHYLRKLTELLFPYILPPKATDCRSLTLLIREILSGSVFLPSLDFLADPDTVNHLLIIFIDDSPPEKATEPASPLVPFLQKFAEPRNKKPSVLKLELKQIREQQDLLFRFMNFLKQEGAVHVLQFCLTVEEFNDRILRPELSNDEMLSLHEELQKIYKTYCLDESIDKIRFDPFIVEEIQRIAEGPYIDVVKLQTMRCLFEAYEHVLSLLENVFTPMFCHSDEYFRQLLRGAESPTRNSKLNRNTQKRGESFGISRIGSKIKGVFKSTTMEGAMLPNYGVAEGEDDFIEEGIVVMEDDSPVEAVSTPNTPRNLAAWKISIPYVDFFEDPSSERKEKKERIPVFCIDVERNDRRAVGHEPEHWSVYRRYLEFYVLESKLTEFHGAFPDAQLPSKRIIGPKNYEFLKSKREEFQEYLQKLLQHPELSNSQLLADFLSPNGGETQFLDKILPDVNLGKIIKSVPGKLMKEKGQHLEPFIMNFINSCESPKPKPSRPELTILSPTSENNKKLFNDLFKNNANRAENTERKQNQNYFMEVMTVEGVYDYLMYVGRVVFQVPDWLHHLLMGTRILFKNTLEMYTDYYLQCKLEQLFQEHRLVSLITLLRDAIFCENTEPRSLQDKQKGAKQTFEEMMNYIPDLLVKCIGEETKYESIRLLFDGLQQPVLNKQLTYVLLDIVIQELFPELNKVQKEVTSVTSWM

SEQ ID NO: 12632 - protein, 183 aa, Homo sapiens
MVPWVRTMGQKLKQRLRLDVGREICRQYPLFCFLLLCLSAASLLLNRYIHILMIFWSFVAGVVTFYCSLGPDSLLPNIFFTIKYKPKQLGLQELFPQGHSCAVCGKVKCKRHRPSLLLENYQPWLDLKISSKVDASLSEVLELVLENFVYPWYRDVTDDESFVDELRITLRFFASVLIRRIHK

SEQ ID NO: 12633 - protein, 946 aa, Homo sapiens
MVPWVRTMGQKLKQRLRLDVGREICRQYPLFCFLLLCLSAASLLLNRYIHILMIFWSFVAGVVTFYCSLGPDSLLPNIFFTIKYKPKQLGLQELFPQGHSCAVCGKVKCKRHRPSLLLENYQPWLDLKISSKVDASLSEVLELVLENFVYPWYRDVTDDESFVDELRITLRFFASVLIRRIHKVDIPSIITKKLLKAAMKHIEVIVKARQKVKNTEFLQQAALEEYGPELHVALRSRRDELHYLRKLTELLFPYILPPKATDCRSLTLLIREILSGSVFLPSLDFLADPDTVNHLLIIFIDDSPPEKATEPASPLVPFLQKFAEPRNKKPSVLKLELKQIREQQDLLFRFMNFLKQEGAVHVLQFCLTVEEFNDRILRPELSNDEMLSLHEELQKIYKTYCLDESIDKIRFDPFIVEEIQRIAEGPYIDVVKLQTMRCLFEAYEHVLSLLENVFTPMFCHSDEYFRQLLRGAESPTRNSKLNRGSLSLDDFRNTQKRGESFGISRIGSKIKGVFKSTTMEGAMLPNYGVAEGEDDFIEEGIVVMEDDSPVEAVSTPNTPRNLAAWKISIPYVDFFEDPSSERKEKKERIPVFCIDVERNDRRAVGHEPEHWSVYRRYLEFYVLESKLTEFHGAFPDAQLPSKRIIGPKNYEFLKSKREEFQEYLQKLLQHPELSNSQLLADFLSPNGGETQFLDKILPDVNLGKIIKSVPGKLMKEKGQHLEPFIMNFINSCESPKPKPSRPELTILSPTSENNKKLFNDLFKNNANRAENTERKQNQNYFMEVMTVEGVYDYLMYVGRVVFQVPDWLHHLLMGTRILFKNTLEMYTDYYLQCKLEQLFQEHRLVSLITLLRDAIFCENTEPRSLQDKQKGAKQTFEEMMNYIPDLLVKCIGEETKYESIRLLFDGLQQPVLNKQLTYVLLDIVIQELFPELNKVQKEVTSVTSWM

SEQ ID NO: 12634 - protein, 937 aa, Homo sapiens
MVPWVRTMGQKLKQRLRLDVGREICRQYPLFCFLLLCLSAASLLLNRYIHILMIFWSFVAGVVTFYCSLGPDSLLPNIFFTIKYKPKQLGLQELFPQGHSCAVCGKVKCKRHRPSLLLENYQPWLDLKISSKVDASLSEVLELVLENFVYPWYRDVTDDESFVDELRITLRFFASVLIRRIHKVDIPSIITKKLLKAAMKHIEVIVKARQKVKNTEFLQQAALEEYGPELHVALRSRRDELHYLRKLTELLFPYILPPKATDCRSLTLLIREILSGSVFLPSLDFLADPDTVNHLLIIFIDDSPPEKATEPASPLVPFLQKFAEPRNKKPSVLKLELKQIREQQDLLFRFMNFLKQEGAVHVLQFCLTVEEFNDRILRPELSNDEMLSLHEELQKIYKTYCLDESIDKIRFDPFIVEEIQRIAEGPYIDVVKLQTMRCLFEAYEHVLSLLENVFTPMFCHSDEYFRQLLRGAESPTRNSKLNRNTQKRGESFGISRIGSKIKGVFKSTTMEGAMLPNYGVAEGEDDFIEEGIVVMEDDSPVEAVSTPNTPRNLAAWKISIPYVDFFEDPSSERKEKKERIPVFCIDVERNDRRAVGHEPEHWSVYRRYLEFYVLESKLTEFHGAFPDAQLPSKRIIGPKNYEFLKSKREEFQEYLQKLLQHPELSNSQLLADFLSPNGGETQFLDKILPDVNLGKIIKSVPGKLMKEKGQHLEPFIMNFINSCESPKPKPSRPELTILSPTSENNKKLFNDLFKNNANRAENTERKQNQNYFMEVMTVEGVYDYLMYVGRVVFQVPDWLHHLLMGTRILFKNTLEMYTDYYLQCKLEQLFQEHRLVSLITLLRDAIFCENTEPRSLQDKQKGAKQTFEEMMNYIPDLLVKCIGEETKYESIRLLFDGLQQPVLNKQLTYVLLDIVIQELFPELNKVQKEVTSVTSWM

SEQ ID NO: 12635 - protein, 665 aa, Homo sapiens
MVPWVRTMGQKLKQRLRLDVGREICRQYPLFCFLLLCLSAASLLLNRYIHILMIFWSFVAGVVTFYCSLGPDSLLPNIFFTIKYKPKQLGLQELFPQGHSCAVCGKVKCKRHRPSLLLENYQPWLDLKISSKVDASLSEVLELVLENFVYPWYRDVTDDESFVDELRITLRFFASVLIRRIHKVDIPSIITKKLLKAAMKHIEVIVKARQKVKNTEFLQQAALEEYGPELHVALRSRRDELHYLRKLTELLFPYILPPKATDCRSLTLLIREILSGSVFLPSLDFLADPDTVNHLLIIFIDDSPPEKATEPASPLVPFLQKFAEPRNKKPSVLKLELKQIREQQDLLFRFMNFLKQEGAVHVLQFCLTVEEFNDRILRPELSNDEMLSLHEELQKIYKTYCLDESIDKIRFDPFIVEEIQRRKIIKSVPGKLMKEKGQHLEPFIMNFINSCESPKPKPSRPELTILSPTSENNKKLFNDLFKNNANRAENTERKQNQNYFMEVMTVEGVYDYLMYVGRVVFQVPDWLHHLLMGTRILFKNTLEMYTDYYLQCKLEQLFQEHRLVSLITLLRDAIFCENTEPRSLQDKQKGAKQTFEEMMNYIPDLLVKCIGEETKYESIRLLFDGLQQPVLNKQLTYVLLDIVIQELFPELNKVQKEVTSVTSWM

SEQ ID NO: 12636 - protein, 178 aa, Homo sapiens
  SITE 1: note = misc_feature - Xaa can be any naturally occurring amino acid
XKNNANRAENTERKQNQNYFMEVMTVEGVYDYLMYVGRVVFQVPDWLHHLLMGTRILFKNTLEMYTDYYLQCKLEQLFQEHRLVSLITLLRDAIFCENTEPRSLQDKQKGAKQTFEEMMNYIPDLLVKCIGEETKYESIRLLFDGLQQPVLNKQLTYVLLDIVIQELFPELNKVTEKQ

SEQ ID NO: 12637 - protein, 54 aa, Homo sapiens
MLALLCSCLLLAAGASDAWTGEDSAEPNSDSAEWIRDMYAKVTEIWQEVMQRRD

SEQ ID NO: 12638 - protein, 240 aa, Homo sapiens
MLALLCSCLLLAAGASDAWTGEDSAEPNSDSAEWIRDMYAKVTEIWQEVMQRRDDDGALHAACQVQPSATLDAAQPRVTGVVLFRQLAPRAKLDAFFALEGFPTEPNSSSRAIHVHQFGDLSQGCESTGPHYNPLAVPHPQHPGDFGNFAVRDGSLWRYRAGLAASLAGPHSIVGRAVVVHAGEDDLGRGGNQASVENGNAGRRLACCVVGVCGPGLWERQAREHSERKKRRRESECKAA

SEQ ID NO: 12639 - protein, 213 aa, Homo sapiens
MQLPLALCLVCLLVHTAFRVVEGQGWQAFKNDATEIIPELGEYPEPPPELENNKTMNRAENGGRPPHHPFETKDVSEYSCRELHFTRYVTDGPCRSAKPVTELVCSGQCGPARLLPNAIGRGKWWRPSGPDFRCIPDRYRAQRVQLLCPGGEAPRARKVRLVASCKCKRLTRFHNQSELKDFGTEAARPQKGRKPRPRARSAKANQAELENAY

SEQ ID NO: 12640 - protein, 230 aa, Homo sapiens
MLPPAIHFYLLPLACILMKSCLAFKNDATEILYSHVVKPVPAHPSSNSTLNQARNGGRHFSNTGLDRNRTESLTRQNYFWLFPGAFLRQLQEARVQVGCRELRSTKYISDGQCTSISPLKELVCAGECLPLPVLPNWIGGGYGTKYWSRRSSQEWRCVNDKTRTQRIQLQCQDGSTRTYKITVVTACKCKRYTRQHNESSHNFESMSPAKPVQHHRERKRASKSSKHSMS

SEQ ID NO: 12641 - protein, 206 aa, Homo sapiens
MLPPAIHFYLLPLACILMKSCLAFKNDATEILYSHVVKPVPAHPSSNSTLNQARNGGRHFSNTGLDRNTRVQVGCRELRSTKYISDGQCTSISPLKELVCAGECLPLPVLPNWIGGGYGTKYWSRRSSQEWRCVNDKTRTQRIQLQCQDGSTRTYKITVVTACKCKRYTRQHNESSHNFESMSPAKPVQHHRERKRASKSSKHSMS

SEQ ID NO: 12642 - protein, 549 aa, Homo sapiens
MALAAAAAAAAAGVSQAAVLGFLQEHGGKVRNSELLSRFKPLLDAGDPRGRAARRDRFKQFVNNVAVVKELDGVKFVVLRKKPRPPEPEPAPFGPPGAAAQPSKPTSTVLPRSASAPGAPPLVRVPRPVEPPGDLGLPTEPQDTPGGPASEPAQPPGERSADPPLPALELAQATERPSADAAPPPRAPSEAASPCSDPPDAEPGPGAAKGPPQQKPCMLPVRCVPAPATLRLRAEEPGLRRQLSEEPSPRSSPLLLRRLSVEESGLGLGLGPGRSPHLRRLSRAGPRLLSPDAEELPAAPPPSAVPLEPSEHEWLVRTAGGRWTHQLHGLLLRDRGLAAKRDFMSGFTALHWAAKSGDGEMALQLVEVARRSGAPVDVNARSHGGYTPLHLAALHGHEDAAVLLVVRLGAQVHVRDHSGRRAYQYLRPGSSYALRRLLGDPGLRGTTEPDATGGGSGSLAARRPVQVAATILSSTTSAFLGVLADDLMLQDLARGLKKSSSFSKFLSASPMAPRKKTKIRGGLPAFSEISRRPTPGPLAGLVPSLPPTT

SEQ ID NO: 12643 - protein, 146 aa, Homo sapiens
MLLALVCLLSCLLPSSEAKLYGRCELARVLHDFGLDGYRGYSLADWVCLAYFTSGFNAAALDYEADGSTNNGIFQINSRRWCSNLTPNVPNVCRMYCSDLLNPNLKDTVICAMKITQEPQGLGYWEAWRHHCQGKDLTEWVDGCDF

SEQ ID NO: 12644 - protein, 112 aa, Homo sapiens
MVSALRGAPLIRVCLAYFTSGFNAAALDYEADGSTNNGIFQINSRRWCSNLTPNVPNVCRMYCSDLLNPNLKDTVICAMKITQEPQGLGYWEAWRHHCQGKDLTEWVDGCDF

SEQ ID NO: 12645 - protein, 215 aa, Homo sapiens [sequence omitted]

SEQ ID NO: 12646 - protein, 124 aa, Homo sapiens
MVLCWLLLLVMALPPGTTGVKDCVFCELTDSMQCPGTYMHCGDDEDCFTGHGVAPGTGPVINKGCLRATSCGLEEPVSYRGVTYSLTTNCCTGRLCNRAPSSQTVGATTSLALGLGMLLPPRLL

SEQ ID NO: 12647 - protein, 159 aa, Homo sapiens
MKAWGTVVVTLATLMVVTVDAKIYERCELAARLERAGLNGYKGYGVGDWLCMAHYESGFDTAFVDHNPDGSSEYGIFQLNSAWWCDNGITPTKNLCHMDCHDLLNRHILDDIRCAKQIVSSQNGLSAWTSWRLHCSGHDLSEWLKGCDMHVKIDPKIHP

SEQ ID NO: 12648 - protein, 159 aa, Homo sapiens; identical to SEQ ID NO: 12647

SEQ ID NO: 12649 - protein, 159 aa, Homo sapiens; identical to SEQ ID NO: 12647

SEQ ID NO: 12650 - protein, 195 aa, Homo sapiens
MAVSQGDGTLCFVLLLCCWQETELRPRTVIPGSPTEIPFSSKQEDMSELLDEILVQEILDLNKTTPSEMPSTASTLSTPLHAGIDENYQAGGSENYHELLENLQFSPGIEVKISNDEANANANLHGDPSENYRGPQVSPGSEKSVSSKEKNSKNTQYENLSILDQILQNIGRSSGNIFHKEQQRTSAQRRSQGSQ

SEQ ID NO: 12651 - protein, 164 aa, Homo sapiens
MLWLLPTDRGRSGNGNEPQDEILVQEILDLNKTTPSEMPSTASTLSTPLHAGIDENYQAGGSENYHELLENLQFSPGIEVKISNDEANANANLHGDPSENYRGPQVSPGSEKSVSSKEKNSKNTQYENLSILDQILQNIGRSSGNIFHKEQQRTSAQRRSQGSQ

SEQ ID NO: 12652 - protein, 104 aa, Homo sapiens
MLWLLPTDRGRSGNGNEPQGSPTEIPFSSKQEDMSELLDEILVQEILDLNKTTPSEMPSTASTLSTPLHAGIDENYQAGGSENYHELLENLQFSPGIEVKISND

SEQ ID NO: 12653 - protein, 112 aa, Homo sapiens
MTFFTHLWDGDPVSQVAGSPTEIPFSSKQEDMSELLDEILVQEILDLNKTTPSEMPSTASTLSTPLHAGIDENYQAGGSENYHELLENLQFSPGIEVKISNDEANANANLHG

SEQ ID NO: 12654 - protein, 80 aa, Homo sapiens
MKVFFLFAVLFCLVQTNSGDVPLGIRNTICRMQQGICRLFFCHSGEKKRDISSDPWNRCCVSNTDEEGKEKPEMDGRSGI

SEQ ID NO: 12655 - protein, 50 aa, Homo sapiens
MKVFFLFAVLFCLVQTNSVHISHQEARGPSFKICVGFLGPRWARGCSTGN

SEQ ID NO: 12656 - protein, 113 aa, Homo sapiens
MRQRLLPSVTSLLLVALLFPGSSQARHVNHSATEALGELRERAPGQGTNGFQLLRHAVKRDLLPPRTPPYQEPASDLKVVDCRRSEGFCQEYCNYMETQVGYCSKKKDACCLH

SEQ ID NO: 12657 - protein, 133 aa, Homo sapiens
MRQRLLPSVTSLLLVALLFPGSSQARHVNHSATEALGELRERAPGQGTNGFQLLRHAVKRDLLPPRTPPYQGDVPLGIRNTICRMQQGICRLFFCHSGEKKRDISSDPWNRCCVSNTDEEGKEKPEMDGRSGI

SEQ ID NO: 12658 - protein, 108 aa, Homo sapiens
MRQRLLPSVTSLLLVALLFPGSSQARHVNHSATEALGELRERAPGQGTNGFQLLRHAVKRDLLPPRTPPYQGDVPLGIRNTICRMQQGICRLFFCHSGTGQQHRQRCG

SEQ ID NO: 12659 - protein, 82 aa, Homo sapiens
MRQRLLPSVTSLLLVALLFPGSSQARHVNHSATEALGELRERAPGQGTNGFQLLRHAVKRDLLPPRTPPYQGTGQQHRQRCG

SEQ ID NO: 12660 - protein, 103 aa, Homo sapiens
MRQRLLPSVTSLLLVALLFPGSSQARHVNHSATEALGELRERAPGQGTNGFQLLRHAVKRDLLPPRTPPYQVHISHQEARGPSFKICVGFLGPRWARGCSTGN

SEQ ID NO: 12661 - protein, 53 aa, Homo sapiens
SSQARHVNHSATEALGELRERAPGQGTNGFQLLRHAVKRDLLPPRTPPYQEMK

SEQ ID NO: 12662 - protein, 106 aa, Homo sapiens
  SITE 1: note = misc_feature - Xaa can be any naturally occurring amino acid
XFPGSSQARHVNHSATEALGELRERAPGQGTNGFQLLRHAVKRDLLPPRTPPYQGTHSVAQAGVQWHCYRLLQPLPPGLKCSSHLSLPNTWDHRHAPLHTASFFRC

SEQ ID NO: 12663 - protein, 106 aa, Homo sapiens
LFPGSSQARHVNHSATEALGELRERAPGQGTNGFQLLRHAVKRDLLPPRTPPYQGTHSVAQAGVQWHCYRLLQPLPPGLKCSSHLSLPNTWDHRHAPLHTASFFRC

SEQ ID NO: 12664 - protein, 80 aa, Homo sapiens
MKVFFLFAVLFCLVQTNSGDVPPGIRNTICHMQQGICRLFFCHSGEKKRDICSDPWNRCCVSNTDEEGKEKPEMDGRSGI

SEQ ID NO: 12665 - protein, 50 aa, Homo sapiens
MKVFFLFAVLFCLVQTNSVHISHREARGPSFRICVDFLGPRWARGCSTGN

SEQ ID NO: 12666 - protein, 113 aa, Homo sapiens; identical to SEQ ID NO: 12656

SEQ ID NO: 12667 - protein, 133 aa, Homo sapiens
MRQRLLPSVTSLLLVALLFPGSSQARHVNHSATEALGELRERAPGQGTNGFQLLRHAVKRDLLPPRTPPYQGDVPPGIRNTICHMQQGICRLFFCHSGEKKRDICSDPWNRCCVSNTDEEGKEKPEMDGRSGI

SEQ ID NO: 12668 - protein, 108 aa, Homo sapiens
MRQRLLPSVTSLLLVALLFPGSSQARHVNHSATEALGELRERAPGQGTNGFQLLRHAVKRDLLPPRTPPYQGDVPPGIRNTICHMQQGICRLFFCHSGTGQQHRQRCG

SEQ ID NO: 12669 - protein, 82 aa, Homo sapiens; identical to SEQ ID NO: 12659

SEQ ID NO: 12670 - protein, 103 aa, Homo sapiens
MRQRLLPSVTSLLLVALLFPGSSQARHVNHSATEALGELRERAPGQGTNGFQLLRHAVKRDLLPPRTPPYQVHISHREARGPSFRICVDFLGPRWARGCSTGN

SEQ ID NO: 12671 - protein, 53 aa, Homo sapiens; identical to SEQ ID NO: 12661

SEQ ID NO: 12672 - protein, 115 aa, Homo sapiens
MCVCQDPTSCPAPIGEFEKVCSNDNKTFDSSCHFFATKCTLEGTKKGHKLHLDYIGPCKYIPPCLDSELTEFPLRMRDWLKNVLVTLYERDEDNNLLTEKQKLRVKKIHENEKRL

SEQ ID NO: 12673 - protein, 149 aa, Homo sapiens
MCVCQDPTSCPAPIGEFEKVCSNDNKTFDSSCHFFATKCTLEGTKKGHKLHLDYIGPCKYIPPCLDSELTEFPLRMRDWLKNVLVTLYERDEDNNLLTEKQKLRVKKIHENEKRLEAGDHPVELLARDFEKNYNMYIFPVHWQFGQLDQ

SEQ ID NO: 12674 - protein, 53 aa, Homo sapiens
MRAWIFFLLCLAGRALAAPQQEALPDETEVVEETVAEVTEVSVGANPVQVEVG

SEQ ID NO: 12675 - protein, 111 aa, Homo sapiens
MRAWIFFLLCLAGRALAAPQQEALPDETEVVEETVAEVTEVSVGANPVQVEVGEFDDGAEETEEEVVAENPCQNHHCKHGKVCELDENNTPMCVCQDPTSCPAPIGEFEKV

SEQ ID NO: 12676 - protein, 303 aa, Homo sapiens
MRAWIFFLLCLAGRALAAPQQEALPDETEVVEETVAEVTEVSVGANPVQVEVGEFDDGAEETEEEVVAENPCQNHHCKHGKVCELDENNTPMCVCQDPTSCPAPIGEFEKVCSNDNKTFDSSCHFFATKCTLEGTKKGHKLHLDYIGPCKYIPPCLDSELTEFPLRMRDWLKNVLVTLYERDEDNNLLTEKQKLRVKKIHENEKRLEAGDHPVELLARDFEKNYNMYIFPVHWQFGQLDQHPIDGYLSHTELAPLRAPLIPMEHCTTRFFETCDLDNDKYIALDEWAGCFGIKQKDIDKDLVI

SEQ ID NO: 12677 - protein, 56 aa, Homo sapiens
MKTGLFFLCLLGTAAAIPTNARLLSDHSKPTAETVAPDNTAIPSLRAEAEENEKET

SEQ ID NO: 12678 - protein, 89 aa, Homo sapiens
MKTGLFFLCLLGTAAAIPTNARLLSDHSKPTAETVAPDNTAIPSLRAEAEENEKETAVSTEDDSHHKAEKSSVLKSKEESHEQSAEQGK

SEQ ID NO: 12679 - protein, 120 aa, Homo sapiens
MKTGLFFLCLLGTAAAIPTNARLLSDHSKPTAETVAPDNTAIPSLRAEAEENEKETAVSTEDDSHHKAEKSSVLKSKEESHEQSAEQGKSSSQELGLKDQEDSDGHLSVNLEYAPTEGTL

SEQ ID NO: 12680 - protein, 127 aa, Homo sapiens
MKTGLFFLCLLGTAAAIPTNARLLSDHSKPTAETVAPDNTAIPSLRAEAEENEKETAVSTEDDSHHKAEKSSVLKSKEESHEQSAEQGKSSSQELGLKDQEDSDGHLSVNLEYAPTEGTLDIKEDMS

SEQ ID NO: 12681 - protein, 141 aa, Homo sapiens
MKTGLFFLCLLGTAAAIPTNARLLSDHSKPTAETVAPDNTAIPSLRAEAEENEKETAVSTEDDSHHKAEKSSVLKSKEESHEQSAEQGKSSSQELGLKDQEDSDGHLSVNLEYAPTEGTLDIKEDMSEPQEKKLSENTDFL

SEQ ID NO: 12682 - protein, 144 aa, Homo sapiens
MKTGLFFLCLLGTAAAIPTNARLLSDHSKPTAETVAPDNTAIPSLRAEAEENEKETAVSTEDDSHHKAEKSSVLKSKEESHEQSAEQGKSSSQELGLKDQEDSDGHLSVNLEYAPTEGTLDIKEDMSEPQEKKLSENTDFLAPG

SEQ ID NO: 12683 - protein, 664 aa, Homo sapiens
MKTGLFFLCLLGTAAAIPTNARLLSDHSKPTAETVAPDNTAIPSLRAEAEENEKETAVSTEDDSHHKAEKSSVLKSKEESHEQSAEQGKSSSQELGLKDQEDSDGHLSVNLEYAPTEGTLDIKEDMSEPQEKKLSENTDFLAPGVSSFTDSNQQESITKREENQEQPRNYSHHQLNRSSKHSQGLRDQGNQEQDPNISNGEEEEEKEPGEVGTHNDNQERKTELPREHANSKQEEDNTQSDDILEESDQPTQVSKMQEDEFDQGNQEQEDNSNAEMEEENASNVNKHIQETEWQSQEGKTGLEAISNHKETEEKTVSEALLMEPTDDGNTTPRNHGVDDDGDDDGDDGGTDGPRHSASDDYFIPSQAFLEAERAQSIAYHLKIEEQREKVHENENIGTTEPGEHQEAKKAENSSNEEETSSEGNMRVHAVDSCMSFQCKRGHICKADQQGKPHCVCQDPVTCPPTKPLDQVCGTDNQTYASSCHLFATKCRLEGTKKGHQLQLDYFGACKSIPTCTDFEVIQFPLRMRDWLKNILMQLYEANSEHAGYLNEKQRNKVKKIYLDEKRLLAGDHPIDLLLRDFKKNYHMYVYPVHWQFSELDQHPMDRVLTHSELAPLRASLVPMEHCITRFFEECDPNKDKHITLKEWGHCFGIKEEDIDENLLF

SEQ ID NO: 12684 - protein, 664 aa, Homo sapiens; identical to SEQ ID NO: 12683

SEQ ID NO: 12685 - protein, 19 aa, Homo sapiens
MSEPQEKKLSENTDFLAPG

SEQ ID NO: 12686 - protein, 539 aa, Homo sapiens
MSEPQEKKLSENTDFLAPGVSSFTDSNQQESITKREENQEQPRNYSHHQLNRSSKHSQGLRDQGNQEQDPNISNGEEEEEKEPGEVGTHNDNQERKTELPREHANSKQEEDNTQSDDILEESDQPTQVSKMQEDEFDQGNQEQEDNSNAEMEEENASNVNKHIQETEWQSQEGKTGLEAISNHKETEEKTVSEALLMEPTDDGNTTPRNHGVDDDGDDDGDDGGTDGPRHSASDDYFIPSQAFLEAERAQSIAYHLKIEEQREKVHENENIGTTEPGEHQEAKKAENSSNEEETSSEGNMRVHAVDSCMSFQCKRGHICKADQQGKPHCVCQDPVTCPPTKPLDQVCGTDNQTYASSCHLFATKCRLEGTKKGHQLQLDYFGACKSIPTCTDFEVIQFPLRMRDWLKNILMQLYEANSEHAGYLNEKQRNKVKKIYLDEKRLLAGDHPIDLLLRDFKKNYHMYVYPVHWQFSELDQHPMDRVLTHSELAPLRASLVPMEHCITRFFEECDPNKDKHITLKEWGHCFGIKEEDIDENLLF

SEQ ID NO: 12687 - protein, 802 aa, Homo sapiens
MLGARAWLGRVLLLPRAGAGLAASRRCPGVWPRTWPHRSPSRGSSSRDKDRSATVSSSVPMPAGGKGSHPSSTPQRVPNRLIHEKSPYLLQHAYNPVDWYPWGQEAFDKARKENKPIFLSVGYSTCHWCHMMEEESFQNEEIGRLLSEDFVSVKVDREERPDVDKVYMTFVQATSSGGGWPMNVWLTPNLQPFVGGTYFPPEDGLTRVGFRTVLLRIREQWKQNKNTLLENSQRVTTALLARSEISVGDRQLPPSAATVNNRCFQQLDEGYDEEYGGFAEAPKFPTPVILSFLFSYWLSHRLTQDGSRAQQMALHTLKMMANGGIRDHVGQGFHRYSTDRQWHVPHFEKMLYDQAQLAVAYSQAFQLSGDEFYSDVAKGILQYVARSLSHRSGGFYSAEDADSPPERGQRPKEGAYYVWTVKEVQQLLPEPVLGATEPLTSGQLLMKHYGLTEAGNISPSQDPKGELQGQNVLTVRYSLELTAARFGLDVEAVRTLLNSGLEKLFQARKHRPKPHLDSKMLAAWNGLMVSGYAVTGAVLGQDRLINYATNGAKFLKRHMFDVASGRLMRTCYTGPGGTVEHSNPPCWGFLEDYAFVVRGLLDLYEASQESAWLEWALRLQDTQDKLFWDSQGGGYFCSEAELGAGLPLRLKDDQDGAEPSANSVSAHNLLRLHGFTGHKDWMDKCVCLLTAFSERMRRVPVALPEMVRALSAQQQTLKQIVICGDRQAKDTKALVQCVHSVYIPNKVLILADGDPSSFLSRQLPFLSTLRRLEDQATAYVCENQACSVPITDPCELRKLLHP

SEQ ID NO: 12688 - protein, 56 aa, Homo sapiens
MLGARAWLGRVLLLPRAGAGLAASRRCPGVWPRTWPHRSPSRPRRLGETNLARSPQ

SEQ ID NO: 12689 - protein, 67 aa, Homo sapiens
MLGARAWLGRVLLLPRAGAGLAASRRCPGVWPRTWPHRSPSRWALSEGVPMSGFLCLSLTWSSPRPY

SEQ ID NO: 12690 - protein, 786 aa, Homo sapiens
MLGARAWLGRVLLLPRAGAGLAASRRGSSSRDKDRSATVSSSVPMPAGGKGSHPSSTPQRVPNRLIHEKSPYLLQHAYNPVDWYPWGQEAFDKARKENKPIFLSVGYSTCHWCHMMEEESFQNEEIGRLLSEDFVSVKVDREERPDVDKVYMTFVQATSSGGGWPMNVWLTPNLQPFVGGTYFPPEDGLTRVGFRTVLLRIREQWKQNKNTLLENSQRVTTALLARSEISVGDRQLPPSAATVNNRCFQQLDEGYDEEYGGFAEAPKFPTPVILSFLFSYWLSHRLTQDGSRAQQMALHTLKMMANGGIRDHVGQGFHRYSTDRQWHVPHFEKMLYDQAQLAVAYSQAFQLSGDEFYSDVAKGILQYVARSLSHRSGGFYSAEDADSPPERGQRPKEGAYYVWTVKEVQQLLPEPVLGATEPLTSGQLLMKHYGLTEAGNISPSQDPKGELQGQNVLTVRYSLELTAARFGLDVEAVRTLLNSGLEKLFQARKHRPKPHLDSKMLAAWNGLMVSGYAVTGAVLGQDRLINYATNGAKFLKRHMFDVASGRLMRTCYTGPGGTVEHSNPPCWGFLEDYAFVVRGLLDLYEASQESAWLEWALRLQDTQDKLFWDSQGGGYFCSEAELGAGLPLRLKDDQDGAEPSANSVSAHNLLRLHGFTGHKDWMDKCVCLLTAFSERMRRVPVALPEMVRALSAQQQTLKQIVICGDRQAKDTKALVQCVHSVYIPNKVLILADGDPSSFLSRQLPFLSTLRRLEDQATAYVCENQACSVPITDPCELRKLLHP

SEQ ID NO: 12691 - protein, 43 aa, Homo sapiens
MLGARAWLGRVLLLPRAGAGLAASRRSACSPTSRLNSLRSLIP

SEQ ID NO: 12692 - protein, 43 aa, Homo sapiens; identical to SEQ ID NO: 12691

SEQ ID NO: 12693 - protein, 43 aa, Homo sapiens; identical to SEQ ID NO: 12691

SEQ ID NO: 12694 - protein, 43 aa, Homo sapiens; identical to SEQ ID NO: 12691

SEQ ID NO: 12695 - protein, 43 aa, Homo sapiens; identical to SEQ ID NO: 12691

SEQ ID NO: 12696 - protein, 742 aa, Homo sapiens
MPAGGKGSHPSSTPQRVPNRLIHEKSPYLLQHAYNPVDWYPWGQEAFDKARKENKPIFLSVGYSTCHWCHMMEEESFQNEEIGRLLSEDFVSVKVDREERPDVDKVYMTFVQATSSGGGWPMNVWLTPNLQPFVGGTYFPPEDGLTRVGFRTVLLRIREQWKQNKNTLLENSQRVTTALLARSEISVGDRQLPPSAATVNNRCFQQLDEGYDEEYGGFAEAPKFPTPVILSFLFSYWLSHRLTQDGSRAQQMALHTLKMMANGGIRDHVGQGFHRYSTDRQWHVPHFEKMLYDQAQLAVAYSQAFQLSGDEFYSDVAKGILQYVARSLSHRSGGFYSAEDADSPPERGQRPKEGAYYVWTVKEVQQLLPEPVLGATEPLTSGQLLMKHYGLTEAGNISPSQDPKGELQGQNVLTVRYSLELTAARFGLDVEAVRTLLNSGLEKLFQARKHRPKPHLDSKMLAAWNGLMVSGYAVTGAVLGQDRLINYATNGAKFLKRHMFDVASGRLMRTCYTGPGGTVEHSNPPCWGFLEDYAFVVRGLLDLYEASQESAWLEWALRLQDTQDKLFWDSQGGGYFCSEAELGAGLPLRLKDDQDGAEPSANSVSAHNLLRLHGFTGHKDWMDKCVCLLTAFSERMRRVPVALPEMVRALSAQQQTLKQIVICGDRQAKDTKALVQCVHSVYIPNKVLILADGDPSSFLSRQLPFLSTLRRLEDQATAYVCENQACSVPITDPCELRKLLHP

SEQ ID NO: 12697 - protein, 521 aa, Homo sapiens
MSHLSSPPKKHKGEHKGHSLPHGSERGSSSRDKDRSATVSSSVPMPAGGKGSHPSSTPQRVPNRLIHEKSPYLLQHAYNPVDWYPWGQEAFDKARKENKPIFLSVGYSTCHWCHMMEEESFQNEEIGRLLSEDFVSVKVDREERPDVDKVYMTFVQATSSGGGWPMNVWLTPNLQPFVGGTYFPPEDGLTRVGFRTVLLRIREQWKQNKNTLLENSQRVTTALLARSEISVGDRQLPPSAATVNNRCFQQLDEGYDEEYGGFAEAPKFPTPVILSFLFSYWLSHRLTQDGSRAQQMALHTLKMMANGGIRDHVGQGFHRYSTDRQWHVPHFEKMLYDQAQLAVAYSQAFQLSGDEFYSDVAKGILQYVARSLSHRSGGFYSAEDADSPPERGQRPKEGAYYVWTVKEVQQLLPEPVLGATEPLTSGQLLMKHYGLTEAGNISPSQDPKGELQGQNVLTVRYSLELTAARFGLDVEAVRTLLNSGLEKLFQARKHRPKPHLDSKMLAAWNGGAAHLRPSLSA

SEQ ID NO: 12698 - protein, 786 aa, Homo sapiens
MSHLSSPPKKHKGEHKGHSLPHGSERGSSSRDKDRSATVSSSVPMPAGGKGSHPSSTPQRVPNRLIHEKSPYLLQHAYNPVDWYPWGQEAFDKARKENKPIFLSVGYSTCHWCHMMEEESFQNEEIGRLLSEDFVSVKVDREERPDVDKVYMTFVQATSSGGGWPMNVWLTPNLQPFVGGTYFPPEDGLTRVGFRTVLLRIREQWKQNKNTLLENSQRVTTALLARSEISVGDRQLPPSAATVNNRCFQQLDEGYDEEYGGFAEAPKFPTPVILSFLFSYWLSHRLTQDGSRAQQMALHTLKMMANGGIRDHVGQGFHRYSTDRQWHVPHFEKMLYDQAQLAVAYSQAFQLSGDEFYSDVAKGILQYVARSLSHRSGGFYSAEDADSPPERGQRPKEGAYYVWTVKEVQQLLPEPVLGATEPLTSGQLLMKHYGLTEAGNISPSQDPKGELQGQNVLTVRYSLELTAARFGLDVEAVRTLLNSGLEKLFQARKHRPKPHLDSKMLAAWNGLMVSGYAVTGAVLGQDRLINYATNGAKFLKRHMFDVASGRLMRTCYTGPGGTVEHSNPPCWGFLEDYAFVVRGLLDLYEASQESAWLEWALRLQDTQDKLFWDSQGGGYFCSEAELGAGLPLRLKDDQDGAEPSANSVSAHNLLRLHGFTGHKDWMDKCVCLLTAFSERMRRVPVALPEMVRALSAQQQTLKQIVICGDRQAKDTKALVQCVHSVYIPNKVLILADGDPSSFLSRQLPFLSTLRRLEDQATAYVCENQACSVPITDPCELRKLLHP

SEQ ID NO: 12699 - protein, 247 aa, Homo sapiens
  SITE 1: note = misc_feature - Xaa can be any naturally occurring amino acid
XESFQNEEIGRLLSEDFVSVKVDREERPDVDKVYMTFVQATSSGGGWPMNVWLTPNLQPFVGGTYFPPEDGLTRVGFRTVLLRIREQWKQNKNTLLENSQRVTTALLARSEISVGDRQLPPSAATVNNRCFQQLDEGYDEEYGGFAEAPKFPTPVILSFLFSYWLSHRLTQDGSRAQQMALHTLKMMANGGIRDHVGQTASGTSLTLRRCSMTRHSSLWPIRRPSSSLVMNSTLTWPKASCSTWLGA

SEQ ID NO: 12700 - protein, 110 aa, Homo sapiens
  SITE 1: note = misc_feature - Xaa can be any naturally occurring amino acid
XQAQLAVAYSQAFQLSGDEFYSDVAKGILQYVARSLSHRSGGFYSAEDADSPPERGQRPKEGAYYVWTVKEVQQLLPEPVLGATEPLTSGQLLMKHYGLTEAGNISPSQA

SEQ ID NO: 12701 - protein, 350 aa, Homo sapiens
MKPLVLLVALLLWPSSVPAYPSITVTPDEEQNLNHYIQVLENLVRSVPSGEPGREKKSNSPKHVYSIASKGSKFKELVTHGDASTENDVLTNPISEETTTFPTGGFTPEIGKKKHTESTPFWSIKPNNVSIVLHAEEPYIENEEPEPEPEPAAKQTEAPRMLPVVTESSTSPYVTSYKSPVTTLDKSTGIGISTESEDVPQLSGETAIEKPEEFGKHPESWNNDDILKKILDINSQVQQALLSDTSNPAYREDIEASKDHLKRSLALAAAAEHKLKTMYKSQLLPVGRTSNKIDDIETVINMLCNSRSKLYEYLDIKCVPPEMREKAATVFNTLKNMCRSRRVTALLKVY

SEQ ID NO: 12702 - protein, 65 aa, Homo sapiens
MKVTGIFLLSALALLSLSGNTGADSLGREAKCYNELNGCTKIYDPVCGTDGNTYPNECVLCFENR

SEQ ID NO: 12703 - protein, 79 aa, Homo sapiens
MKVTGIFLLSALALLSLSGNTGADSLGREAKCYNELNGCTKIYDPVCGTDGNTYPNECVLCFENRKRQTSILIQKSGPC

SEQ ID NO: 12704 - protein, 94 aa, Homo sapiens
MAAFPHKIIFFLVCSTLTHVAFSGIFNKRDFTRWPKPRCKMYIPLDPDYNADCPNVTAPVCASNGHTFQNECFFCVEQREFHYRIKFEKYGKCD

SEQ ID NO: 12705 - protein, 94 aa, Homo sapiens; identical to SEQ ID NO: 12704

SEQ ID NO: 12706 - protein, 54 aa, Homo sapiens
MYIPLDPDYNADCPNVTAPVCASNGHTFQNECFFCVEQREFHYRIKFEKYGKCD

SEQ ID NO: 12707 - protein, 47 aa, Homo sapiens
MAKSFPVFSLLSFILIHLVLSSVSGPRHWWPPRGIIKEISWKNQVLP

SEQ ID NO: 12708 - protein, 97 aa, Homo sapiens
MAKSFPVFSLLSFILIHLVLSSVSGPRHWWPPRGIIKVKCPYEKVNLSWYNGTVNPCPGLYQPICGTNFITYDNPCILCVESLKSHGRIRFYHDGKC

SEQ ID NO: 12709 - protein, 84 aa, Homo sapiens
MALSVLRLALLLLAVTFAASLIPQFGLFSKYRTPNCSQYRLPGCPRHFNPVCGSDMSTYANECTLCMKIREGGHNIKIIRNGPC

SEQ ID NO: 12710 - protein, 119 aa, Homo sapiens
MALSVLRLALLLLAVTFAGSARSGPGERGPPEKSGFGSQTGGGPCPAPGGLGDASLIPQFGLFSKYRTPNCSQYRLPGCPRHFNPVCGSDMSTYANECTLCMKIREGGHNIKIIRNGPC

SEQ ID NO: 12711 - protein, 88 aa, Homo sapiens [sequence omitted]

SEQ ID NO: 12712 - protein, 134 aa, Homo sapiens
MALSVLRLALLLLAVTFAGSARSGPGERGPPEKSGFGSQTGGGPCPAPGGLGDGTRAPVTGGSPEDLPASLIPQFGLFSKYRTPNCSQYRLPGCPRHFNPVCGSDMSTYANECTLCMKIREGGHNIKIIRNGPC

SEQ ID NO: 12713 - protein, 103 aa, Homo sapiens [sequence omitted]

SEQ ID NO: 12714 - protein, 134 aa, Homo sapiens
MALSVLRLALLLLAVTFAGSARSGPGERGPPEKSGFGSQTGGGPCPAPGGLGDGTRAPVTGGSPEDLPGKVVIILKSFEMDPADGAVYRKEDGETTFTGRLDKLHFPFFSFPVFLYMRFVNTHFLRAGMEDSHV

SEQ ID NO: 12715 - protein, 86 aa, Homo sapiens
MAVRQWVIALALAALLVVDREVPVAAGKLPFSRMPICEHMVESPTCSQMSNLVCGTDGLTYTNECQLCLARIKTKQDIQIMKDGKC

SEQ ID NO: 12716 - protein, 109 aa, Homo sapiens
MILGIGSSPHLLWTLEGTHIWSLLGDASHTDRLPEAGAGKLLSEVPVAAGKLPFSRMPICEHMVESPTCSQMSNLVCGTDGLTYTNECQLCLARIKTKQDIQIMKDGKC

SEQ ID NO: 12717 - protein, 68 aa, Homo sapiens
MKIATVSVLLPLALCLIQDAASKNEDQDKKFFQSLDGIMFINKCATCKMILEKEAKSQKRARHLARAP

SEQ ID NO: 12718 - protein, 869 aa, Homo sapiens
MKIATVSVLLPLALCLIQDAASKNEDQDKKFFQSLDGIMFINKCATCKMILEKEAKSQKRARHLARAPKATAPTELNCDDFKKGERDGDFICPDYYEAVCGTDGKTYDNRCALCAENAKTGSQIGVKSEGECKSSNPEQDVCSAFRPFVRDGRLGCTRENDPVLGPDGKTHGNKCAMCAELFLKEAENAKREGETRIRRNAEKDFCKEYEKQVRNGRLFCTRESDPVRGPDGRMHGNKCALCAEIFKQRFSEENSKTDQNLGKAEEKTKVKREIVKLCSQYQNQAKNGILFCTRENDPIRGPDGKMHGNLCSMCQAYFQAENEEKKKAEARARNKRESGKATSYAELCSEYRKLVRNGKLACTRENDPIQGPDGKVHGNTCSMCEVFFQAEEEEKKKKEGKSRNKRQSKSTASFEELCSEYRKSRKNGRLFCTRENDPIQGPDGKMHGNTCSMCEAFFQQEERARAKAKREAAKEICSEFRDQVRNGTLICTREHNPVRGPDGKMHGNKCAMCASVFKLEEEEKKNDKEEKGKVEAEKVKREAVQELCSEYRHYVRNGRLPCTRENDPIEGLDGKIHGNTCSMCEAFFQQEAKEKERAEPRAKVKREAEKETCDEFRRLLQNGKLFCTRENDPVRGPDGKTHGNKCAMCKAVFQKENEERKRKEEEDQRNAAGHGSSGGGGGNTQDECAEYREQMKNGRLSCTRESDPVRDADGKSYNNQCTMCKAKLEREAERKNEYSRSRSNGTGSESGKDTCDEFRSQMKNGKLICTRESDPVRGPDGKTHGNKCTMCKEKLEREAAEKKKKEDEDRSNTGERSNTGERSNDKEDLCREFRSMQRNGKLICTRENNPVRGPYGKMHINKCAMCQSI

SEQ ID NO: 12719 - protein, 1064 aa, Homo sapiens
MKIATVSVLLPLALCLIQDAASKNEDQEMCHEFQAFMKNGKLFCPQDKKFFQSLDGIMFINKCATCKMILEKEAKSQKRARHLARAPKATAPTELNCDDFKKGERDGDFICPDYYEAVCGTDGKTYDNRCALCAENAKTGSQIGVKSEGECKSSNPEQDVCSAFRPFVRDGRLGCTRENDPVLGPDGKTHGNKCAMCAELFLKEAENAKREGETRIRRNAEKDFCKEYEKQVRNGRLFCTRESDPVRGPDGRMHGNKCALCAEIFKQRFSEENSKTDQNLGKAEEKTKVKREIVKLCSQYQNQAKNGILFCTRENDPIRGPDGKMHGNLCSMCQAYFQAENEEKKKAEARARNKRESGKATSYAELCSEYRKLVRNGKLACTRENDPIQGPDGKVHGNTCSMCEVFFQAEEEEKKKKEGKSRNKRQSKSTASFEELCSEYRKSRKNGRLFCTRENDPIQGPDGKMHGNTCSMCEAFFQQEERARAKAKREAAKEICSEFRDQVRNGTLICTREHNPVRGPDGKMHGNKCAMCASVFKLEEEEKKNDKEEKGKVEAEKVKREAVQELCSEYRHYVRNGRLPCTRENDPIEGLDGKIHGNTCSMCEAFFQQEAKEKERAEPRAKVKREAEKETCDEFRRLLQNGKLFCTRENDPVRGPDGKTHGNKCAMCKAVFQKENEERKRKEEEDQRNAAGHGSSGGGGGNTQDECAEYREQMKNGRLSCTRESDPVRDADGKSYNNQCTMCKAKLEREAERKNEYSRSRSNGTGSESGKDTCDEFRSQMKNGKLICTRESDPVRGPDGKTHGNKCTMCKEKLEREAAEKKKKEDEDRSNTGERSNTGERSNDKEDLCREFRSMQRNGKLICTRENNPVRGPYGKMHINKCAMCQSIFDREANERKKKDEEKSSSKPSNNAKDECSEFRNYIRNNELICPRENDPVHGADGKFYTNKCYMCRAVFLTEALERAKLQEKPSHVRASQEEDSPDSFSSLDSEMCKDYRVLPRIGYLCPKDLKPVCGDDGQTYNNPCMLCHENLIRQTNTHIRSTGKCEESSTPGTTAASMPPSDE

SEQ ID NO: 12720 - protein, 1094 aa, Homo sapiens
MKIATVSVLLPLALCLIQDAASKNEDQEMCHEFQAFMKNGKLFCPQDKKFFQSLDGIMFINKCATCKMILEKEAKSQKRARHLARAPKATAPTELNCDDFKKGERDGDFICPDYYEAVCGTDGKTYDNRCALCAENAKTGSQIGVKSEGECKSSNPEQDVCSAFRPFVRDGRLGCTRENDPVLGPDGKTHGNKCAMCAELFLKEAENAKREGETRIRRNAEKDFCKEYEKQVRNGRLFCTRESDPVRGPDGRMHGNKCALCAEIFKQRFSEENSKTDQNLGKAEEKTKVKREIVKLCSQYQNQAKNGILFCTRENDPIRGPDGKMHGNLCSMCQAYFQAENEEKKKAEARARNKRESGKATSYAELCSEYRKLVRNGKLACTRENDPIQGPDGKVHGNTCSMCEVFFQAEEEEKKKKEGKSRNKRQSKSTASFEELCSEYRKSRKNGRLFCTRENDPIQGPDGKMHGNTCSMCEAFFQQEERARAKAKREAAKEICSEFRDQVRNGTLICTREHNPVRGPDGKMHGNKCAMCASVFKLEEEEKKNDKEEKGKVEAEKVKREAVQELCSEYRHYVRNGRLPCTRENDPIEGLDGKIHGNTCSMCEAFFQQEAKEKERAEPRAKVKREAEKETCDEFRRLLQNGKLFCTRENDPVRGPDGKTHGNKCAMCKAVFQKENEERKRKEEEDQRNAAGHGSSGGGGGNTQDECAEYREQMKNGRLSCTRESDPVRDADGKSYNNQCTMCKAKLEREAERKNEYSRSRSNGTGSESGKDTCDEFRSQMKNGKLICTRESDPVRGPDGKTHGNKCTMCKEKLEREAAEKKKKEDEDRSNTGERSNTGERSNDKEDLCREFRSMQRNGKLICTRENNPVRGPYGKMHINKCAMCQSIFDREANERKKKDEEKSSSKPSNNAKDQCRQVQNEAEDAKFRQPGRSLASVARMSTDECSEFRNYIRNNELICPRENDPVHGADGKFYTNKCYMCRAVFLTEALERAKLQEKPSHVRASQEEDSPDSFSSLDSEMCKDYRVLPRIGYLCPKDLKPVCGDDGQTYNNPCMLCHENLIRQTNTHIRSTGKCEESSTPGTTAASMPPSDE

SEQ ID NO: 12721 - protein, 916 aa, Homo sapiens
MKIATVSVLLPLALCLIQDAASKNEDQEMCHEFQAFMKNGKLFCPQDKKFFQSLDGIMFINKCATCKMILEKEAKSQKRARHLARAPKATAPTELNCDDFKKGERDGDFICPDYYEAVCGTDGKTYDNRCALCAENAKTGSQIGVKSEGECKSSNPEQDVCSAFRPFVRDGRLGCTRENDPVLGPDGKTHGNKCAMCAELFLKEAENAKREGETRIRRNAEKDFCKEYEKQVRNGRLFCTRESDPVRGPDGRMHGNKCALCAEIFKQRFSEENSKTDQNLGKAEEKTKVKREIVKLCSQYQNQAKNGILFCTRENDPIRGPDGKMHGNLCSMCQAYFQAENEEKKKAEARARNKRESGKATSYAELCSEYRKLVRNGKLACTRENDPIQGPDGKVHGNTCSMCEVFFQAEEEEKKKKEGKSRNKRQSKSTASFEELCSEYRKSRKNGRLFCTRENDPIQGPDGKMHGNTCSMCEAFFQQEERARAKAKREAAKEICSEFRDQVRNGTLICTREHNPVRGPDGKMHGNKCAMCASVFKLEEEEKKNDKEEKGKVEAEKVKREAVQELCSEYRHYVRNGRLPCTRENDPIEGLDGKIHGNTCSMCEAFFQQEAKEKERAEPRAKVKREAEKETCDEFRRLLQNGKLFCTRENDPVRGPDGKTHGNKCAMCKAVFQKENEERKRKEEEDQRNAAGHGSSGGGGGNTQDECAEYREQMKNGRLSCTRESDPVRDADGKSYNNQCTMCKAKLEREAERKNEYSRSRSNGTGSESGKDTCDEFRSQMKNGKLICTRESDPVRGPDGKTHGNKCTMCKEKLEREAAEKKKKEDEDRSNTGERSNTGERSNDKEDLCREFRSMQRNGKLICTRENNPVRGPYGKMHINKCAMCQSIFDREANERKKKDEEKSSSKPSNNAKVIY

SEQ ID NO: 12722 - protein, 201 aa, Homo sapiens
MKIATVSVLLPLALCLIQDAASKNEDQEMCHEFQAFMKNGKLFCPQDKKFFQSLDGIMFINKCATCKMILEKEAKSQKRARHLARAPKATAPTELNCDDFKKGERDGDFICPDYYEAVCGTDGKTYDNRCALCAENAKTGSQIGVKSEGECKSSNPEQFCEPVMVGEGEGRKDLIHVTLVFFQEIGSKLMARTVLCLSSGT

SEQ ID NO: 12723 - protein, 41 aa, Homo sapiens
MKLSGMFLLLSLALFCFLTGVFSQGGQVDCGEFQDPKVYCT

SEQ ID NO: 12724 - protein, 80 aa, Homo sapiens
MKLSGMFLLLSLALFCFLTGVFSQGGQVDCGEFQDPKVYCTRESNPHCGSDGQTYGNKCAFCKAIVKSGGKISLKHPGKC

SEQ ID NO: 12725 - protein, 80 aa, Homo sapiens; identical to SEQ ID NO: 12724

SEQ ID NO: 12726 - protein, 85 aa, Homo sapiens
MKITGGLLLLCTVVYFCSSSEAASLSPKKVDCSIYKKYPVVAIPCPITYLPVCGSDYITYGNECHLCTESLKSNGRVQFLHDGSC

SEQ ID NO: 12727 - protein, 59 aa, Homo sapiens
MTQVDCSIYKKYPVVAIPCPITYLPVCGSDYITYGNECHLCTESLKSNGRVQFLHDGSC

SEQ ID NO: 12728 - protein, 97 aa, Homo sapiens
MKGICSDAILVLATSMWMAFAIDFPLPMASERGQLDKTIVECLKNVNKCWFLSYIKPSEPICGSDQVTYSSDCHLCSKILFEGLNITKLYDGQCENS

SEQ ID NO: 12729 - protein, 86 aa, Homo sapiens
MRATAIVLLLALTLATMFSIECAKQTKQMVDCSHYKKLPPGQQRFCHHMYDPICGSDGKTYKNDCFFCSKVKKTDGTLKFVHFGKC

SEQ ID NO: 12730 - protein, 107 aa, Homo sapiens
MVFMNPSHHCFHYKTPPSSSGEHNEPRRLMGLTQPEHLQGIECAKQTKQMVDCSHYKKLPPGQQRFCHHMYDPICGSDGKTYKNDCFFCSKVKKTDGTLKFVHFGKC

SEQ ID NO: 12731 - protein, 294 aa, Homo sapiens
ELWGLKEGTYLFQLTVTSSDHPEDTANVTVTVLSTKQTEDYCLASNKVGRCRGSFPRWYYDPTEQICKSFVYGGCLGNKNNYLREEECILACRGVQVCSGTCQPTQFRCSNGCCIDSFLECDDTPNCPDASDEAACEKYTSGFDELQRIHFPSDKGHCVDLPDTGLCKESIPRWYYNPFSEHCARFTYGGCYGNKNNFEEEQQCLESCRGISKKDVFGLRREIPIPSTGSVEMAVAVFLVICIVVVVAILGYCFFKNQRKDFHGHHHHPPPTPASSTVSTTEDTEHLVYNHTTR

SEQ ID NO: 12732 - protein, 529 aa, Homo sapiens
MAPARTMARARLAPAGIPAVALWLLCTLGLQGTQAGPPPAPPGLPAGADCLNSFTAGVPGFVLDTNASVSNGATFLESPTVRRGWDCVRACCTTQNCNLALVELQPDRGEDAIAACFLINCLYEQNFVCKFAPREGFINYLTREVYRSYRQLRTQGFGGSGIPKAWAGIDLKVQPQEPLVLKDVENTDWRLLRGDTDVRVERKDPNQVELWGLKEGTYLFQLTVTSSDHPEDTANVTVTVLSTKQTEDYCLASNKVGRCRGSFPRWYYDPTEQICKSFVYGGCLGNKNNYLREEECILACRGVQGGPLRGSSGAQATFPQGPSMERRHPVCSGTCQPTQFRCSNGCCIDSFLECDDTPNCPDASDEAACEKYTSGFDELQRIHFPSDKGHCVDLPDTGLCKESIPRWYYNPFSEHCARFTYGGCYGNKNNFEEEQQCLESCRGISKKDVFGLRREIPIPSTGSVEMAVAVFLVICIVVVVAILGYCFFKNQRKDFHGHHHHPPPTPASSTVSTTEDTEHLVYNHTTRPL

SEQ ID NO: 12733 - protein, 513 aa, Homo sapiens
MAPARTMARARLAPAGIPAVALWLLCTLGLQGTQAGPPPAPPGLPAGADCLNSFTAGVPGFVLDTNASVSNGATFLESPTVRRGWDCVRACCTTQNCNLALVELQPDRGEDAIAACFLINCLYEQNFVCKFAPREGFINYLTREVYRSYRQLRTQGFGGSGIPKAWAGIDLKVQPQEPLVLKDVENTDWRLLRGDTDVRVERKDPNQVELWGLKEGTYLFQLTVTSSDHPEDTANVTVTVLSTKQTEDYCLASNKVGRCRGSFPRWYYDPTEQICKSFVYGGCLGNKNNYLREEECILACRGVQGPSMERRHPVCSGTCQPTQFRCSNGCCIDSFLECDDTPNCPDASDEAACEKYTSGFDELQRIHFPSDKGHCVDLPDTGLCKESIPRWYYNPFSEHCARFTYGGCYGNKNNFEEEQQCLESCRGISKKDVFGLRREIPIPSTGSVEMAVAVFLVICIVVVVAILGYCFFKNQRKDFHGHHHHPPPTPASSTVSTTEDTEHLVYNHTTRPL

SEQ ID NO: 12734 - protein, 302 aa, Homo sapiens
MAPARTMARARLAPAGIPAVALWLLCTLGLQGTQAGPPPAPPGLPAGADCLNSFTAGVPGFVLDTNASVSNGATFLESPTVRRGWDCVRACCTTQNCNLALVELQPDRGEDAIAACFLINCLYEQNFVCKFAPREGFINYLTREVYRSYRQLRTQGFGGSGIPKAWAGIDLKVQPQEPLVLKDVENTDWRLLRGDTDVRVERKDPNQVELWGLKEGTYLFQLTVTSSDHPEDTANVTVTVLSTKQTEDYCLASNKVGRCRGSFPRWYYDPTEQICKSFVYGGCLGNKNNYLREEECILACRG

SEQ ID NO: 12735 - protein, 472 aa, Homo sapiens
PPGLPAGADCLNSFTAGVPGFVLDTNASVSNGATFLESPTVRRGWDCVRACCTTQNCNLALVELQPDRGEDAIAACFLINCLYEQNFVCKFAPREGFINYLTREVYRSYRQLRTQGFGGSGIPKAWAGIDLKVQPQEPLVLKDVENTDWRLLRGDTDVRVERKDPNQVELWGLKEGTYLFQLTVTSSDHPEDTANVTVTVLSTKQTEDYCLASNKVGRCRGSFPRWYYDPTEQICKSFVYGGCLGNKNNYLREEECILACRGVQGGPLRGSSGAQATFPQVCSGTCQPTQFRCSNGCCIDSFLECDDTPNCPDASDEAACEKYTSGFDELQRIHFPSDKGHCVDLPDTGLCKESIPRWYYNPFSEHCARFTYGGCYGNKNNFEEEQQCLESCRGISKKDVFGLRREIPIPSTGSVEMAVAVFLVICIVVVVAILGYCFFKNQRKDFHGHHHHPPPTPASSTVSTTEDTEHLV

SEQ ID NO: 12736 - protein, 313 aa, Homo sapiens
  SITE 1: note = misc_feature - Xaa can be any naturally occurring amino acid
XEKAAEPQLSEHRVGSRDPSRAGSWDRNLGGPGPTQLTCAGHQHPRNPEARALKVTPLGRKAMAPARTMARARLAPAGIPAVALWLLCTLGLQGTQAGPPPAPPGLPAGADCLNSFTAGVPGFVLDTNASVSNGATFLESPTVRRGWDCVRACCTTQNCNLALVELQPDRGEDAIAACFLINCLYEQNFVCKFAPREGFINYLTREVYRSYRQLRTQGFGGSGIPKAWAGIDLKVQPQEPLVLKDVENTDWRLLRGDTDVRVELTVTSSDHPEDTANVTVTVLSTKQTEDYCLASNKVGRCRGSFPRWYYDPT

SEQ ID NO: 12737 - protein, 204 aa, Homo sapiens
  SITE 1: note = misc_feature - Xaa can be any naturally occurring amino acid
XLGNKNNYLREEECILACRGVQGGPLRGSSGAQATFPQGPSMERRHPDTSGFDELQRIHFPSDKGHCVDLPDTGLCKESIPRWYYNPFSEHCARFTYGGCYGNKNNFEEEQQCLESCRGISKKDVFGLRREIPIPSTGSVEMAVAVFLVICIVVVVAILGYCFFKNQRKDFHGHHHHPPPTPASSTVSTTEDTEHLVYNHTTRP

SEQ ID NO: 12738 - protein, 240 aa, Homo sapiens
  SITE 1: note = misc_feature - Xaa can be any naturally occurring amino acid
XVENTDWRLLRGDTDVRVERKDPNQVELWGLKEGTYLFQLTVTSSDHPEDTANVTVTVLSTKQTEDYCLASNKVGRCRGSFPRWYYDPTEQICKSFVYGGCLGNKNNYLREEECILACRGVQGPSMERRHPDTSGFDELQRIHFPSDKGHCVDLPDTGLCKESIPRWYYNPFSEHCARFTYGGCYGNKNNFEEEQQCLESCRGISKKDVFGLRREIPIPSTGSVEMAVAVFLVICIVVVV

SEQ ID NO: 12739 - protein, 175 aa, Homo sapiens [sequence omitted]

SEQ ID NO: 12740 - protein, 252 aa, Homo sapiens
MAQLCGLRRSRAFLALLGSLLLSGVLAADRERSIHDFCLVSKVVGRCRASMPRWWYNVTDGSCQLFVYGGCDGNSNNYLTKEECLKKCATVTENATGDLATSRNAADSSVPSAPRRQDSEDHSSDMFNYEEYCTANAVTGPCRASFPRWYFDVERNSCNNFIYGGCRGNKNSYRSEEACMLRCFRQQENPPLPLGSKVVVLAGLFVMVLILFLGASMVYLIRVARRNQERALRTVWSSGDDKEQLVKNTYVL

SEQ ID NO: 12741 - protein, 195 aa, Homo sapiens
MAQLCGLRRSRAFLALLGSLLLSGVLAADRERSIHENATGDLATSRNAADSSVPSAPRRQDSEDHSSDMFNYEEYCTANAVTGPCRASFPRWYFDVERNSCNNFIYGGCRGNKNSYRSEEACMLRCFRQQENPPLPLGSKVVVLAGLFVMVLILFLGASMVYLIRVARRNQERALRTVWSSGDDKEQLVKNTYVL

SEQ ID NO: 12742 - protein, 52 aa, Homo sapiens
MPRWWYNVTDGSCQLFVYGGCDGNSNNYLTKEECLKKCATVTENATGDLATS

SEQ ID NO: 12743 - protein, 62 aa, Homo sapiens
MPRWWYNVTDGSCQLFVYGGCDGNSNNYLTKEECLKKCATVTENATGDLATSRNAADSSVPS

SEQ ID NO: 12744 - protein, 202 aa, Homo sapiens
MPRWWYNVTDGSCQLFVYGGCDGNSNNYLTKEECLKKCATVTENATGDLATSRNAADSSVPSAPRRQDSEDHSSDMFNYEEYCTANAVTGPCRASFPRWYFDVERNSCNNFIYGGCRGNKNSYRSEEACMLRCFRQQENPPLPLGSKVVVLAGLFVMVLILFLGASMVYLIRVARRNQERALRTVWSSGDDKEQLVKNTYVL

SEQ ID NO: 12745 - protein, 130 aa, Homo sapiens
  SITE 1: note = misc_feature - Xaa can be any naturally occurring amino acid
XPRRQDSEDHSSDMFNYEEYCTANAVTGPCRASFPRWYFDVERNSCNNFIYGGCRGNKNSYRSEEACMLRCFRQQENPPLPLGSKGKWPLTLLLPSACLLPSLTELSPAQLWFTLSFTVNIILAESHVSA

SEQ ID NO: 12746 - protein, 106 aa, Homo sapiens
  SITE 1: note = misc_feature - Xaa can be any naturally occurring amino acid
XRGTPAITSSMEAAGAIRTATALRRPACSAASAVCSLPGQQENPPLPLGSKVVVLAGLFVMVLILFLGASMVYLIRVARRNQERALRTVWSSGDDKEQLVKNTYVL

SEQ ID NO: 12747 - protein, 89 aa, Homo sapiens
MQLQASLSFLLILTLCLELRSELARDTIKDLLPNVCAFPMEKGPCQTYMTRWFFNFETGECELFAYGGCGGNSNNFLRKEKCEKFCKFT

SEQ ID NO: 12748 - protein, 99 aa, Homo sapiens
MKSAKLGFLLRFFIFCSLNTLLLGGVNKIAEKICGDLKDPCKLDMNFGSCYEVHFRYFYNRTSKRCETFVFSGCNGNLNNFKLKIEREVACVAKYKPPR

SEQ ID NO: 12749 - protein, 377 aa, Homo sapiens
DDYFRNWNPNKPFDQALDPSKDPCLKVKCSPHKVCVTQDYQTALCVSRKHLLPRQKKGNVAQKHWVGPSNLVKCKPCPVAQSAMVCGSDGHSYTSKCKLEFHACSTGKSLATLCDGPCPCLPEPEPPKHKAERSACTDKELRNLASRLKDWFGALHEDANRVIKPTSSNTAQGRFDTSILPICKDSLGWMFNKLDMNYDLLLDPSEINAIYLDKYEPCIKPLFNSCDSFKDGKLSNNEWCYCFQKPGGLPCQNEMNRIQKLSKGKSLLGAFIPRCNEEGYYKATQCHGSTGQCWCVDKYGNELAGSRKQGAVSCEEEQETSGDFGSGGSVVLLDDLEYERELGPKDKEGKLRVHTRAVTEDDEDEDDDKEDEVGYIW

SEQ ID NO: 12750 - protein, 139 aa, Homo sapiens
MPAIAVLAAAAAAWCFLQVESRHLDALAGGAGPNHGNFLDNDQWLSTVSQYDRDKYWNRFRDDDYFRNWNPNKPFDQALDPSKDPCLKVKCSPHKVCVTQDYQTALCVSRKHLLPRQKKGNVAQKHWVGPSNLVKCKPC

SEQ ID NO: 12751 - protein, 439 aa, Homo sapiens
MPAIAVLAAAAAAWCFLQVESRHLDALAGGAGPNHGNFLDNDQWLSTVSQYDRDKYWNRFRDDDYFRNWNPNKPFDQALDPSKDPCLKVKCSPHKVCVTQDYQTALCVSRKHLLPRQKKGNVAQKHWVGPSNLVKCKPCPVAQSAMVCGSDGHSYTSKCKLEFHACSTGKSLATLCDGPCPCLPEPEPPKHKAERSACTDKELRNLASRLKDWFGALHEDANRVIKPTSSNTAQGRFDTSILPICKDSLGWMFNKLDMNYDLLLDPSEINAIYLDKYEPCIKPLFNSCDSFKDGKLSNNEWCYCFQKPGGLPCQNEMNRIQKLSKGKSLLGAFIPRCNEEGYYKATQCHGSTGQCWCVDKYGNELAGSRKQGAVSCEEEQETSGDFGSGGSVVLLDDLEYERELGPKDKEGKLRVHTRAVTEDDEDEDDDKEDEVGYIW

SEQ ID NO: 12752 - protein, 67 aa, Homo sapiens
MVCGSDGHSYTSKCKLEFHACSTGKSLATLCDGPCPCLPEPEPPKHKAERSACTDKELRNLASRLKD

SEQ ID NO: 12753 - protein, 424 aa, Homo sapiens
MRAPGCGRLVLPLLLLAAAALAEGDAKGLKEGETPGNFMEDEQWLSSISQYSGKIKHWNRFRDEVEDDYIKSWEDNQQGDEALDTTKDPCQKVKCSRHKVCIAQGYQRAMCISRKKLEHRIKQPTVKLHGNKDSICKPCHMAQLASVCGSDGHTYSSVCKLEQQACLSSKQLAVRCEGPCPCPTEQAATSTADGKPETCTGQDLADLGDRLRDWFQLLHENSKQNGSASSVAGPASGLDKSLGASCKDSIGWMFSKLDTSADLFLDQTELAAINLDKYEVCIRPFFNSCDTYKDGRVSTAEWCFCFWREKPPCLAELERIQIQEAAKKKPGIFIPSCDEDGYYRKMQCDQSSGDCWCVDQLGLELTGTRTHGSPDCDDIVGFSGDFGSGVGWEDEEEKETEEAGEEAEEEEGEAGEADDGGYIW

SEQ ID NO: 12754 - protein, 424 aa, Homo sapiens; identical to SEQ ID NO: 12753

SEQ ID NO: 12755 - protein, 423 aa, Homo sapiens [sequence omitted]

SEQ ID NO: 12756 - protein, 77 aa, Homo sapiens
MRAPGCGRLVLPLLLLAAAALAEGDAKGLKEGETPGNFMEDEQWLSSISQYSGKIKHWNRFRDVPSSDPPSTTQATP

SEQ ID NO: 12757 - protein, 385 aa, Homo sapiens
MITQDHIHMSSGLSQDDYFRTWSPGKPFDQALDPAKDPCLKMKCSRHKVCIAQDSQTAVCISHRRLTHRMKEAGVDHRQWRGPILSTCKQCPVVYPSPVCGSDGHTYSFQCKLEYQACVLGKQISVKCEGHCPCPSDKPTSTSRNVKRACSDLEFREVANRLRDWFKALHESGSQNKKTKTLLRPERSRFDTSILPICKDSLGWMFNRLDTNYDLLLDQSELRSIYLDKNEQCTKAFFNSCDTYKDSLISNNEWCYCFQRQQDPPCQTELSNIQKRQGVKKLLGQYIPLCDEDGYYKPTQCHGSVGQCWCVDRYGNEVMGSRINGVADCAIDFEISGDFASGDFHEWTDDEDDEDDIMNDEDEIEDDDEDEGDDDDGGDDHDVYI

SEQ ID NO: 12758 - protein, 344 aa, Homo sapiens
MKCSRHKVCIAQDSQTAVCISHRRLTHRMKEAGVDHRQWRGPILSTCKQCPVVYPSPVCGSDGHTYSFQCKLEYQACVLGKQISVKCEGHCPCPSDKPTSTSRNVKRACSDLEFREVANRLRDWFKALHESGSQNKKTKTLLRPERSRFDTSILPICKDSLGWMFNRLDTNYDLLLDQSELRSIYLDKNEQCTKAFFNSCDTYKDSLISNNEWCYCFQRQQDPPCQTELSNIQKRQGVKKLLGQYIPLCDEDGYYKPTQCHGSVGQCWCVDRYGNEVMGSRINGVADCAIDFEISGDFASGDFHEWTDDEDDEDDIMNDEDEIEDDDEDEGDDDDGGDDHDVYI

SEQ ID NO: 12759 - protein, 316 aa, Homo sapiens
MKEAGVDHRQWRGPILSTCKQCPVVYPSPVCGSDGHTYSFQCKLEYQACVLGKQISVKCEGHCPCPSDKPTSTSRNVKRACSDLEFREVANRLRDWFKALHESGSQNKKTKTLLRPERSRFDTSILPICKDSLGWMFNRLDTNYDLLLDQSELRSIYLDKNEQCTKAFFNSCDTYKDSLISNNEWCYCFQRQQDPPCQTELSNIQKRQGVKKLLGQYIPLCDEDGYYKPTQCHGSVGQCWCVDRYGNEVMGSRINGVADCAIDFEISGDFASGDFHEWTDDEDDEDDIMNDEDEIEDDDEDEGDDDDGGDDHDVYI

SEQ ID NO: 12760 - protein, 63 aa, Homo sapiens
MLKVSAVLCVCAAAWCSQSLAAAAAVAAAGGRSDGGNFLDDKQWLTTISQYDKEVGQWNKFRD

SEQ ID NO: 12761 - protein, 338 aa, Homo sapiens
MLKVSAVLCVCAAAWCSQSLAAAAAVAAAGGRSDGGNFLDDKQWLTTISQYDKEVGQWNKFRDCKLEYQACVLGKQISVKCEGHCPCPSDKPTSTSRNVKRACSDLEFREVANRLRDWFKALHESGSQNKKTKTLLRPERSRFDTSILPICKDSLGWMFNRLDTNYDLLLDQSELRSIYLDKNEQCTKAFFNSCDTYKDSLISNNEWCYCFQRQQDPPCQTELSNIQKRQGVKKLLGQYIPLCDEDGYYKPTQCHGSVGQCWCVDRYGNEVMGSRINGVADCAIDFEISGDFASGDFHEWTDDEDDEDDIMNDEDEIEDDDEDEGDDDDGGDDHDVYI

SEQ ID NO: 12762 - protein, 173 aa, Homo sapiens [sequence omitted]

SEQ ID NO: 12763 - protein, 161 aa, Homo sapiens
MLKVSAVLCVCAAAWCSQSLAAAAAVAAAGGRSDGGNFLDDKQWLTTISQYDKEVGQWNKFRDDDYFRTWSPGKPFDQALDPAKDPCLKMKCSRHKVCIAQDSQTAVCISHRRLTHRMKEAGVDHRQWRGPILSTCKQCPVVYPSPVCGSDGHTYSFQCKL

SEQ ID NO: 12764 - protein, 433 aa, Homo sapiens
MLKVSAVLCVCAAAWCSQSLAAAAAVAAAGGRSDGGNFLDDKQWLTTISQYDKEVGQWNKFRDDDYFRTWSPGKPFDQALDPAKDPCLKMKCSRHKVCIAQDSQTAVCISHRRLTHRMKEAGVDHRQWRGPILSTCKQCPVVYPSPVCGSDGHTYSFQCKLEYQACVLGKQISVKCEGHCPCPSDKPTSTSRNVKRACSDLEFREVANRLRDWFKALHESGSQNKKTKTLLRPERSRFDTSILPICKDSLGWMFNRLDTNYDLLLDQSELRSIYLDKNEQCTKAFFNSCDTYKDSLISNNEWCYCFQRQQDPPCQTELSNIQKRQGVKKLLGQYIPLCDEDGYYKPTQCHGSVGQCWCVDRYGNEVMGSRINGVADCAIDFEISGDFASGDFHEWTDDEDDEDDIMNDEDEIEDDDEDEGDDDDGGDDHDVYI

SEQ ID NO: 12765 - protein, 313 aa, Homo sapiens
MLKVSAVLCVCAAAWCSQSLAAAAAVAAAGGRSDGGNFLDDKQWLTTISQYDKEVGQWNKFRDDDYFRTWSPGKPFDQALDPAKDPCLKMKCSRHKVCIAQDSQTAVCISHRRLTHRMKEAGVDHRQWRGPILSTCKQCPVVYPSPVCGSDGHTYSFQCKLEYQACVLGKQISVKCEGHCPCPSDKPTSTSRNVKRACSDLEFREVANRLRDWFKALHESGSQNKKTKTLLRPERSRFDTSILPICKDSLGWMFNRLDTNYDLLLDQSELRSIYLDKNEQCTKAFFNSCDTYKDSLISNNEWCYCFQRQQGKR

SEQ ID NO: 12766 - protein, 433 aa, Homo sapiens; identical to SEQ ID NO: 12764

SEQ ID NO: 12767 - protein, 433 aa, Homo sapiens; identical to SEQ ID NO: 12764

SEQ ID NO: 12768 - protein, 393 aa, Homo sapiens
MLKVSAVLCVCAAAWCSQSLAAAAAVAAAGGRSDGGNFLDDKQWLTTISQYDKEVGQWNKFRDDDYFRTWSPGKPFDQALDPAKDPCLKMKCSRHKVCIAQDSQTAVCISHRRLTHRMKEAGVDHRQWRGPILSTCKQCPVVYPSPVCGSDGHTYSFQCKLEYQACVLGKQISVKCEGHCPCPSDKPTSTSRNVKRGFDTSILPICKDSLGWMFNRLDTNYDLLLDQSELRSIYLDKNEQCTKAFFNSCDTYKDSLISNNEWCYCFQRQQDPPCQTELSNIQKRQGVKKLLGQYIPLCDEDGYYKPTQCHGSVGQCWCVDRYGNEVMGSRINGVADCAIDFEISGDFASGDFHEWTDDEDDEDDIMNDEDEIEDDDEDEGDDDDGGDDHDVYI

SEQ ID NO: 12769 - protein, 89 aa, Homo sapiens
MLKVSAVLCVCAAAWCSQSLAAAAAVAAAGGRSDGGNFLDDKQWLTTISQYDKEVGQWNKFRDDDYFRTWSPGKPFDQALSFHDLGIFV

SEQ ID NO: 12770 - protein, 79 aa, Homo sapiens
MLKVSAVLCVCAAAWCSQSLAAAAAVAAAGGRSDGGNFLDDKQWLTTISQYDKEVGQWNKFRDDDYFRTWSPGKPFDQG

SEQ ID NO: 12771 - protein, 79 aa, Homo sapiens; identical to SEQ ID NO: 12770

SEQ ID NO: 12772 - protein, 71 aa, Homo sapiens
MLKVSAVLCVCAAAWCSQSLAAAAAVAAAGGRSDGGNFLDDKQWLTTISQYDKEVGQWNKFRDDERSRSRP

SEQ ID NO: 12773 - protein, 115 aa, Homo sapiens
MLKVSAVLCVCAAAWCSQSLAAAAAVAAAGGRSDGGNFLDDKQWLTTISQYDKEVGQWNKFRDEVEDDYFRTWSPGKPFDQALDPAKDPCLKMKCSRHKVCIAQDSQTAVCISHR

SEQ ID NO: 12774 - protein, 115 aa, Homo sapiens; identical to SEQ ID NO: 12773

SEQ ID NO: 12775 - protein, 436 aa, Homo sapiens
MLKVSAVLCVCAAAWCSQSLAAAAAVAAAGGRSDGGNFLDDKQWLTTISQYDKEVGQWNKFRDEVEDDYFRTWSPGKPFDQALDPAKDPCLKMKCSRHKVCIAQDSQTAVCISHRRLTHRMKEAGVDHRQWRGPILSTCKQCPVVYPSPVCGSDGHTYSFQCKLEYQACVLGKQISVKCEGHCPCPSDKPTSTSRNVKRACSDLEFREVANRLRDWFKALHESGSQNKKTKTLLRPERSRFDTSILPICKDSLGWMFNRLDTNYDLLLDQSELRSIYLDKNEQCTKAFFNSCDTYKDSLISNNEWCYCFQRQQDPPCQTELSNIQKRQGVKKLLGQYIPLCDEDGYYKPTQCHGSVGQCWCVDRYGNEVMGSRINGVADCAIDFEISGDFASGDFHEWTDDEDDEDDIMNDEDEIEDDDEDEGDDDDGGDDHDVYI

SEQ ID NO: 12776 - protein, 436 aa, Homo sapiens; identical to SEQ ID NO: 12775

SEQ ID NO: 12777 - protein, 436 aa, Homo sapiens; identical to SEQ ID NO: 12775

SEQ ID NO: 12778 - protein, 436 aa, Homo sapiens; identical to SEQ ID NO: 12775

SEQ ID NO: 12779 - protein, 122 aa, Homo sapiens
MLKVSAVLCVCAAAWCSQSLAAAAAVAAAGGRSDGGNFLDDKQWLTTISQYDKEVGQWNKFRDEVEDDYFRTWSPGKPFDQALDPAKDPCLKMKCSRHKVCIAQDSQTAVCISHRRLTHSAN

SEQ ID NO: 12780 - protein, 122 aa, Homo sapiens; identical to SEQ ID NO: 12779

SEQ ID NO: 12781 - protein, 64 aa, Homo sapiens
MLKVSAVLCVCAAAWCSQSLAAAAAVAAAGGRSDGGNFLDDKQWLTTISQYDKEVGQWNKFRDL

SEQ ID NO: 12782 - protein, 83 aa, Homo sapiens
NFLDDKQWLTTISQYDKEVGQWNKFRDDDYFRTWSPGKPFDQALDPAKDPCLKMKCSRHKVCIAQDSQTAVCISHRRLTHSAN

SEQ ID NO: 12783 - protein, 807 aa, Homo sapiens
MRLSPAPLKLSRTPALLALALPLAAALAFSDETLDKVPKSEGYCSRILRAQGTRREGYTEFSLRVEGDPDFYKPGTSYRVTLSAAPPSYFRGFTLIALRENREGDKEEDHAGTFQIIDEEETQFMSNCPVAVTESTPRRRTRIQVFWIAPPAGTGCVILKASIVQKRIIYFQDEGSLTKKLCEQDSTFDGVTDKPILDCCACGTAKYRLTFYGNWSEKTHPKDYPRRANHWSAIIGGSHSKNYVLWEYGGYASEGVKQVAELGSPVKMEEEIRQQSDEVLTVIKAKAQWPAWQPLNVRAAPSAEFSVDRTRHLMSFLTMMGPSPDWNVGLSAEDLCTKECGWVQKVVQDLIPWDAGTDSGVTYESPNKPTIPQEKIRPLTSLDHPQSPFYDPEGGSITQVARVVIERIARKGEQCNIVPDNVDDIVADLAPEEKDEDDTPETCIYSNWSPWSACSSSTCDKGKRMRQRMLKAQLDLSVPCPDTQDFQPCMGPGCSDEDGSTCTMSEWITWSPCSISCGMGMRSRERYVKQFPEDGSVCTLPTEETEKCTVNEECSPSSCLMTEWGEWDECSATCGMGMKKRHRMIKMNPADGSMCKAETSQAEKCMMPECHTIPCLLSPWSEWSDCSVTCGKGMRTRQRMLKSLAELGDCNEDLEQVEKCMLPECPIDCELTEWSQWSECNKSCGKGHVIRTRMIQMEPQFGGAPCPETVQRKKCRIRKCLRNPSIQKLRWREARESRRSEQLKEESEGEQFPGCRMRPWTAWSECTKLCGGGIQERYMTVKKRFKSSQFTSCKDKKEIRACNVHPC

SEQ ID NO: 12784 - protein, 8 aa, Homo sapiens
MENPSPAA

SEQ ID NO: 12785 - protein, 16 aa, Homo sapiens
MENPSPAAALGKALCA

SEQ ID NO: 12786 - protein, 17 aa, Homo sapiens
MENPSPAAALGKALCAL

SEQ ID NO: 12787 - protein, 24 aa, Homo sapiens
MENPSPAAALGKALCALLLATLGA

SEQ ID NO: 12788 - protein, 61 aa, Homo sapiens
MENPSPAAALGKALCALLLATLGAAGQPLGGESICSARALAKYSITFTGKWSQTAFPKQYP

SEQ ID NO: 12789 - protein, 64 aa, Homo sapiens
MENPSPAAALGKALCALLLATLGAAGQPLGGESICSARALAKYSITFTGKWSQTAFPKQYPLFR

SEQ ID NO: 12790 - protein, 108 aa, Homo sapiens
MENPSPAAALGKALCALLLATLGAAGQPLGGESICSARALAKYSITFTGKWSQTAFPKQYPLFRPPAQWSSLLGAAHSSDYSMWRKNQYVSNGLRDFAERGEAWALMK

SEQ ID NO: 12791 - protein, 331 aa, Homo sapiens
MENPSPAAALGKALCALLLATLGAAGQPLGGESICSARALAKYSITFTGKWSQTAFPKQYPLFRPPAQWSSLLGAAHSSDYSMWRKNQYVSNGLRDFAERGEAWALMKEIEAAGEALQSVHAVFSAPAVPSGTGQTSAELEVQRRHSLVSFVVRIVPSPDWFVGVDSLDLCDGDRWREQAALDLYPYDAGTDSGFTFSSPNFATIPQDTVTEITSSSPSHPANSFYYPRLKALPPIARVTLVRLRQSPRAFIPPAPVLPSRDNEIVDSASVPETPLDCEVSLWSSWGLCGGHCGRLGTKSRTRYVRVQPANNGSPCPELEEEAECVPDNCV

SEQ ID NO: 12792 - protein, 331 aa, Homo sapiens; identical to SEQ ID NO: 12791

SEQ ID NO: 12793 - protein, 331 aa, Homo sapiens; identical to SEQ ID NO: 12791

SEQ ID NO: 12794 - protein, 314 aa, Homo sapiens
MRIAVICFCLLGITCAIPVKQADSGSSEEKQLYNKYPDAVATWLNPDPSQKQNLLAPQNAVSSEETNDFKQETLPSKSNESHDHMDDMDDEDDDDHVDSQDSIDSNDSDDVDDTDDSHQSDESHHSDESDELVTDFPTDLPATEVFTPVVPTVDTYDGRGDSVVYGLRSKSKKFRRPDIQYPDATDEDITSHMESEELNGAYKAIPVAQDLNAPSDWDSRGKDSYETSQLDDQSAETHSHKQSRLYKRKANDESNEHSDVIDSQELSKVSREFHSHEFHSHEDMLVVDPKSKEEDKHLKFRISHELDSASSEVN

SEQ ID NO: 12795 - protein, 292 aa, Homo sapiens
MRIAVICFCLLGITCAIPVKQADSGSSEEKQLYNKYPDAVATWLNPDPSQKQNLLAPQNAVSSEETNDFKQETLPSKSNESHDHMDDMDDEDDDSHQSDESHHSDESDELVTDFPTDLPATEVFTPVVPTVDTYDGRGDSVVYGLRSKSKKFRRPDIQYPDATDEDITSHMESEELNGAYKAIPVAQDLNAPSDWDSRGKDSYETSQLDDQSAETHSHKQSRLYKRKANDESNEHSDVIDSQELSKVSREFHSHEFHSHEDMLVVDPKSKEEDKHLKFRISHELDSASSEVN

SEQ ID NO: 12796 - protein, 300 aa, Homo sapiens
MRIAVICFCLLGITCAIPVKQADSGSSEEKQLYNKYPDAVATWLNPDPSQKQNLLAPQTLPSKSNESHDHMDDMDDEDDDDHVDSQDSIDSNDSDDVDDTDDSHQSDESHHSDESDELVTDFPTDLPATEVFTPVVPTVDTYDGRGDSVVYGLRSKSKKFRRPDIQYPDATDEDITSHMESEELNGAYKAIPVAQDLNAPSDWDSRGKDSYETSQLDDQSAETHSHKQSRLYKRKANDESNEHSDVIDSQELSKVSREFHSHEFHSHEDMLVVDPKSKEEDKHLKFRISHELDSASSEVN

SEQ ID NO: 12797 - protein, 287 aa, Homo sapiens
MRIAVICFCLLGITCAIPVKQADSGSSEEKQNAVSSEETNDFKQETLPSKSNESHDHMDDMDDEDDDDHVDSQDSIDSNDSDDVDDTDDSHQSDESHHSDESDELVTDFPTDLPATEVFTPVVPTVDTYDGRGDSVVYGLRSKSKKFRRPDIQYPDATDEDITSHMESEELNGAYKAIPVAQDLNAPSDWDSRGKDSYETSQLDDQSAETHSHKQSRLYKRKANDESNEHSDVIDSQELSKVSREFHSHEFHSHEDMLVVDPKSKEEDKHLKFRISHELDSASSEVN

SEQ ID NO: 12798 - protein, 241 aa, Homo sapiens
MRIAVICFCLLGITCAIPVKQADSGSSEEKQTLPSKSNESHDHMDDMDDEDDDDHVDSQDSIDSNDSDDVDDTDDSHQSDESHHSDESDELVTDFPTDLPATEVFTPVVPTVDTYDGRGDSVVYGLRSKSKKFRRPDIQYPDATDEDITSHMESEELNGAYKAIPVAQDLNAPSDWDSRGKDSYETSQLDDQSAETHSHKQSRLYKRKANDESNEHSDVIDSQELSKVSREFHSHEFHSHE

SEQ ID NO: 12799 - protein, 211 aa, Homo sapiens
MISRMEKMTMMMKILIMFALGMNYWSCSGFPVYDYDPSSLRDALSASVVKVNSQSLSPYLFRAFRSSLKRVEVLDENNLVMNLEFSIRETTCRKDSGEDPATCAFQRDYYVSTAVCRSTVKVSAQQVQGVHARCSWSSSTSESYSSEEMIFGDMLGSHKWRNNYLFGLISDESISEQFYDRSLGIMRRVLPPGNRRYPNHRHRARINTDFE

SEQ ID NO: 12800 - protein, 211 aa, Homo sapiens; identical to SEQ ID NO: 12799

SEQ ID NO: 12801 - protein, 131 aa, Homo sapiens
MNLEFSIRETTCRKDSGEDPATCAFQRDYYVSTAVCRSTVKVSAQQVQGVHARCSWSSSTSESYSSEEMIFGDMLGSHKWRNNYLFGLISDESISEQFYDRSLGIMRRVLPPGNRRYPNHRHRARINTDFE

SEQ ID NO: 12802 - protein, 151 aa, Homo sapiens
MNWAPATCWALLLAAAFLCDSGAAKGGRGGARGSARGGVRGGARGASRVRVRPAQRYGAPGSSLRVAAAGAAAGAAAGAAAGLAAGSGWRRAAGPGERGLEDEEDGVPGGNGTGPGIYSYRAWTSGAGPTRGPRLCLVLGGALGALGLLRP

SEQ ID NO: 12803 - protein, 442 aa, Homo sapiens
MRRTRRPRFVLMNKMDDLNLHYRFLNWRRRIREIREVRAFRYQERFKHILVDGDTLSYHGNSGEVGCYVASRPLTKDSNYFEVSIVDSGVRGTIAVGLVPQYYSLDHQPGWLPDSVAYHADDGKLYNGRAKGRQFGSKCNSGDRIGCGIEPVSFDVQTAQIFFTKNGKRVGSTIMPMSPDGLFPAVGMHSLGEEVRLHLNAELGREDDSVMMVDSYEDEWGRLHDVRVCGTLLEYLGKGKSIVDVGLAQARHPLSTRSHYFEVEIVDPGEKCYIALGLARKDYPKNRHPGWSRGSVAYHADDGKIFHGSGVGDPFGPRCYKGDIMGCGIMFPRDYILDSEGDSDDSCDTVILSPTARAVRNVRNVMYLHQEGEEEEEEEEEEEDGEEIEPEHEGRKVVVFFTRNGKIIGKKDAVVPSGGFFPTIGMLSCGEKVKVDLHPLSG

SEQ ID NO: 12804 - protein, 165 aa, Homo sapiens
MRRTRRPRFVLMNKMDDLNLHYRFLNWRRRIREIREVRAFRYQERFKHILVDGDTLSYHGNSGEVGCYVASRPLTKDSNYFEVSIVDSGVRGTIAVGLVPQYYSLDHQPGWLPDSVAYHADDGKWALPSCPCPQMDCSQQWACTPWVRRCGCTSTLSWAVRTTAS

SEQ ID NO: 12805 - protein, 479 aa, Homo sapiens
MRRTRRPRVLLCQPGWNVVAQSELTAALTCQTQAIFSLLSSWDYRFVLMNKMDDLNLHYRFLNWRRRIREIREVRAFRYQERFKHILVDGDTLSYHGNSGEVGCYVASRPLTKDSNYFEVSIVDSGVRGTIAVGLVPQYYSLDHQPGWLPDSVAYHADDGKLYNGRAKGRQFGSKCNSGDRIGCGIEPVSFDVQTAQIFFTKNGKRVGSTIMPMSPDGLFPAVGMHSLGEEVRLHLNAELGREDDSVMMVDSYEDEWGRLHDVRVCGTLLEYLGKGKSIVDVGLAQARHPLSTRSHYFEVEIVDPGEKCYIALGLARKDYPKNRHPGWSRGSVAYHADDGKIFHGSGVGDPFGPRCYKGDIMGCGIMFPRDYILDSEGDSDDSCDTVILSPTARAVRNVRNVMYLHQEGEEEEEEEEEEEDGEEIEPEHEGRKVVVFFTRNGKIIGKKDAVVPSGGFFPTIGMLSCGEKVKVDLHPLSG

SEQ ID NO: 12806 - protein, 60 aa, Homo sapiens
  SITE 1: note = misc_feature - Xaa can be any naturally occurring amino acid
XDGEEIEPEHEGRKVVVFFTRNGKIIGKKDAVVPSGGFFPTIGMLSCGEKVKVDLHPLSG

SEQ ID NO: 12807 - protein, 207 aa, Homo sapiens
MALLFARSLRLCRWGAKRLGVASTEAQRGVSFKLEEKTAHSSLALFRDDTGVKYGLVGLEPTKVALNVERFREWAVVLADTAVTSGRHYWEVTVKRSQQFRIGVADVDMSRDSCIGVDDRSWVFTYAQRKWYTMLANEKAPVEGIGQPEKVGLLLEYEAQKLSLVDVSQVSVVHTLQTDFRGPVVPAFALWDGELLTHSGLEVPEGL

SEQ ID NO: 12808 - protein, 59 aa, Homo sapiens
MIVLGWMFFVGLVCYMGTFPELMPPTLKWQERWPVQESKTQLRRRALGEDLLQNHVEGI

SEQ ID NO: 12809 - protein, 59 aa, Homo sapiens; identical to SEQ ID NO: 12808

SEQ ID NO: 12810 - protein, 56 aa, Homo sapiens
MIVLGWMFFVGLVCYMGTFPELMPPTLKWQERWPVQESKTQLRRRALGLALPPRLE

SEQ ID NO: 12811 - protein, 76 aa, Homo sapiens
MIVLGWMFFVGLVCYMGTFPELMPPTLKWQERWPVQESKTQLRRRALGTMWKGYKYPPGGTPVEVSKDDPGEVMQL

SEQ ID NO: 12812 - protein, 40 aa, Homo sapiens
MIVVLWMLLIAGTMWKGYKYPPGGTPVEVSKDDPGEVMQL

SEQ ID NO: 12813 - protein, 40 aa, Homo sapiens; identical to SEQ ID NO: 12812

SEQ ID NO: 12814 - protein, 116 aa, Homo sapiens
MKGLRSLAATTLALFLVFVFLGNSSCAPQRLLERRNWTPQAMLYLKGAQGRRFISDQSRRKDLSDRPLPERRSPNPQLLTIPEAATILLASLQKSPEDEEKNFDQTRFLEDSLLNW

SEQ ID NO: 12815 - protein, 36 aa, Homo sapiens
MLYLKGAQGRRFISDQSRRKDLSDRPLPDEAQIPNY

SEQ ID NO: 12816 - protein, 158 aa, Homo sapiens
MMQKLLKCSRLVLALALILVLESSVQGYPTRRARYQWVRCNPDSNSANCLEEKGPMFELLPGESNKIPRLRTDLFPKTRIQDLNRIFPLSEDYSGSGFGSGSGSGSGSGSGFLTEMEQDYQLVDESDAFHDNLRSLDRNLPSDSQDLGQHGLEEDFML

SEQ ID NO: 12817 - protein, 431 aa, Homo sapiens
MLNEDKPSDDYSAVLQRLRKIYHSSIKPLEQSYKYNELRQHEITDGEITSKPMVLFLGPWSVGKSTMINYLLGLENTRYQLYTGAEPTTSEFTVLMHGPKLKTIEGIVMAADSARSFSPLEKFGQNFLEKLIGIEVPHKLLERVTFVDTPGIIENRKQQERGYPFNDVCQWFIDRADLIFVVFDPTKLDVGLELEMLFRQLKGRESQIRIILNKADNLATQMLMRVYGALFWSLAPLINVTEPPRVYVSSFWPQEYKPDTHQELFLQEEISLLEDLNQVIENRLENKIAFIRQHAIRVRIHALLVDRYLQTYKDKMTFFSDGELVFKDIVEDPDKFYIFKTILAKTNVSKFDLPNREAYKDFFGINPISSFKLLSQQCSYMGGCFLEKIERAITQELPGLLGSLGLGKNPGALNCDKTGCSETPKNRYRKH

SEQ ID NO: 12818 - protein, 473 aa, Homo sapiens
MRALVLLGCLLASLLFSGQAEETEDANEEAPLRDRSHIEKTLMLNEDKPSDDYSAVLQRLRKIYHSSIKPLEQSYKYNELRQHEITDGEITSKPMVLFLGPWSVGKSTMINYLLGLENTRYQLYTGAEPTTSEFTVLMHGPKLKTIEGIVMAADSARSFSPLEKFGQNFLEKLIGIEVPHKLLERVTFVDTPGIIENRKQQERGYPFNDVCQWFIDRADLIFVVFDPTKLDVGLELEMLFRQLKGRESQIRIILNKADNLATQMLMRVYGALFWSLAPLINVTEPPRVYVSSFWPQEYKPDTHQELFLQEEISLLEDLNQVIENRLENKIAFIRQHAIRVRIHALLVDRYLQTYKDKMTFFSDGELVFKDIVEDPDKFYIFKTILAKTNVSKFDLPNREAYKDFFGINPISSFKLLSQQCSYMGGCFLEKIERAITQELPGLLGSLGLGKNPGALNCDKTGCSETPKNRYRKH

SEQ ID NO: 12819 - protein, 486 aa, Homo sapiens
MRALVLLGCLLASLLFSGQAELQVSASGGTEDVGNLLENHFSAGDASLEEKERALYADTAPQDKKLLLHYPDGREAESPKKTPASAASAGPDPEASLSNASATESPPPGERDDRDAAGPGEEKNGPPVASALPPGGAKGPVEEEWPEPSSGEGQGEEETGFGLPTEGTASGEAGGQAGGHELPEEVQEVQGDSLVQGAVAGTAEPKAEGASPHSEGDGVGPLNAEAEGSPGPGEEPAVPEGAPDVAAVGGESEPDIDTQASEGTEDQGEPGPAAEASAEPGGAQSVKAGDTEENQSPEMTEEDADEASSEEESGDGSGSEEEGGVPSEEESEEDSGDGASSEEAEGASEEATEPQEAGEPQEAREPQEGGDLQEAEESQEGGDPQEAEEPQEGGAPQEGGEPQEGGDPQEAREPQEAREPQEGAELPEATGTTSHRDRGAQPGPEELNTESMGSETLDMKAEEPEEGHQGEGESHHCCPGRDGGCK

SEQ ID NO: 12820 - protein, 56 aa, Homo sapiens
MAYSNLLRANMDGLKKRDKKNKTKKTKAAAAAAAAAPAAAATAPTTAATTAATAAQ

SEQ ID NO: 12821 - protein, 56 aa, Homo sapiens; identical to SEQ ID NO: 12820

SEQ ID NO: 12822 - protein, 136 aa, Homo sapiens
MVLLESEQFLTELTRLFQKCRTSGSVYITLKKYDGRTKPIPKKGTVEGFEPADNKCLLRATDGKKKISTVVSSKEVNKFQMAYSNLLRANMDGLKKRDKKNKTKKTKAAAAAAAAAPAAAATAPTTAATTAATAAQ

SEQ ID NO: 12823 - protein, 115 aa, Homo sapiens
MVLLESEQFLTELTRLFQKCRTSGSVYITLKKYDGRTKPIPKKGTVEGFEPADNKCLLRATDGKKKISTVVSSKEVNKFQMVSFGCSLCFPSQGKSQYDSEHWVRLILGFTALRR

SEQ ID NO: 12824 - protein, 444 aa, Homo sapiens
MGSPAHRPALLLLLPPLLLLLLLRVPPSRSFPDTPWCSPIKVKYGDVYCRAPQGGYYKTALGTRCDIRCQKGYELHGSSLLICQSNKRWSDKVICKQKRCPTLAMPANGGFKCVDGAYFNSRCEYYCSPGYTLKGERTVTCMDNKAWSGRPASCVDMEPPRIKCPSVKERIAEPNKLTVRVSWETPEGRDTADGILTDVILKGLPPGSNFPEGDHKIQYTVYDRAENKGTCKFRVKVRVKRCGKLNAPENGYMKCSSDGDNYGATCEFSCIGGYELQGSPARVCQSNLAWSGTEPTCAAMNVNVGVRTAAALLDQFYEKRRLLIVSTPTARNLLYRLQLGMLQQAQCGLDLRHITVVELVGVFPTLIGRIGAKIMPPALALQLRLLLRIPLYSFSMVLVDKHGMDKERYVSLVMPVALFNLIDTFPLRKEEMVLQAEMSQTCNT

SEQ ID NO: 12825 - protein, 405 aa, Homo sapiens
MGSPAHRPALLLLLPPLLLLLLLRVPPSRSFPGSGDSPLEDDEVGYSHPRYKDTPWCSPIKVKYGDVYCRAPQGGYYKTALGTRCDIRCQKGYELHGSSLLICQSNKRWSDKVICKHMEPPRIKCPSVKERIAEPNKLTVRVSWETPEGRDTADGILTDVILKGLPPGSNFPEGDHKIQYTVYDRAENKGTCKFRVKVRVKRCGKLNAPENGYMKCSSDGDNYGATCEFSCIGGYELQGSPARVCQSNLAWSGTEPTCAAMNVNVGVRTAAALLDQFYEKRRLLIVSTPTARNLLYRLQLGMLQQAQCGLDLRHITVVELVGVFPTLIGRIGAKIMPPALALQLRLLLRIPLYSFSMVLVDKHGMDKERYVSLVMPVALFNLIDTFPLRKEEMVLQAEMSQTCNT

SEQ ID NO: 12826 - protein, 464 aa, Homo sapiens
MGSPAHRPALLLLLPPLLLLLLLRVPPSRSFPGSGDSPLEDDEVGYSHPRYKDTPWCSPIKVKYGDVYCRAPQGGYYKTALGTRCDIRCQKGYELHGSSLLICQSNKRWSDKVICKQKRCPTLAMPANGGFKCVDGAYFNSRCEYYCSPGYTLKGERTVTCMDNKAWSGRPASCVDMEPPRIKCPSVKERIAEPNKLTVRVSWETPEGRDTADGILTDVILKGLPPGSNFPEGDHKIQYTVYDRAENKGTCKFRVKVRVKRCGKLNAPENGYMKCSSDGDNYGATCEFSCIGGYELQGSPARVCQSNLAWSGTEPTCAAMNVNVGVRTAAALLDQFYEKRRLLIVSTPTARNLLYRLQLGMLQQAQCGLDLRHITVVELVGVFPTLIGRIGAKIMPPALALQLRLLLRIPLYSFSMVLVDKHGMDKERYVSLVMPVALFNLIDTFPLRKEEMVLQAEMSQTCNT

SEQ ID NO: 12827 - protein, 379 aa, Homo sapiens
MGSPAHRPALLLLLPPLLLLLLLRVPPSRSFPGSGDSPLEDDEVGYSHPRYKDTPWCSPIKVKYGDVYCRAPQGGYYKTALGTRCDIRCQKGYELHGSSLLICQSNKRWSDKVICKQKRCPTLAMPANGGFKCVDGAYFNSRCEYYCSPGYTLKGERTVTCMDNKAWSGRPASCVDMEPPRIKCPSVKERIAEPNKLTVRVSWETPEGRDTADGILTDVILKGLPPGSNFPEGDHKIQYTVYDRAENKGTCKFRVKVRVKRCGKLNAPENGYMKCSSDGDNYGATCEFSCIGGYELQGSPARVCQSNLAWSGTEPTCAAMNVNVGVRTAAALLDQFYEKRRLLIVSTPTARNLLYRLQLGMLQAVAANPTLLLQYGASG

SEQ ID NO: 12828 - protein, 62 aa, Homo sapiens
CAPMKINVNVNSAAGLLDQFYEKQRLLIISAPDPSNRYYKMQISMLQAISAPHSLLLQHGVD

SEQ ID NO: 12829 - protein, 312 aa, Homo sapiens
MASQLTQRGALFLLFFLTPAVTPTWYAGSGYYPDESYNEVYAEEVPQAPALDYRACLSSIATVPRWCYTLNIQDGEATCYSPKGGNYHSSLGTRCELSCDRGFRLIGRRSVQCLPSRRWSGTAYCRQMRCHALPFITSGTYTCTNGVLLDSRCDYSCSSGYHLEGDRSRICMEDGRWSGGEPVCVDIDPPKIRCPHSREKMAEPEKLTARVYWDPPLVKDSADGTITRVTLRGPEPGSHFPEGEHVIRYTAYDRAYNRASCKFIVKVQVRRCPTLKPPQHGYLTCTSAGDNYGATCEYHCDGGYDRQGTPSR

SEQ ID NO: 12830 - protein, 224 aa, Homo sapiens
MASQLTQRGALFLLFFLTPAVTPTWYAGSGYYPDESYNEVYAEEVPQAPALDYRVPRWCYTLNIQDGEATCYSPKGGNYHSSLGTRCELSCDRGFRLIGRRSVQCLPSRRWSGTAYCRQMRCHALPFITSGTYTCTNGVLLDSRCDYSCSSGYHLEGDRSRICMEDGRWSGGEPVCVDIDPPKIRCPHSREKMAEPEKLTARVYWDPPLVKDSADGTITRVTLR

SEQ ID NO: 12831 - protein, 465 aa, Homo sapiens
MASQLTQRGALFLLFFLTPAVTPTWYAGSGYYPDESYNEVYAEEVPQAPALDYRVPRWCYTLNIQDGEATCYSPKGGNYHSSLGTRCELSCDRGFRLIGRRSVQCLPSRRWSGTAYCRQMRCHALPFITSGTYTCTNGVLLDSRCDYSCSSGYHLEGDRSRICMEDGRWSGGEPVCVDIDPPKIRCPHSREKMAEPEKLTARVYWDPPLVKDSADGTITRVTLRGPEPGSHFPEGEHVIRYTAYDRAYNRASCKFIVKVQVRRCPTLKPPQHGYLTCTSAGDNYGATCEYHCDGGYDRQGTPSRVCQSSRQWSGSPPICAPMKINVNVNSAAGLLDQFYEKQRLLIISAPDPSNRYYKMQISMLQQSTCGLDLRHVTIIELVGQPPQEVGRIREQQLSANIIEELRQFQRLTRSYFNMVLIDKQGIDRDRYMEPVTPEEIFTFIDDYLLSNQELTQRREQRDICE

SEQ ID NO: 12832 - protein, 575 aa, Homo sapiens
MHKEAEMLIGPQLDEKRWGWRLGDGSAAPPFLPQALSFLLLLPLASALQPTPLPFQELRLVGGPSRCRGRLEVMHGGSWGSVCDDDWDVVDANVVCRQLGCGLALPVPRPLAFGQGRGPILLDNVECRGQEAALSECGSRGWGVHNCFHYEDVAVLCDEFLPTQPPTRKMLTSRAPPTTLPNGKSEGSVRLVGGANLCQGRVEILHSGLWGTVCDDDWGLPDAAVVCRQLGCGAAMAATTNAFFGYGTGHILLDNVHCEGGEPRLAACQSLGWGVHNCGHHEDAGALCAGLGPPTLTALPSSATREDWAWQTDPSATGVGPQPSRETALLTTAAWAAGKKSGRLRLVGGPGPCRGRVEVLHAGGWGTVCDDDWDFADARVACREAGCGPALGATGLGHFGYGRGPVLLDNVGCAGTEARLSDCFHLGWGQHNCGHHEDAGALCAGPEELGLQVQQDGSETTRVPTPRPRDGHLRLVNGAHRCEGRVELYLGQRWGTVCDDAWDLRAAGVLCRQLGCGQALAAPGEAHFGPGRGPILLDNVKCRGEESALLLCSHIRWDAHNCDHSEDASVLCQPS

SEQ ID NO: 12833 - protein, 118 aa, Homo sapiens
DAGAVCDGMPLGYVPPTAPTDSNNSTPREAASRPPSTMTSQAPGTAGVSPPPASPTVLWEPGPEAGPPGLDSISDPFSWSWIPGLGRDRDAWLPGELATKPSASVTASVLEKTTTKAP

SEQ ID NO: 12834 - protein, 90 aa, Homo sapiens
MRVLACLLAALVGIQAVERLRLADGPHGCAGRLEVWHGGRWGTVCDDGWDLRDAAVACRQLGCGGALAAPGGAFFGEGAGPVWLSELACR

SEQ ID NO: 12835 - protein, 1573 aa, Homo sapiens
MRVLACLLAALVGIQAVERLRLADGPHGCAGRLEVWHGGRWGTVCDDGWDLRDAAVACRQLGCGGALAAPGGAFFGEGAGPVWLSELACRGNEGQLGLCHHRGWKAHICSHEEDAGVVCAGQRVANSRDDSTSPLDGAPWPGLLLELSPSTEEPLVTHAPRPAGNPQNASRKKSPRPKQAKSTRAPLLTTGAPRQERLRLVSGPHRCAGRLEVWHGGRWGTVCDDGWDLRDAAVACRELGCGGALAAPGGARFGPGAGPVWMDDVGCGGGEQALRDCPRSPWGRSNCDHSEDAGLVCTGPAPRLRLADGPHGCAGRLEVWHGGRWGSVCDDAWDLRDAAVACRELGCGGALAAPGGAFFGEGSGPIILDDLRCRGNETALRFCPARPWGQHDCHHREDAGAVCDGMPLGYVPPTAPTDSNNSTPREAASRPPSTMTSQAPGTAGVSPPPASPTVLWEPGPEAGSPQLRLVAGPSKCSGRLEVWHDQRWGTVCDDSWDMRDSAVVCRELGCGGPQQPDPAAGRFGWGAGPIWLDDVGCVGTEASLSDCPAAPWGKHNCAHNEDVGVTCTGPPGLDSISDPFSWSWIPGLGRDRDAWLPGELATKPSASVTASVLEKTTTKAPGKMPKSTKKWVTKNAKRPTTQPPVMPTTKHSRAQSPPDLTSQTTAALTTEASRRPTSEFTRRPTTEAPQRWTSHTTATLTPQAPRERTTKTMAMLTTQGPQEMTSESTIKSIPQASLEPSAEIPEGSPESPKDPAPSPSVSTTGESGLFRVRLADGPNRCAGRLEVWHAGRWGTVCDDNWDLRDATVACWELGCGKVRPRVGKTHYGPGTGPIWLDDMGCKGSEASLSDCPSGAWGKHNCDHEEDVGLTCTGYTDYDDYPPWTWDPTSREDLAKGTTTAGVPGHTLPWRTTRRPGSSSPAIRRLPDTGSKDGYKLPWTWDTPSGRGLAEGTPTAGKLGPTLGAGTTRSPGSPPTLRVHGDTGSPRKPWPERRPPRPAATRTAPPTPSPGPSASPGPPGPALTSDSSRELTPHSALTSEATSDAPDTSPPTPDPASRTNPDLILTSPDFALSTPDSSVVPALTPEPSPTPLPTLPKELTSDPSTPSEVTSLSPTSEQVPESDTTPDLDTTPYSSTVSEYSRSPDPSPSPHPTTTPDPTMAPDPITTLNPTVTPHFPTTPHPTTTPHPTTITHSTMIPDPTTTPQPFTTITHSTMIPDPTTTPQPFTTMQPTTTPHSTTPHPTTTPHPTTITHSTMIPDPTTTPQPFTTMQPTTMPHPTTTPHPTTTPHPTTTPHPTTTPHPTMTPDPTTTPYPTTTPDPTTTPHPTTPDPSSTPVITTVSLPTSLGTELSSPTLAPTVKPSLHPQLTFTAPAPHTSTSQIPTLEPSPALESSPSRSSTATSMDPLSTEDFKPPRSQSPNLTPPPTHTPHSASDLTVSPDPLLSPTAHPLDHPPLDPLTLGPTPGQSPGPHGPCVAPTPPVRVMACEPPALVELVAAVRDVGGQLQRLTQVVEQERQERQALLLGLTQLVEAARGLGQLGEAVKRLAEMAWTTSMPAPTTTTPEEEERPLRGDV

SEQ ID NO: 12836 - protein, 951 aa, Homo sapiens
MRVLACLLAALVGIQAVERLRLADGPHGCAGRLEVWHGGRWGTVCDDGWDLRDAAVACRQLGCGGALAAPGGAFFGEGAGPVWLSELACRGNEGQLGLCHHRGWKAHICSHEEDAGVVCAGQRVANSRDDSTSPLDGAPWPGLLLELSPSTEEPLVTHAPRPAGNPQNASRKKSPRPKQAKSTRAPLLTTGAPRQERLRLVSGPHRCAGRLEVWHGGRWGTVCDDGWDLRDAAVACRELGCGGALAAPGGARFGPGAGPVWMDDVGCGGGEQALRDCPRSPWGRSNCDHSEDAGLVCTGPAPRLRLADGPHGCAGRLEVWHGGRWGSVCDDAWDLRDAAVACRELGCGGALAAPGGAFFGEGSGPIILDDLRCRGNETALRFCPARPWGQHDCHHREDAGAVCDGMPLGYVPPTAPTDSNNSTPREAASRPPSTMTSQAPGTAGVSPPPASPTVLWEPGPEAGSPQLRLVAGPSKCSGRLEVWHDQRWGTVCDDSWDMRDSAVVCRELGCGGPQQPDPAAGRFGWGAGPIWLDDVGCVGTEASLSDCPAAPWGKHNCAHNEDVGVTCTGPPGLDSISDPFSWSWIPGLGRDRDAWLPGELATKPSASVTASVLEKTTTKAPGKMPKSTKKWVTKNAKRPTTQPPVMPTTKHSRAQSPPDLTSQTTAALTTEASRRPTSEFTRRPTTEAPQRWTSHTTATLTPQAPRERTTKTMAMLTTQGPQEMTSESTIKSIPQASLEPSAEIPEGSPESPKDPAPSPSVSTTGESGLFRVRLADGPNRCAGRLEVWHAGRWGTVCDDNWDLRDATVACWELGCGKVRPRVGKTHYGPGTGPIWLDDMGCKGSEASLSDCPSGAWGKHNCDHEEDVGLTCTGYTDYDDYPPWTWDPTSREDLAKGTTTAGVPGHTLPWRTTRRPGSSSPAIRRLPDTEPEAGAPRGDAPRSRTARVAAPP

SEQ ID NO: 12837 - protein, 5150 aa, Homo sapiens
MLLPALLFGMAWALADGRWCEWTETIRVEEEVAPRQEDLVPCASLDHYSRLGWRLDLPWSGRSGLTRSPAPGLCPIYKPPETRPAKWNRTVRTCCPGWGGAHCTEALAKASPEGHCFAMWQCQLQAGSANASAGSLEECCARPWGQSWWDGSSQACRSCSSRHLPGSASSPALLQPLAGAVGQLWSQHQRPSATCASWSGFHYRTFDGRHYHFLGRCTYLLAGAADSTWAVHLTPGDRCPQPGHCQRVTMGPEEVLIQAGNVSVKGQLVPEGQSWLLHGLSLQWLGDWLVLSGGLGVVVRLDRTGSISISVDHELWGQTQGLCGLYNGWPEDDFMEPGGGLAMLAATFGNSWRLPGSESGCLDAVEVAQGCDSPLGLIDADVEPGHLRAEAQDVCHQLLEGPFGQCHAQVSPAEYHEACLFAYCAGAMAGSGQEGRQQAVCATFASYVQACARRHIHIRWRKPGFCERLCPGGQLYSDCVSLCPPSCEAVGQGEEESCREECVSGCECPRGLFWNGTLCVPAAHCPCYYCRQRYVPGDTVRQLCNPCVCRDGRWHCAQALCPAECAVGGDGHYLTFDGRSYSFWGGQGCRYSLVQDYVKGQLLILLEHGACDAGSCLHAISVSLEDTHIQLRDSGAVLVNGQDVGLPWIGAEGLSVRRASSAFLLLRWPGAQVLWGLSDPVAYITLDPRHAHQVQGLCGTFTQNQQDDFLTPAGDVETSIAAFASKFQVAGKGRCPSEDSALLSPCTTHSQRHAFAEAACAILHSSVFQECHRLVDKEPFYLRCLAAVCGCDPGSDCLCPVLSAYARRCAQEGASPPWRNQTLCPVMCPGGQEYRECAPACGQHCGKPEDCGELGSCVAGCNCPLGLLWDPEGQCVPPSLCPCQLGARRYAPGSATMKECNRCICQERGLWNCTARHCPSQAFCPRELVYAPGACLLTCDSPSANHSCPAGSTDGCVCPPGTVLLDERCVPPDLCPCRHSGQWYLPNATIQEDCNVCVCRGRQWHCTGQRRSGRCQASGAPHYVTFDGLAFTYPGACEYLLVREASGLFTVSAQNLPCGASGLTCTKALAVRLEGTVVHMLRGRAVTVNGVSVTPPKVYTGPGLSLRRAGLFLLLSTHLGLTLLWDGGTRVLVQLSPQFRGRVAGLCGDFDGDASNDLRSRQGVLEPTAELAAHSWRLSPLCPEPGDLPHPCTMNTHRAGWARARCGALLQPLFTLCHAEVPPQQHYEWCLYDACGCDSGGDCECLCSAIATYADECARHGHHVRWRSQELCSLQCEGGQVYEACGPTCPPTCHEQHPEPGWHCQVVACVEGCFCPEGTLLHGGACLEPASCPCEWGRNSFPPGSVLQKDCGNCTCQEGQWHCGGDGGHCEELVPACAEGEALCQENGHCVPHGWLCDNQDDCGDGSDEEGCAAPGCGEGQMTCSSGHCLPLALLCDRQDDCGDGTDEPSYPCPQGLLACADGRCLPPALLCDGHPDCLDAADEESCLGQVTCVPGEVSCVDGTCLGAIQLCDGVWDCPDGADEGPGHCPLPSLPTPPASTLPGPSPGSLDTASSPLASASPAPPCGPFEFRCGSGECTPRGWRCDQEEDCADGSDERGCGGPCAPHHAPCARGPHCVSPEQLCDGVRQCPDGSDEGPDACGGLPALGGPNRTGLPCPEYTCPNGTCIGFQLVCDGQPDCGRPGQVGPSPEEQGCGAWGPWSPWGPCSRTCGPWGQGRSRRCSPLGLLVLQNCPGPEHQSQACFTAACPVDGEWSTWSPWSVCSEPCRGTMTRQRQCHSPQNGGRTCAALPGGLHSTRQTKPCPQDGCPNATCSGELMFQPCAPCPLTCDDISGQVTCPPDWPCGSPGCWCPEGQVLGSEGWCVWPRQCPCLVDGARYWPGQRIKADCQLCICQDGRPRRCRLNPDCAVDCGWSSWSPWAKCLGPCGSQSIQWSFRSSNNPRPSGRGRQCRGIHRKARRCQTEPCEGCEHQGQVHRVGERWHGGPCRVCQCLHNLTAHCSPYCPLGSCPQGWVLVEGTGESCCHCALPGENQTVQPMATPAAAPAPSPQIRFPLATYILPPSGDPCYSPLGLAGLAEGSLHASSQQLEHPTQAALLGAPTQGPSPQGWHAGGDAYAKWHTRPHYLQLDLLQPRNLTGILVPETGSSNAYASSFSLQFSSNGLHWHDYRDLLPGILPLPKLFPRNWDDLDPAVWTFGRMVQARFVRVWPHDVHHSDVPLQVELLGCEPGSPPAPLCPGVGLRCASGECVLRGGPCDGVLDCEDGSDEEGCVLLPEGTGRFHSTAKTLALSSAQPGQLLHWPREGLAETEHWPPGQESPTSPTETRPVSPGPASGVPHHGESVQMVTTTPIPQMEARTLPPGMAAVTVVPPHPVTPATPAGQSVAPGPFPPVQCGPGQTPCEVLGCVEQAQVCDGREDCLDGSDERHCARNLLMWLPSLPALWAASTVPFMMPTMALPGLPASRALCSPSQLSCGSGECLSAERRCDLRPDCQDGSDEDGCVDCVLAPWSVWSSCSRSCGLGLTFQRQELLRPPLPGGSCPRDRFRSQSCFVQACPVAGAWAMWEAWGPCSVSCGGGHQSRQRSCVDPPPKNGGAPCPGASQERAPCGLQPCSGGTDCELGRVYVSADLCQKGLVPPCPPSCLDPKANRSCSGHCVEGCRCPPGLLLHDTRCLPLSECPCLVGEELKWPGVSFLLGNCSQCVCEKGELLCQPGGCPLPCGWSAWSSWAPCDRSCGSGVRARFRSPSNPPAAWGGAPCEGDRQELQGCHTVCGTEVFGWTPWTSWSSCSQSCLAPGGGPGWRSRSRLCPSPGDSSCPGDATQEEPCSPPVCPVPSIWGLWAPWSTCSAPCDGGIQTRGRSCSSLAPGDTTCPGPHSQTRDCNTQPCTAQCPENMLFRSAEQCHQEGGPCPRLCLTQGPGIECTGFCAPGCTCPPGLFLHNASCLPRSQCPCQLHGQLYASGAMARLDSCNNCTCVSGKMACTSERCPVACGWSPWTLWSLCSCSCNVGIRRRFRAGTAPPAAFGGAECQGPTMEAEFCSLRPCPGPGGEWGPWSPCSVPCGGGYRNRTRGSSRSLMEFSTCGLQPCAGPVPGMCPRDKQWLDCAQGPASCAELSAPRGTNQTCHPGCHCPSGMLLLNNVCVPTQDCPCAHEGHLYPPGSTVVRPCENCSCVSGLIANCSSWPCAEGEPTWSPWTPWSQCSASCGPARCHRHRFCARSPSAVPSTVAPLPLPATPTPLCSGPEAEEEPCLLQGCDRAGGWGPWGPWSHCSRSCGGGLRSRTRACDQPPPQGLGDYCEGPRAQGEVCQALPCPVTNCTAIEGAEYSPCGPPCPRSCDDLVHCVWRCQPGCYCPPGQVLSSNGAICVQPGHCSCLDLLTGQRHHPGARLARPDGCNHCTCLEGRLNCTDLPCPVPGGWCPWSEWTMCSQPCRGQTRSRSRACACPTPQHGGAPCTGEAGEAGAQHQREACPSYATCPVDGAWGPWGPWSPCDMCLGQSHRSRACSRPPTPEGGRPCPGNHTQSRPCQENSTQCTDCGGGQSLHPCGQPCPRSCQDLSPGSVCQPGSVGCQPTCGCPLGQLSQDGLCVPPAHCRCQYQPGAMGIPENQSRSAGSRFSSWESLEPGEVVTGPCDNCTCVAGILQCQEVPDCPDPGVWSSWGPWEDCSVSCGGGEQLRSRRCARPPCPGPARQSRTCSTQVCREAGCPAGRLYRECQPGEGCPFSCAHVTQQVGCFSEGCEEGCHCPEGTFQHRLACVQECPCVLTAWLLQELGATIGDPGQPLGPGDELDSGQTLRTSCGNCSCAHGKLSCSLDDCFEADGGFGPWSPWGPCSRSCGGLGTRTRSRQCVLTMPTLSGQGCRGPRQDLEYCPSPDCPGAEGSTVEPVTGLPGGWGPWSSWSPCSRSCTDPARPAWRSRTRLCLANCTMGDPLQERPCNLPSCTELPVCPGPGCGAGNCSWTSWAPWEPCSRSCGVGQQRRLRAYRPPGPGGHWCPNILTAYQERRFCNLRACPVPGGWSRWSPWSWCDRSCGGGQSLRSRSCSSPPSKNGGAPCAGERHQARLCNPMPCEAGCPAGMEVVTCANRCPRRCSDLQEGIVCQDDQVCQKGCRCPKGSLEQDGGCVPIGHCDCTDAQGHSWAPGSQHQDACNNCSCQAGQLSCTAQPCPPPTHCAWSHWSAWSPCSHSCGPRGQQSRFRSSTSGSWAPECREEQSQSQPCPQPSCPPLCLQGTRSRTLGDSWLQGECQRCSCTPEGVICEDTECAVPEAWTLWSSWSDCPVSCGGGNQVRTRACRAAAPHHRSPPCLGPDTQTRQQPCPGLLEACSWGPWGPCSRSCGPGLASRSGSCPCLMAKADPTCNSTFLHLDTQGCYSGPCPEECVWSSWSSWTRCSCRVLVQQRYRHQGPASRGARAGAPCTRLDGHFRPCLISNCSEDSCTPPFEFHACGSPCAGLCATHLSHQLCQDLPPCQPGCYCPKGLLEQAGGCIPPEECNCWHTSAAGAGMTLAPGDRLQLGCKECECRRGELHCTSQGCQGLLPLSEWSEWSPCGPCLPPSALAPASRTALEEHWLRDPTGLSPTLAPLLASEQHRHRLCLDPATGRPWTGAPHLCTAPLSQQRLCPDPGACPDSCQWSLWGPWSPCQVPCSGGFRLRWREAEALCGGGCREPWAQESCNGGPCPESCEAQDTVFTLDCANQCPHSCADLWDRVQCLQGPCRPGCRCPPGQLVQDGRCVPISSCRCGLPSANASWELAPAQAVQLDCQNCTCVNESLVCPHQECPVLGPWSAWSSCSAPCGGGTMERHRTCEGGPGVAPCQAQDTEQRQECNLQPCPECPPGQVLSACATSCPCLCWHLQPGAICVQEPCQPGCGCPGGQLLHNGTCVPPTACPCTQHSLPWGLTLTLEEQAQELPPGTVLTRNCTRCVCHGGAFSCSLVDCQVPPGETWQQVAPGELGLCEQTCLEMNATKTQSNCSSARASGCVCQPGHFRSQAGPCVPEDHCECWHLGRPHLPGSEWQEACESCLCLSGRPVCTQHCSPLTCAQGEEMVLEPGSCCPSCRREAPEEQSPSCQLLTELRNFTKGTCYLDQVEVSYCSGYCPSSTHVMPEEPYLQSQCDCCSYRLDPESPVRILNLRCLGGHTEPVVLPVIHSCQCSSCQGGDFSKR

SEQ ID NO: 12838 - protein, 115 aa, Homo sapiens [sequence omitted]

SEQ ID NO: 12839 - protein, 62 aa, Homo sapiens
MRLLSFVVLALFAVTQAEEGARLLASKSLLNRYAVEGRDLTLQYNIYNVGSRHVHEEKLRQG

SEQ ID NO: 12840 - protein, 86 aa, Homo sapiens
MRLLSFVVLALFAVTQAEEGARLLASKSLLNRYAVEGRDLTLQYNIYNVGSRLALPVHLDREESWLSGSLTGDSPLIFWTGQPLGS

SEQ ID NO: 12841 - protein, 147 aa, Homo sapiens
MRLLSFVVLALFAVTQAEEGARLLASKSLLNRYAVEGRDLTLQYNIYNVGSSAALDVELSDDSFPPEDFGIVSGMLNVKWDRIAPASNVSHTVVLRPLKAGYFNFTSATITYLAQEDGPVVIGSTSAPGQGGILAQREFDRRFSPHF

SEQ ID NO: 12842 - protein, 183 aa, Homo sapiens
MRLLSFVVLALFAVTQAEEGARLLASKSLLNRYAVEGRDLTLQYNIYNVGSSAALDVELSDDSFPPEDFGIVSGMLNVKWDRIAPASNVSHTVVLRPLKAGYFNFTSATITYLAQEDGPVVIGSTSAPGQGGILAQREFDRRFSPHFLDWAAFGVMTLPSIGIPLLLWYSSKRKYDTPKTKKN

SEQ ID NO: 12843 - protein, 183 aa, Homo sapiens; identical to SEQ ID NO: 12842

SEQ ID NO: 12844 - protein, 133 aa, Homo sapiens
MRLLSFVVLALFAVTQAEEGARLLASKSLLNRYAVEGRDLTLQYNIYNVGSSAALDVELSDDSFPPEDFGIVSGMLNVKWDRIAPASNVSHTVVLRPLKAGYFNFTSATITYLAQEDGPVVNQPQDSLVLPGS

SEQ ID NO: 12845 - protein, 133 aa, Homo sapiens; identical to SEQ ID NO: 12844

SEQ ID NO: 12846 - protein, 93 aa, Homo sapiens
MRLLSFVVLALFAVTQAEEGARLLASKSLLNRYAVEGRDLTLQYNIYNVGSSAALDVELSDDSFPPEDFGIVSGMLNVKWDRIAPWTGQPLGS

SEQ ID NO: 12847 - protein, 90 aa, Homo sapiens
MRLLSFVVLALFAVTQAEEGARLLASKSLLNRYAVEGRDLTLQYNIYNVGSSAALDVELSDDSFPPEDFGIVSGMLNVKWDRIAPYPLGT

SEQ ID NO: 12848 - protein, 116 aa, Homo sapiens
MLSCRLQCALAALSIVLALGCVTGAPSDPRLRQFLQKSLAAAAGKQELAKYFLAELLSEPNQTENDALEPEDLSQAAEQDEMRLELQRSANSNPAMAPRERKAGCKNFFWKTFTSC

SEQ ID NO: 12849 - protein, 46 aa, Homo sapiens
MLEKRSVGCRRCAVVGNSGNLRESSYGPEIDSHDFVLRMNKAPTAG

SEQ ID NO: 12850 - protein, 97 aa, Homo sapiens
MLEKRSVGCRRCAVVGNSGNLRESSYGPEIDSHDFVLRMNKAPTAGFEADVGTKTTHHLVYPESFRELGDNVSMILVPFKTIDLEWVVSAITTGTIS

SEQ ID NO: 12851 - protein, 47 aa, Homo sapiens
MVTLRKRTLKVLTFLVLFIFLTSFFLNYSHTMVATTWFPKQMVLELS

SEQ ID NO: 12852 - protein, 49 aa, Homo sapiens
MVTLRKRTLKVLTFLVLFIFLTSFFLNYSHTMVATTWFPKQMVLELSEN

SEQ ID NO: 12853 - protein, 72 aa, Homo sapiens
MVTLRKRTLKVLTFLVLFIFLTSFFLNYSHTMVATTWFPKQMVLELSENLKRLIKHRPCTCTHCIGQRKLSA

SEQ ID NO: 12854 - protein, 340 aa, Homo sapiens
MVTLRKRTLKVLTFLVLFIFLTSFFLNYSHTMVATTWFPKQMVLELSENLKRLIKHRPCTCTHCIGQRKLSAWFDERFNQTMQPLLTAQNALLEDDTYRWWLRLQREKKPNNLNDTIKELFRVVPGNVDPMLEKRSVGCRRCAVVGNSGNLRESSYGPEIDSHDFVLRMNKAPTAGFEADVGTKTTHHLVYPESFRELGDNVSMILVPFKTIDLEWVVSAITTGTISHTYIPVPAKIRVKQDKILIYHPAFIKYVFDNWLQGHGRYPSTGILSVIFSMHVCDEVDLYGFGADSKGNWHHYWENNPSAGAFRKTGVHDADFESNVTATLASINKIRIFKGR

SEQ ID NO: 12855 - protein, 340 aa, Homo sapiens; identical to SEQ ID NO: 12854

SEQ ID NO: 12856 - protein, 340 aa, Homo sapiens; identical to SEQ ID NO: 12854

SEQ ID NO: 12857 - protein, 332 aa, Homo sapiens
MCPAGWKLLAMLALVLVVMVWYSISREDRYIELFYFPIPEKKEPCLQGEAESKASKLFGNYSRDQPIFLRLEDYFWVKTPSAYELPYGTKGSEDLLLRVLAITSSSIPKNIQSLRCRRCVVVGNGHRLRNSSLGDAINKYDVVIRLNNAPVAGYEGDVGSKTTMRLFYPESAHFDPKVENNPDTLLVLVAFKAMDFHWIETILSDKKRVRKGFWKQPPLIWDVNPKQIRILNPFFMEIAADKLLSLPMQQPRKIKQKPTTGLLAITLALHLCDLVHIAGFGYPDAYNKKQTIHYYEQITLKSMAGSGHNVSQEALAIKRMLEMGAIKNLTSF

SEQ ID NO: 12858 - protein, 328 aa, Homo sapiens
MCPAGWKLLAMLALVLVVMVWYSISREDSFYFPIPEKKEPCLQGEAESKASKLFGNYSRDQPIFLRLEDYFWVKTPSAYELPYGTKGSEDLLLRVLAITSSSIPKNIQSLRCRRCVVVGNGHRLRNSSLGDAINKYDVVIRLNNAPVAGYEGDVGSKTTMRLFYPESAHFDPKVENNPDTLLVLVAFKAMDFHWIETILSDKKRVRKGFWKQPPLIWDVNPKQIRILNPFFMEIAADKLLSLPMQQPRKIKQKPTTGLLAITLALHLCDLVHIAGFGYPDAYNKKQTIHYYEQITLKSMAGSGHNVSQEALAIKRMLEMGAIKNLTSF

SEQ ID NO: 12859 - protein, 322 aa, Homo sapiens
MLALVLVVMVWYSISREDRYIELFYFPIPEKKEPCLQGEAESKASKLFGNYSRDQPIFLRLEDYFWVKTPSAYELPYGTKGSEDLLLRVLAITSSSIPKNIQSLRCRRCVVVGNGHRLRNSSLGDAINKYDVVIRLNNAPVAGYEGDVGSKTTMRLFYPESAHFDPKVENNPDTLLVLVAFKAMDFHWIETILSDKKRVRKGFWKQPPLIWDVNPKQIRILNPFFMEIAADKLLSLPMQQPRKIKQKPTTGLLAITLALHLCDLVHIAGFGYPDAYNKKQTIHYYEQITLKSMAGSGHNVSQEALAIKRMLEMGAIKNLTSF

SEQ ID NO: 12860 - protein, 153 aa, Homo sapiens
MRLFYPESAHFDPKVENNPDTLLVLVAFKAMDFHWIETILSDKKRVRKGFWKQPPLIWDVNPKQIRILNPFFMEIAADKLLSLPMQQPRKIKQKPTTGLLAITLALHLCDLVHIAGFGYPDAYNKKQTIHYYEQITLKSMAGSGHNVSQEALA

SEQ ID NO: 12861 - protein, 47 aa, Homo sapiens
MSVLSGPGWTTGCPWPQNHPNPCHISGREVARGSRDDSSPQESCCLL

SEQ ID NO: 12862 - protein, 339 aa, Homo sapiens
MVSKSRWKLLAMLALVLVVMVWYSISREDRYIELFYFPIPEKKEPCLQGEAESKASKLFGKLSPLCSYSRDQPIFLRLEDYFWVKTPSAYELPYGTKGSEDLLLRVLAITSSSIPKNIQSLRCRRCVVVGNGHRLRNSSLGDAINKYDVVIRLNNAPVAGYEGDVGSKTTMRLFYPESAHFDPKVENNPDTLLVLVAFKAMDFHWIETILSDKKRVRKGFWKQPPLIWDVNPKQIRILNPFFMEIAADKLLSLPMQQPRKIKQKPTTGLLAITLALHLCDLVHIAGFGYPDAYNKKQTIHYYEQITLKSMAGSGHNVSQEALAIKRMLEMGAIKNLTSF

SEQ ID NO: 12863 - protein, 93 aa, Homo sapiens
MVSKSRWKLLAMLALVLVVMVWYSISREDRYIELFYFPIPEKKEPCLQGEAESKASKLFGNYSRDQPIFLRLEDYFWVKTPSAYELPYGTKGS

SEQ ID NO: 12864 - protein, 126 aa, Homo sapiens
MVSKSRWKLLAMLALVLVVMVWYSISREDRYIELFYFPIPEKKEPCLQGEAESKASKLFGNYSRDQPIFLRLEDYFWVKTPSAYELPYGTKGSASGAAAVWSWGTGTGCGTAHWEMPSTSTMWSSD

SEQ ID NO: 12865 - protein, 111 aa, Homo sapiens
MVSKSRWKLLAMLALVLVVMVWYSISREDRYIELFYFPIPEKKEPCLQGEAESKASKLFGNYSRDQPIFLRLEDYFWVKTPSAYELPYGTKGSEDLLLRVLAITSSSIPKN

SEQ ID NO: 12866 - protein, 209 aa, Homo sapiens
MVSKSRWKLLAMLALVLVVMVWYSISREDRYIELFYFPIPEKKEPCLQGEAESKASKLFGNYSRDQPIFLRLEDYFWVKTPSAYELPYGTKGSEDLLLRVLAITSSSIPKNIQSLRCRRCVVVGNGHRLRNSSLGDAINKYDVVIRLNNAPVAGYEGDVGSKTTMRLFYPESAHFDPKVENNPDTLLVLVAFKAMDFHWIETILSDKKR

SEQ ID NO: 12867 - protein, 333 aa, Homo sapiens
MVSKSRWKLLAMLALVLVVMVWYSISREDRYIELFYFPIPEKKEPCLQGEAESKASKLFGNYSRDQPIFLRLEDYFWVKTPSAYELPYGTKGSEDLLLRVLAITSSSIPKNIQSLRCRRCVVVGNGHRLRNSSLGDAINKYDVVIRLNNAPVAGYEGDVGSKTTMRLFYPESAHFDPKVENNPDTLLVLVAFKAMDFHWIETILSDKKRVRKGFWKQPPLIWDVNPKQIRILNPFFMEIAADKLLSLPMQQPRKIKQKPTTGLLAITLALHLCDLVHIAGFGYPDAYNKKQTIHYYEQITLKSMAGSGHNVSQEALAIKRMLEMGAIKNLTSF

SEQ ID NO: 12868 - protein, 333 aa, Homo sapiens; identical to SEQ ID NO: 12867

SEQ ID NO: 12869 - protein, 333 aa, Homo sapiens; identical to SEQ ID NO: 12867

SEQ ID NO: 12870 - protein, 333 aa, Homo sapiens; identical to SEQ ID NO: 12867

SEQ ID NO: 12871 - protein, 329 aa, Homo sapiens
MVSKSRWKLLAMLALVLVVMVWYSISREDSFYFPIPEKKEPCLQGEAESKASKLFGNYSRDQPIFLRLEDYFWVKTPSAYELPYGTKGSEDLLLRVLAITSSSIPKNIQSLRCRRCVVVGNGHRLRNSSLGDAINKYDVVIRLNNAPVAGYEGDVGSKTTMRLFYPESAHFDPKVENNPDTLLVLVAFKAMDFHWIETILSDKKRVRKGFWKQPPLIWDVNPKQIRILNPFFMEIAADKLLSLPMQQPRKIKQKPTTGLLAITLALHLCDLVHIAGFGYPDAYNKKQTIHYYEQITLKSMAGSGHNVSQEALAIKRMLEMGAIKNLTSF

SEQ ID NO: 12872 - protein, 329 aa, Homo sapiens; identical to SEQ ID NO: 12871

SEQ ID NO: 12873 - protein, 178 aa, Homo sapiens
LIPRLQKIWKNYLSMNKYKVSYKGPGPGIKFSAEALRCHLRDHVNVSMVEVTDFPFNTSEWEGYLPKESIRTKAGPWGRCAVVSSAGSLKSSQLGREIDDHDAVLRFNGAPTANFQQDVGTKTTIRLMNSQISVHHCARAARKVAHFPGYTTHPQESLSCCFLVGYHREALPQRQFVQ

SEQ ID NO: 12874 - protein, 25 aa, Homo sapiens
MIHTNLKKKFSCCVLVFLLFAVICV

SEQ ID NO: 12875 - protein, 42 aa, Homo sapiens
MIHTNLKKKFSCCVLVFLLFAVICVWKEKKKGSYYDSFKLQT

SEQ ID NO: 12876 - protein, 45 aa, Homo sapiens
MIHTNLKKKFSCCVLVFLLFAVICVWKEKKKGSYYDSFKLQTKEF

SEQ ID NO: 12877 - protein, 75 aa, Homo sapiens
MIHTNLKKKFSCCVLVFLLFAVICVWKEKKKGSYYDSFKLQTKEFQVLKSLGKLAMGSDSQSVSSSSTQDPHRGR

SEQ ID NO: 12878 - protein, 91 aa, Homo sapiens
MIHTNLKKKFSCCVLVFLLFAVICVWKEKKKGSYYDSFKLQTKEFQVLKSLGKLAMGSDSQSVSSSSTQDPHRGRQTLGSLRGLAKAKPEA

SEQ ID NO: 12879 - protein, 97 aa, Homo sapiens
MIHTNLKKKFSCCVLVFLLFAVICVWKEKKKGSYYDSFKLQTKEFQVLKSLGKLAMGSDSQSVSSSSTQDPHRGRQTLGSLRGLAKAKPEASFQVWN

SEQ ID NO: 12880 - protein, 98 aa, Homo sapiens
MIHTNLKKKFSCCVLVFLLFAVICVWKEKKKGSYYDSFKLQTKEFQVLKSLGKLAMGSDSQSVSSSSTQDPHRGRQTLGSLRGLAKAKPEASFQVWNK

SEQ ID NO: 12881 - protein, 113 aa, Homo sapiens
MIHTNLKKKFSCCVLVFLLFAVICVWKEKKKGSYYDSFKLQTKEFQVLKSLGKLAMGSDSQSVSSSSTQDPHRGRQTLGSLRGLAKAKPEASFQVWNKDSSSKNLIPRLQKIW

SEQ ID NO: 12882 - protein, 127 aa, Homo sapiens
MIHTNLKKKFSCCVLVFLLFAVICVWKEKKKGSYYDSFKLQTKEFQVLKSLGKLAMGSDSQSVSSSSTQDPHRGRQTLGSLRGLAKAKPEASFQVWNKDSSSKNLIPRLQKIWKNYLSMNKYKVSYK

SEQ ID NO: 12883 - protein, 406 aa, Homo sapiens
MIHTNLKKKFSCCVLVFLLFAVICVWKEKKKGSYYDSFKLQTKEFQVLKSLGKLAMGSDSQSVSSSSTQDPHRGRQTLGSLRGLAKAKPEASFQVWNKDSSSKNLIPRLQKIWKNYLSMNKYKVSYKGPGPGIKFSAEALRCHLRDHVNVSMVEVTDFPFNTSEWEGYLPKESIRTKAGPWGRCAVVSSAGSLKSSQLGREIDDHDAVLRFNGAPTANFQQDVGTKTTIRLMNSQLVTTEKRFLKDSLYNEGILIVWDPSVYHSDIPKWYQNPDYNFFNNYKTYRKLHPNQPFYILKPQMPWELWDILQEISPEEIQPNPPSSGMLGIIIMMTLCDQVDIYEFLPSKRKTDVCYYYQKFFDSACTMGAYHPLLYEKNLVKHLNQGTDEDIYLLGKATLPGFRTIHC

SEQ ID NO: 12884 - protein, 406 aa, Homo sapiens; identical to SEQ ID NO: 12883

SEQ ID NO: 12885 - protein, 21 aa, Homo sapiens
MNSQLVTTEKRFLKDSLYNEG

SEQ ID NO: 12886 - protein, 52 aa, Homo sapiens
MNSQLVTTEKRFLKDSLYNEGILIVWDPSVYHSDIPKWYQNPDYNFFNNYKT

SEQ ID NO: 12887 - protein, 115 aa, Homo sapiens
MNSQLVTTEKRFLKDSLYNEGILIVWDPSVYHSDIPKWYQNPDYNFFNNYKTYRKLHPNQPFYILKPQMPWELWDILQEISPEEIQPNPPSSGMLGIIIMMTLCDQVDIYEFLPS

SEQ ID NO: 12888 - protein, 175 aa, Homo sapiens
MNSQLVTTEKRFLKDSLYNEGILIVWDPSVYHSDIPKWYQNPDYNFFNNYKTYRKLHPNQPFYILKPQMPWELWDILQEISPEEIQPNPPSSGMLGIIIMMTLCDQVDIYEFLPSKRKTDVCYYYQKFFDSACTMGAYHPLLYEKNLVKHLNQGTDEDIYLLGKATLPGFRTIHC

SEQ ID NO: 12889 - protein, 212 aa, Homo sapiens
LSLLNGSESAKLFAPPRDTPPKCIRCAVVGNGGILNGSRQGPNIDAHDYVFRLNGAVIKGFERDVGTKTSFYGFTVNTMKNSLVSYWNLGFTSVPQGQDLQYIFIPSDIRDYVMLRSAILGVPVPEGLDKGDRFLKSKLINTHFGDLYMPSTGALMLLTALHTCDQVSAYGFITSNYWKFSDHYFERKMKPLIFYANHDLSLEAALWRDLHK

SEQ ID NO: 12890 - protein, 84 aa, Homo sapiens
MGLPRGSFFWLLLLLTAACSGLLFALYFSAVQRYPGPAAGARARPADTCFTWPFSGTPTSVACSISPFQCCCGGTSSPQRSGTA

SEQ ID NO: 12891 - protein, 374 aa, Homo sapiens
MGLPRGSFFWLLLLLTAACSGLLFALYFSAVQRYPGPAAGARDTTSFEAFFQSKASNSWTGKGQACRHLLHLAIQRHPHFRGLFNLSIPVLLWGDLFTPALWDRLSQHKAPYGWRGLSHQVIASTLSLLNGSESAKLFAPPRDTPPKCIRCAVVGNGGILNGSRQGPNIDAHDYVFRLNGAVIKGFERDVGTKTSFYGFTVNTMKNSLVSYWNLGFTSVPQGQDLQYIFIPSDIRDYVMLRSAILGVPVPEGLDKGDRPHAYFGPEASASKFKLLHPDFISYLTERFLKSKLINTHFGDLYMPSTGALMLLTALHTCDQVSAYGFITSNYWKFSDHYFERKMKPLIFYANHDLSLEAALWRDLHKAGILQLYQR

SEQ ID NO: 12892 - protein, 74 aa, Homo sapiens
MGLPRGSFFWLLLLLTAACSGLLFALYFSAVQRYPGPAAGASCQPRVPSTCGCWGEGRGLREAWPPFERGHHII

SEQ ID NO: 12893 - protein, 38 aa, Homo sapiens
  SITE 1: note = misc_feature - Xaa can be any naturally occurring amino acid
XDYVMLRSAILGVPVPEGLDKGDSPAPTAQGTAATPAP

SEQ ID NO: 12894 - protein, 336 aa, Homo sapiens
MKTLMRHGLAVCLALTTMCTSLLLVYSSLGGQKERPPQQQQQQQQQQQQASATGSSQPAAESSTQQRPGVPAGPRPLDGYLGVADHKPLKMHCRDCALVTSSGHLLHSRQGSQIDQTECVIRMNDAPTRGYGRDVGNRTSLRVIAHSSIQRILRNRHDLLNVSQGTVFIFWGPSSYMRRDGKGQVYNNLHLLSQVLPRLKAFMITRHKMLQFDELFKQETGKDRKISNTWLSTGWFTMTIALELCDRINVYGMVPPDFCRDPNHPSVPYHYYEPFGPDECTMYLSHERGRKGSHHRFITEKRVFKNWARTFNIHFFQPDWKPESLAINHPENKPVF

SEQ ID NO: 12895 - protein, 236 aa, Homo sapiens
MKTLMRHGLAVCLALTTMCTSLLLVYSSLGGQKERPPQQQQQQQQQQQQASATGSSQPAAESSTQQRPGVPAGPRPLDGYLGVADHKPLKMHCRDCALVTSSGHLLHSRQGSQIDQTECVIRMNDAPTRGYGRDVGNRTSLRVIAHSSIQRILRNRHDLLNVSQGTVFIFWGPSSYMRRDGKGQVYNNLHLLSQVLPRLKAFMITRHKMLQFDELFKQETGKDRYPTLGSALAGLQ

SEQ ID NO: 12896 - protein, 333 aa, Homo sapiens
MACSRPPSQCEPTSLPPGPPAGRRHLPLSRRRREMSSNKEQRSAVFVILFALITILILYSSNSANEVFHYGSLRGRSRRPVNLKKWSITDGYVPILGNKTLPSRCHQCVIVSSSSHLLGTKLGPEIERAECTIRMNDAPTTGYSADVGNKTTYRVVAHSSVFRVLRRPQEFVNRTPETVFIFWGPPSKMQKPQGSLVRVIQRAGLVFPNMEAYAVSPGRMRQFDDLFRGETGKDREKSHSWLSTGWFTMVIAVELCDHVHVYGMVPPNYCSQRPRLQRMPYHYYEPKGPDECVTYIQNEHSRKGNHHRFITEKRVFSSWAQLYGITFSHPSWT

SEQ ID NO: 12897 - protein, 333 aa, Homo sapiens; identical to SEQ ID NO: 12896

SEQ ID NO: 12898 - protein, 374 aa, Homo sapiens
MACSRPPSQCEPTSLPPGPPAGRRHLPLSRRRREMSSNKEQRSAVFVILFALITILILYSSNSANEVFHYGSLRGRSRRPVNLKKWSITDGYVPILGNKTLPSRCHQCVIVSSSSHLLGTKLGPEIERAECTIRMNDAPTTGYSADVGNKTTYRVVAHSSVFRVLRRPQEFVNRTPETVFIFWGPPSKMQKPQGSLVRVIQRAGLVFPNMEAYAVSPGRMRQFDDLFRGETGKDREKSHSWLSTGWFTMVIAVELCDHVHVYGMVPPNYCSGPASSACPTTTTSPRGRTNVSPTSRMSTVARATTTASSPRKGSSHRGPSCMASPSPTPPGPRPPSLWDLRRVRGEAASAQPLGQGPSSGQSRLAGVSPSQSGP

SEQ ID NO: 12899 - protein, 86 aa, Homo sapiens
MSSNKEQRSAVFVILFALITILILYSSNSANEVFHYGSLRGRSRRPVNLKKWSITDGYVPILGNKGEVSFVVEHRLVYHGDRGGVV

SEQ ID NO: 12900 - protein, 200 aa, Homo sapiens
MSSNKEQRSAVFVILFALITILILYSSNSANEVFHYGSLRGRSRRPVNLKKWSITDGYVPILGNKTLPSRCHQCVIVSSSSHLLGTKLGPEIERAECTIRMNDAPTTGYSADVGNKTTYRVVAHSSVFRVLRRPQEFVNRTPETVFIFWGPPSKMQKPQGSLVRVIQRAGLVFPNMEAYAVSPGRMRQFDDLFRGETGKD

SEQ ID NO: 12901 - protein, 299 aa, Homo sapiens
MSSNKEQRSAVFVILFALITILILYSSNSANEVFHYGSLRGRSRRPVNLKKWSITDGYVPILGNKTLPSRCHQCVIVSSSSHLLGTKLGPEIERAECTIRMNDAPTTGYSADVGNKTTYRVVAHSSVFRVLRRPQEFVNRTPETVFIFWGPPSKMQKPQGSLVRVIQRAGLVFPNMEAYAVSPGRMRQFDDLFRGETGKDREKSHSWLSTGWFTMVIAVELCDHVHVYGMVPPNYCSQRPRLQRMPYHYYEPKGPDECVTYIQNEHSRKGNHHRFITEKRVFSSWAQLYGITFSHPSWT

SEQ ID NO: 12902 - protein, 299 aa, Homo sapiens; identical to SEQ ID NO: 12901

SEQ ID NO: 12903 - protein, 299 aa, Homo sapiens; identical to SEQ ID NO: 12901

SEQ ID NO: 12904 - protein, 354 aa, Homo sapiens
MQLQFRSWMLAALTLLVVFLIFADISEIEEEIGAEVVINGSSSPAVVDRSNESIKHNIQPASSKWRHNQTLSLRIRKQILKFLDAEKDISVLKGTLKPGDIIHYIFDRDSTMNVSQNLYELLPRTSPLKNKHFGTCAIVGNSGVLLNSGCGQEIDAHSFVIRCNLAPVQEYARDVGLKTDLVTMNPSVIQRAFEDLVNATWREKLLQRLHSLNGSILWIPAFMARGGKERVEWVNELILKHHVNVRTAYPSLRLLHAVRGYWLTNKVHIKRPTTGLLMYTLATRFCKQIYLYGFWPFPLDQNQNPVKYHYYDSLKYGYTSQASPHTMPLEFKALKSLHEQGALKLTVGQCDGAT

SEQ ID NO: 12905 - protein, 375 aa, Homo sapiens
MQLQFRSWMLAALTLLVVFLIFADISEIEEEIGNSGGRGTIRSAVNSLHSKSNRAEVVINGSSSPAVVDRSNESIKHNIQPASSKWRHNQTLSLRIRKQILKFLDAEKDISVLKGTLKPGDIIHYIFDRDSTMNVSQNLYELLPRTSPLKNKHFGTCAIVGNSGVLLNSGCGQEIDAHSFVIRCNLAPVQEYARDVGLKTDLVTMNPSVIQRAFEDLVNATWREKLLQRLHSLNGSILWIPAFMARGGKERVEWVNELILKHHVNVRTAYPSLRLLHAVRGYWLTNKVHIKRPTTGLLMYTLATRFCKQIYLYGFWPFPLDQNQNPVKYHYYDSLKYGYTSQASPHTMPLEFKALKSLHEQGALKLTVGQCDGAT

SEQ ID NO: 12906 - protein, 332 aa, Homo sapiens
MQLQFRSWMLAALTLLVVFLIFADISEIEEEIGNSGGRGTIRSAVNSLHSKSNRKQILKFLDAEKDISVLKGTLKPGDIIHYIFDRDSTMNVSQNLYELLPRTSPLKNKHFGTCAIVGNSGVLLNSGCGQEIDAHSFVIRCNLAPVQEYARDVGLKTDLVTMNPSVIQRAFEDLVNATWREKLLQRLHSLNGSILWIPAFMARGGKERVEWVNELILKHHVNVRTAYPSLRLLHAVRGYWLTNKVHIKRPTTGLLMYTLATRFCKQIYLYGFWPFPLDQNQNPVKYHYYDSLKYGYTSQASPHTMPLEFKALKSLHEQGALKLTVGQCDGAT

SEQ ID NO: 12907 - protein, 46 aa, Homo sapiens
MRSIRKRWTICTISLLLIFYKTKEIARTEEHQETQLIGASGGGVDS

SEQ ID NO: 12908 - protein, 168 aa, Homo sapiens
MRSIRKRWTICTISLLLIFYKTKEIARTEEHQETQLIGDGELSLSRSLVNSSDKIIRKAGSSIFQHNVEGWKINSSLVLEIRKNILRFLDAERDVSVVKSSFKPGDVIHYVLDRRRTLNISHDLHSLLPEVSPMKNRRFKTCAVVGNSGILLDSECGKEIDSHNFVIR

SEQ ID NO: 12909 - protein, 359 aa, Homo sapiens
MRSIRKRWTICTISLLLIFYKTKEIARTEEHQETQLIGDGELSLSRSLVNSSDKIIRKAGSSIFQHNVEGWKINSSLVLEIRKNILRFLDAERDVSVVKSSFKPGDVIHYVLDRRRTLNISHDLHSLLPEVSPMKNRRFKTCAVVGNSGILLDSECGKEIDSHNFVIRCNLAPVVEFAADVGTKSDFITMNPSVVQRAFGGFRNESDREKFVHRLSMLNDSVLWIPAFMVKGGEKHVEWVNALILKNKLKVRTAYPSLRLIHAVRGYWLTNKVPIKRPSTGLLMYTLATRFCDEIHLYGFWPFPKDLNGKAVKYHYYDDLKYRYFSNASPHRMPLEFKTLNVLHNRGALKLTTGKCVKQ

SEQ ID NO: 12910 - protein, 398 aa, Homo sapiens
MRPGGALLALLASLLLLLLLRLLWCPADAPGRARILVEESREATHGTPAALRTLRSPATAVPRATNSTYLNEKSLQLTEKCKNLQYGIESFSNKTKGYSENDYLQIITDIQSCPWKRQAEEYANFRAKLASCCDAVQNFVVSQNNTPVGTNMSYEVESKKEIPIKKNIFHMFPVSQPFVDYPYNQCAVVGNGGILNKSLCGTEIDKSDFVFRCNLPPTTGDVSKDVGSKTNLVTINPSIITLKYGNLKEKKALFLEDIATYGDAFFLLPAFSFRANTGTSFKVYYTLEESKARQKVLFFHPKYLKDLALFWRTKGVTAYRLSTGLMITSVAVELCKNVKLYGFWPFSKTVEDIPVSHHYYDNKLPKHGFHQMPKEYSQILQLHMKGILKLQFSKCEVA

SEQ ID NO: 12911 - protein, 128 aa, Homo sapiens
  SITE 1: note = misc_feature - Xaa can be any naturally occurring amino acid
XYPYNQCAVVGNGGILNKSLCGTEIDKSDFVFRCNLPPTTGDVSKDVGSKTNLVTINPSIITLKYGNLKEKKALFLEDIATYGDAFFLLPAFSFRANTGTSFKVYYTLEESKARQKCKTKRKTINSIL

SEQ ID NO: 12912 - protein, 147 aa, Homo sapiens
MKRLEEMSNMFQSSGVQHHPPEPKAQTEGNEDSEGKEQRWEMVMDKKHFKLWRRPITGTHLYQYRVFGTYTDVTPRQFFNVQLDTEYRKKWDALVIKLEVIERDVVSGSEVLHWVTHFPYPMYSRDYVYVRRYSVDQENNMMVLVSR

SEQ ID NO: 12913 - protein, 370 aa, Homo sapiens
MLPRRLLAAWLAGTRGGGLLALLANQCRFVTGLRVRRAQQIAQLYGRLYSESSRRVLLGRLWRRLHGRPGHASALMAALAGVFVWDEERIQEEELQRSINEMKRLEEMSNMFQSSGVQHHPPEPKAQTEGNEDSEGKEQRWEMVMDKKHFKLWRRPITGTHLYQYRVFGTYTDVTPRQFFNVQLDTEYRKKWDALVIKLEVIERDVVSGSEVLHWVTHFPYPMYSRDYVYVRRYSVDQENNMMVLVSRAVEHPSVPESPEFVRVRSYESQMVIRPHKSFDENGFDYLLTYSDNPQTVFPRYCVSWMVSSGMPDFLEKLHMATLKAKNMEIKVKDYISAKPLEMSSEAKATSQSSERKNEGSCGPARIEYA

SEQ ID NO: 12914 - protein, 62 aa, Homo sapiens
MKFLVFAFILALMVSMIGADSSEEKFLRRIGRFGYGYGPYQPVPEQPLYPQPYQPQYQQYTF

SEQ ID NO: 12915 - protein, 62 aa, Homo sapiens; identical to SEQ ID NO: 12914

SEQ ID NO: 12916 - protein, 52 aa, Homo sapiens
MKFLVFAFILALMVSMIGADSSEEYGYGPYQPVPEQPLYPQPYQPQYQQYTF

SEQ ID NO: 12917 - protein, 247 aa, Homo sapiens
MLQNSAVLLVLVISASATHEAEQNDSVSPRKSRVAAQNSAEVVRCLNSALQVGCGAFACLENSTCDTDGMYDICKSFLYSAAKFDTQGKAFVKESLKCIANGVTSKVFLAIRRCSTFQRMIAEVQEECYSKLNVCSIAKRNPEAITEVVQLPNHFSNRYYNRLVRSLLECDEDTVSTIRDSLMEKIGPNMASLFHILQTDHCAQTHPRADFNRRRTNEPQKLKVLLRNLRGEEDSPSHIKRTSHESA

SEQ ID NO: 12918 - protein, 178 aa, Homo sapiens
MYDICKSFLYSAAKFDTQGKAFVKESLKCIANGVTSKVFLAIRRCSTFQRMIAEVQEECYSKLNVCSIAKRNPEAITEVVQLPNHFSNRYYNRLVRSLLECDEDTVSTIRDSLMEKIGPNMASLFHILQTDHCAQTHPRADFNRRRTNEPQKLKVLLRNLRGEEDSPSHIKRTSHESA

SEQ ID NO: 12919 - protein, 302 aa, Homo sapiens
MCAERLGQFMTLALVLATFDPARGTDATNPPEGPQDRSSQQKGRLSLQNTAEIQHCLVNAGDVGCGVFECFENNSCEIRGLHGICMTFLHNAGKFDAQGKSFIKDALKCKAHALRHRFGCISRKCPAIREMVSQLQRECYLKHDLCAAAQENTRVIVEMIHFKDLLLHEPYVDLVNLLLTCGEEVKEAITHSVQVQCEQNWGSLCSILSFCTSAIQKPPTAPPERQPQVDRTKLSRAHHGEAGHHLPEPSSRETGRGAKGERGSKSHPNAHARGRVGGLGAQGPSGSSEWEDEQSEYSDIRR

SEQ ID NO: 12920 - protein, 53 aa, Homo sapiens
MTFLHNAGKFDAQGKSFIKDALKCKAHALRHRFGCISRKCPAIREMVSQLQRE

SEQ ID NO: 12921 - protein, 123 aa, Homo sapiens
  SITE 1: note = misc_feature - Xaa can be any naturally occurring amino acid
XQNTAEIQHCLVNAGDVGCGVFECFENNSCEIRGLHGICMTFLHNAGKFDAQGKSFIKDALKCKAHALRHRFGCISRKCPAIREMVSQLQRECYLKHDLCAAAQENTRVIVEMIHFKDLLLHE

SEQ ID NO: 12922 - protein, 276 aa, Homo sapiens
MGCGPSQPAEDRRRVRAPKKGWKEEFKADVSVPHTGENCSPRMEAALTKNTVDIAEGLEQVQMGSLPGTISENSPSPSERNRRVNSDLVTNGLINKPQSLESRERQKSSDILEELIVQGIIQSHSKVFRNGESYDVTLTTTEKPLRKPPSRLKKLKIKKQVKDFTMKDIEEKMEAAEERRKTKEEEIRKRLRSDRLLPSANHSDSAELDGAEVAFAKGLQRVRSAGFEPSDLQGGKPLKRKKSKCDATLIDRNESDESFGVVESDMSYNQADDIVY

SEQ ID NO: 12923 - protein, 200 aa, Homo sapiens
MHVFFVFLSLLETLRRLPVADVSVPHTGENCSPRMEAALTKNTVDIAEGLEQVQMGSLPGTISENSPSPSERNRRVNSDLVTNGLINKPQSLESRERQKSSDILEELIVQGIIQSHSKVFRNGESYDVTLTTTEKPLRKPPSRLKKLKIKKQVKDFTMKDIEEKMEAAEERRKTKEEEIRKRLRSDRLLPSANHSDSAEL

SEQ ID NO: 12924 - protein, 45 aa, Homo sapiens
MLQFLLGFTLGNVVGMYLAQNYDGIGSPSVSQAGVQWWDLGSLQL

SEQ ID NO: 12925 - protein, 47 aa, Homo sapiens
MLQFLLGFTLGNVVGMYLAQNYDIPNLAKKLEEIKKDLDAKKKPPSA

SEQ ID NO: 12926 - protein, 310 aa, Homo sapiens
MLARAARGTGALLLRGLNILIPVLDRIRYVQSLKEIVINVPEQSAVTLDNVTLQIDGVLYLRIMDPYKASYGVEDPEYAVTQLAQTTMRSELGKLSLDKVFRERESLNASIVDAINQAADCWGIRCLRYEIKDIHVPPRVKESMQMQVEAERRKRATVLESEGTRESAINVAEGKKQAQILASEAEKAEQINQAAGEASAVLAKAKAKAEAIRILAAALTQHNGDAAASLTVAEQYVSAFSKLAKDSNTILLPSNPGDVTSMVAQAMGVYGALTKAPVPGTPDSLSSGSSRDVQGTDASLDEELDRVKMS

SEQ ID NO: 12927 - protein, 356 aa, Homo sapiens
MLARAARGTGALLLRGSLLASGRAPRRASSGLPRNTVVLFVPQQEAWVVERMGRFHRILEPGLNILIPVLDRIRYVQSLKEIVINVPEQSAVTLDNVTLQIDGVLYLRIMDPYKASYGVEDPEYAVTQLAQTTMRSELGKLSLDKVFRERESLNASIVDAINQAADCWGIRCLRYEIKDIHVPPRVKESMQMQVEAERRKRATVLESEGTRESAINVAEGKKQAQILASEAEKAEQINQAAGEASAVLAKAKAKAEAIRILAAALTQHNGDAAASLTVAEQYVSAFSKLAKDSNTILLPSNPGDVTSMVAQAMGVYGALTKAPVPGTPDSLSSGSSRDVQGTDASLDEELDRVKMS

SEQ ID NO: 12928 - protein, 311 aa, Homo sapiens
MLARAARGTGALLLRGSLLASGRAPRRASSGLPRNTVVLFVPQQEAWVVERMGRFHRILEPGLNILIPVLDRIRYVQSLKEIVINVPEQSAVTLDNVTLQIDGVLYLRIMDPYKASYGVEDPEYAVTQLAQTTMRSELGKLSLDKVFRVEAERRKRATVLESEGTRESAINVAEGKKQAQILASEAEKAEQINQAAGEASAVLAKAKAKAEAIRILAAALTQHNGDAAASLTVAEQYVSAFSKLAKDSNTILLPSNPGDVTSMVAQAMGVYGALTKAPVPGTPDSLSSGSSRDVQGTDASLDEELDRVKMS

SEQ ID NO: 12929 - protein, 101 aa, Homo sapiens
MQMQVEAERRKRATVLESEGTRESAINVAEGKKQAQILASEAEKAEQINQAAGEASAVLAKAKAKAEAIRILAAALTQHVRGPWVGMGTGIDSGRGSLIYA

SEQ ID NO: 12930 - protein, 169 aa, Homo sapiens
MARPVQLAPGSLALVLCRLEAQKAAGAAEEPGGRAVFRAFRRANARCFWNARLARAASRLAFQGWLRRGVLLVRAPPACLQVLRDAWRRRALRPPRGFRIRAVGDVFPVQMNPITQSQFVPLGEVLCCAISDMNTAQIVVTQESLLERLMKHYPGHRVWDLIIQSFWMD

SEQ ID NO: 12931 - protein, 227 aa, Homo sapiens
MARPVQLAPGSLALVLCRLEAQKAAGAAEEPGGRAVFRAFRRANARCFWNARLARAASRLAFQGWLRRGVLLVRAPPACLQVLRDAWRRRALRPPRGFRIRAVGDVFPVQMNPITQSQFVPLGEVLCCAISDMNTAQIVVTQESLLERLMKHYPGIAIPSEDILYTTLGTLIKERKIYHTGEGYFIVTPQTYFITNTTTQENKRMLPSDESRLMPASMTYLDTESGI

SEQ ID NO: 12932 - protein, 989 aa, Homo sapiens
MARPVQLAPGSLALVLCRLEAQKAAGAAEEPGGRAVFRAFRRANARCFWNARLARAASRLAFQGWLRRGVLLVRAPPACLQVLRDAWRRRALRPPRGFRIRAVGDVFPVQMNPITQSQFVPLGEVLCCAISDMNTAQIVVTQESLLERLMKHYPGIAIPSEDILYTTLGTLIKERKIYHTGEGYFIVTPQTYFITNTTTQENKRMLPSDESRLMPASMTYLVSMESCAESAQENAAPISHCQSCQCFRDMHTQDVQEAPVAAEVTRKSHRGLGESVSWVQNGAVSVSAEHHICESTKPLPYTRDKEKGKKFGFSLLWRSLSRKEKPKTEHSSFSAQFPPEEWPVRDEDDLDNIPRDVEHEIIKRINPILTVDNLIKHTVLMQKYEEQKKYNSQGTSTDMLTIGHKYPSKEGVKKRQGLSAKPQGQGHSRRDRHKARNQGSEFQPGSIRLEKHPKLPATQPIPRIKSPNEMVGQKPLGEITTVLGSHLIYKKRISNPFQGLSHRGSTISKGHKIQKTSDLKPSQTGPKEKPFQKPRSLDSSRIFDGKAKEPYAEQPNDKMEAESIYINDPTVKPINDDFRGHLFSHPQQSMLQNDGKCCPFMESMLRYEVYGGENEVIPEVLRKSHSHFDKLGETKQTPHSLPSRGASFSDRTPSACRLVDNTIHQFQNLGLLDYPVGVNPLRQAARQDKDSEELLRKGFVQDAETTSLENEQLSNDDQALYQNEVEDDDGACSSLYLEEDDISENDDLRQMLPGHSQYSFTGGSQGNHLGKQKVIERSLTEYNSTMERVESQVLKRNECYKPTGLHATPGESQEPNLSAESCGLNSGAQFGFNYEEEPSVAKCVQASAPADERIFDYYSARKASFEAEVIQDTIGDTGKKPASWSQSPQNQEMRKHFPQKFQLFNTSHMPVLAQDVQYEHSHLEGTENHSMAGDSGIDSPRTQSLGSNNSVILDGLKRRQNFLQNVEGTKSSQPLTSNSLLPLTPVINV

SEQ ID NO: 12933 - protein, 989 aa, Homo sapiens; identical to SEQ ID NO: 12932

SEQ ID NO: 12934 - protein, 1101 aa, Homo sapiens
MARPVQLAPGSLALVLCRLEAQKAAGAAEEPGGRAVFRAFRRANARCFWNARLARAASRLAFQGWLRRGVLLVRAPPACLQVLRDAWRRRALRPPRGFRIRAVGECGTRRGGASRPVQLAPGSLALVLCRLEAQKAAGAAEEPGGRAVFRAFRRANARCFWNARLARAASRLAFQGWLRRGVLLVRAPPACLQVLRDAWRRRALRPPRGFRIRAVGDVFPVQMNPITQSQFVPLGEVLCCAISDMNTAQIVVTQESLLERLMKHYPGIAIPSEDILYTTLGTLIKERKIYHTGEGYFIVTPQTYFITNTTTQENKRMLPSDESRLMPASMTYLVSMESCAESAQENAAPISHCQSCQCFRDMHTQDVQEAPVAAEVTRKSHRGLGESVSWVQNGAVSVSAEHHICESTKPLPYTRDKEKGKKFGFSLLWRSLSRKEKPKTEHSSFSAQFPPEEWPVRDEDDLDNIPRDVEHEIIKRINPILTVDNLIKHTVLMQKYEEQKKYNSQGTSTDMLTIGHKYPSKEGVKKRQGLSAKPQGQGHSRRDRHKARNQGSEFQPGSIRLEKHPKLPATQPIPRIKSPNEMVGQKPLGEITTVLGSHLIYKKRISNPFQGLSHRGSTISKGHKIQKTSDLKPSQTGPKEKPFQKPRSLDSSRIFDGKAKEPYAEQPNDKMEAESIYINDPTVKPINDDFRGHLFSHPQQSMLQNDGKCCPFMESMLRYEVYGGENEVIPEVLRKSHSHFDKLGETKQTPHSLPSRGASFSDRTPSACRLVDNTIHQFQNLGLLDYPVGVNPLRQAARQDKDSEELLRKGFVQDAETTSLENEQLSNDDQALYQNEVEDDDGACSSLYLEEDDISENDDLRQMLPGHSQYSFTGGSQGNHLGKQKVIERSLTEYNSTMERVESQVLKRNECYKPTGLHATPGESQEPNLSAESCGLNSGAQFGFNYEEEPSVAKCVQASAPADERIFDYYSARKASFEAEVIQDTIGDTGKKPASWSQSPQNQEMRKHFPQKFQLFNTSHMPVLAQDVQYEHSHLEGTENHSMAGDSGIDSPRTQSLGSNNSVILDGLKRRQNFLQNVEGTKSSQPLTSNSLLPLTPVINV

SEQ ID NO: 12935 - protein, 969 aa, Homo sapiens
MALSLWPLLLLLLLLLLLSFAVTLAPTGPHSLDPGLSFLKSLLSTLDQAPQGSLSRSRFFTFLANISSSFEPGRMGEGPVGEPPPLQPPALRLHDFLVTLRGSPDWEPMLGLLGDMLALLGQEQTPRDFLVHQAGVLGGLVEVLLGALVPGGPPTPTRPPCTRDGPSDCVLAADWLPSLLLLLEGTRWQALVQVQPSVDPTNATGLDGREAAPHFLQGLLGLLTPTGELGSKEALWGGLLRTVGAPLYAAFQEGLLRVTHSLQDEVFSILGQPEPDTNGQCQGGNLQQLLLWGVRHNLSWDVQALGFLSGSPPPPPALLHCLSTGVPLPRASQPSAHISPRQRRAITVEALCENHLGPAPPYSISNFSIHLLCQHTKPATPQPHPSTTAICQTAVWYAVSWAPGAQGWLQACHDQFPDEFLDAICSNLSFSALSGSNRRLVKRLCAGLLPPPTSCPEGLPPVPLTPDIFWGCFLENETLWAERLCGEASLQAVPPSNQAWVQHVCQGPTPDVTASPPCHIGPCGERCPDGGSFLVMVCANDTMYEVLVPFWPWLAGQCRISRGGNDTCFLEGLLGPLLPSLPPLGPSPLCLTPGPFLLGMLSQLPRCQSSVPALAHPTRLHYLLRLLTFLLGPGAGGAEAQGMLGRALLLSSLPDNCSFWDAFRPEGRRSVLRTIGEYLEQDEEQPTPSGFEPTVNPSSGISKMELLACFSPVLWDLLQREKSVWALQILVQAYLHMPPENLQQLVLSAEREAAQGFLTLMLQGKLQGKLQVPPSEEQALGRLTALLLQRYPRLTSQLFIDLSPLIPFLAVSDLMRFPPSLLANDSVQQGYRGSEENSLEEDKGLRPMTPRSLAAIRDYSPGMRPEQKEALAKRLLAPELFGEVPAWPQELLWAVLPLLPHLPLENFLQLSPHQIQALEDSWPAAGLGPGHARHVLRSLVNQSVQDGEEQVRRWHMNFWVCCAHLEERC

SEQ ID NO: 12936 - protein, 351 aa, Homo sapiens
MALSLWPLLLLLLLLLLLSFAVTLAPTGPHSLDPGLSFLKSLLSTLDQAPQGSLSRSRFFTFLANISSSFEPGRMGEGPVGEPPPLQPPALRLHDFLVTLRGSPDWEPMLGLLGDMLALLGQEQTPRDFLVHQAGVLGGLVEVLLGALVPGGPPTPTRPPCTRDGPSDCVLAADWLPSLLLLLEGTRWQALVQVQPSVDPTNATGLDGREAAPHFLQGLLGLLTPTGELGSKEALWGGLLRTVGAPLYAAFQEGLLRVTHSLQDEVFSILGQPEPDTNGQCQGGNLQQLLLWGVRHNLSWDVQALGFLSGSPPPPPALLHCLSTGVPLPRASQPSAHISPRQRRAITVEAL

SEQ ID NO: 12937 - protein, 1775 aa, Homo sapiens
MALSLWPLLLLLLLLLLLSFAVTLAPTGPHSLDPGLSFLKSLLSTLDQAPQGSLSRSRFFTFLANISSSFEPGRMGEGPVGEPPPLQPPALRLHDFLVTLRGSPDWEPMLGLLGDMLALLGQEQTPRDFLVHQAGVLGGLVEVLLGALVPGGPPTPTRPPCTRDGPSDCVLAADWLPSLLLLLEGTRWQALVQVQPSVDPTNATGLDGREAAPHFLQGLLGLLTPTGELGSKEALWGGLLRTVGAPLYAAFQEGLLRVTHSLQDEVFSILGQPEPDTNGQCQGGNLQQLLLWGVRHNLSWDVQALGFLSGSPPPPPALLHCLSTGVPLPRASQPSAHISPRQRRAITVEALCENHLGPAPPYSISNFSIHLLCQHTKPATPQPHPSTTAICQTAVWYAVSWAPGAQGWLQACHDQFPDEFLDAICSNLSFSALSGSNRRLVKRLCAGLLPPPTSCPEGLPPVPLTPDIFWGCFLENETLWAERLCGEASLQAVPPSNQAWVQHVCQGPTPDVTASPPCHIGPCGERCPDGGSFLVMVCANDTMYEVLVPFWPWLAGQCRISRGGNDTCFLEGLLGPLLPSLPPLGPSPLCLTPGPFLLGMLSQLPRCQSSVPALAHPTRLHYLLRLLTFLLGPGAGGAEAQGMLGRALLLSSLPDNCSFWDAFRPEGRRSVLRTIGEYLEQDEEQPTPSGFEPTVNPSSGISKMELLACFSPVLWDLLQREKSVWALQILVQAYLHMPPENLQQLVLSAEREAAQGFLTLMLQGKLQGKLQVPPSEEQALGRLTALLLQRYPRLTSQLFIDLSPLIPFLAVSDLMRFPPSLLANDSVLAAIRDYSPGMRPEQKEALAKRLLAPELFGEVPAWPQELLWAVLPLLPHLPLENFLQLSPHQIQALEDSWPAAGLGPGHARHVLRSLVNQSVQDGEEQVRRLGPLACFLSPEELQSLVPLSDPTGPVERGLLECAANGTLSPEGRVAYELLGVLRSSGGAVLSPRELRVWAPLFSQLGLRFLQELSEPQLRAMLPVLQGTSVTPAQAVLLLGRLLPRHDLSLEELCSLHLLLPGLSPQTLQAIPRRVLVGACSCLAPELSRLSACQTAALLQTFRVKDGVKNMGTTGAGPAVCIPGQPIPTTWPDCLLPLLPLKLLQLDSLALLANRRRYWELPWSEQQAQFLWKKMQVPTNLTLRNLQALGTLAGGMSCEFLQQINSMVDFLEVVHMIYQLPTRVRGSLRACIWAELQRRMAMPEPEWTTVGPELNGLDSKLLLDLPIQLMDRLSNESIMLVVELVQRAPEQLLALTPLHQAALAERALQNLAPKETPVSGEVLETLGPLVGFLGTESTRQIPLQILLSHLSQLQGFCLGETFATELGWLLLQESVLGKPELWSQDEVEQAGRLVFTLSTEAISLIPREALGPETLERLLEKQQSWEQSRVGQLCREPQLAAKKAALVAGVVRPAAEDLPEPVPNCADVRGTFPAAWSATQIAEMELSDFEDCLTLFAGDPGLGPEELRAAMGKAKQLWGPPRGFRPEQILQLGRLLIGLGDRELQELILVDWGVLSTLGQIDGWSTTQLRIVVSSFLRQSGRHVSHLDFVHLTALGYTLCGLRPEELQHISSWEFSQAALFLGTLHLQCSEEQLEVLAHLLVLPGGFGPISNWGPEIFTEIGTIAAGIPDLALSALLRGQIQGVTPLAISVIPPPKFAVVFSPIQLSSLTSAQAVAVTPEQMAFLSPEQRRAVAWAQHEGKESPEQQGRSTAWGLQDWSRPSWSLVLTISFLGHLL

SEQ ID NO: 12938 - protein, 1002 aa, Homo sapiens
MELLACFSPVLWDLLQREKSVWALQILVQAYLHMPPENLQQLVLSAEREAAQGFLTLMLQGKLQGKLQVPPSEEQALGRLTALLLQRYPRLTSQLFIDLSPLIPFLAVSDLMRFPPSLLANDSVQQGYRGSEENSLEEDKGLRPMTPRSLAAIRDYSPGMRPEQKEALAKRLLAPELFGEVPAWPQELLWAVLPLLPHLPLENFLQLSPHQIQALEDSWPAAGLGPGHARHVLRSLVNQSVQDGEEQVRRLGPLACFLSPEELQSLVPLSDPTGPVERGLLECAANGTLSPEGRVAYELLGVLRSSGGAVLSPRELRVWAPLFSQLGLRFLQELSEPQLRAMLPVLQGTSVTPAQAVLLLGRLLPRHDLLQLDSLALLANRRRYWELPWSEQQAQFLWKKMQVPTNLTLRNLQALGTLAGGMSCEFLQQINSMVDFLEVVHMIYQLPTRVRGSLRACIWAELQRRMAMPEPEWTTVGPELNGLDSKLLLDLPIQLMDRLSNESIMLVVELVQRAPEQLLALTPLHQAALAERALQNLAPKETPVSGEVLETLGPLVGFLGTESTRQIPLQILLSHLSQLQGFCLGETFATELGWLLLQESVLGKPELWSQDEVEQAGRLVFTLSTEAISLIPREALGPETLERLLEKQQSWEQSRVGQLCREPQLAAKKAALVAGVVRPAAEDLPEPVPNCADVRGTFPAAWSATQIAEMELSDFEDCLTLFAGDPGLGPEELRAAMGKAKQLWGPPRGFRPEQILQLGRLLIGLGDRELQELILVDWGVLSTLGQIDGWSTTQLRIVVSSFLRQSGRHVSHLDFVHLTALGYTLCGLRPEELQHISSWEFSQAALFLGTLHLQCSEEQLEVLAHLLVLPGGFGPISNWGPEIFTEIGTIAAGIPDLALSALLRGQIQGVTPLAISVIPPPKFAVVFSPIQLSSLTSAQAVAVTPEQMAFLSPEQRRAVAWAQHEGKESPEQQGRSTAWGLQDWSRPSWSLVLTISFLGHLL

SEQ ID NO: 12939 - protein, 663 aa, Homo sapiens
TFLANISSSFEPGRMGEGPVGEPPPLQPPALRLHDFLVTLRGSPDWEPMLGLLGDMLALLGQEQTPRDFLVHQAGVLGGLVEVLLGALVPGGPPTPTRPPCTRDGPSDCVLAADWLPSLLLLLEGTRWQALVQVQPSVDPTNATGLDGREAAPHFLQGLLGLLTPTGELGSKEALWGGLLRTVGAPLYAAFQEGLLRVTHSLQDEVFSILGQPEPDTNGQCQGGNLQQLLLWGVRHNLSWDVQALGFLSGSPPPPPALLHCLSTGVPLPRASQPSAHISPRQRRAITVEALCENHLGPAPPYSISNFSIHLLCQHTKPATPQPHPSTTAICQTAVWYAVSWAPGAQGWLQACHDQFPDEFLDAICSNLSFSALSGSNRRLVKRLCAGLLPPPTSCPEGLPPVPLTPDIFWGCFLENETLWAERLCGEASLQAVPPSNQAWVQHVCQGPTPDVTASPPCHIGPCGERCPDGGSFLVMVCANDTMYEVLVPFWPWLAGQCRISRGGNDTCFLEGLLGPLLPSLPPLGPSPLCLTPGPFLLGMLSQLPRCQSSVPALAHPTRLHYLLRLLTFLLGPGAGGAEAQGMLGRALLLSSLPDNCSFWDAFRPEGRRSVLRTIGEYLEQDEEQPTPSGFEPTVNPSSGISKMELLACFSVSALPEGKLLEQ

SEQ ID NO: 12940 - protein, 119 aa, Homo sapiens
  SITE 1: note = misc_feature - Xaa can be any naturally occurring amino acid
XSLAAIRDYSPGMRPEQKEALAKRLLAPELFGEVPAWPQELLWAVLPLLPHLPLENFLQLSPHQIQALEDSWPAAGLGPGHARHVLRSLVNQSVQDGEEQVRRWHMNFWVCCAHLEERC

SEQ ID NO: 12941 - protein, 346 aa, Homo sapiens
MTATLAAAADIATMVSGSSGLAAARLLSRSFLLPQNGIRHCSYTASRQHLYVDKNTKIICQGFTGKQGTFHSQQALEYGTKLVGGTTPGKGGQTHLGLPVFNTVKEAKEQTGATASVIYVPPPFAAAAINEAIEAEIPLVVCITEGIPQQDMVRVKHKLLRQEKTRLIGPNCPGVINPGECKIGIMPGHIHKKGRIGIVSRSGTLTYEAVHQTTQVGLGQSLCVGIGGDPFNGTDFIDCLEIFLNDSATEGIILIGEIGGNAEENAAEFLKQHNSGPNSKPVVSFIAGLTAPPGRRMGHAGAIIAGGKGGAKEKISALQSAGVVVSMSPAQLGTTIYKEFEKRKML

SEQ ID NO: 12942 - protein, 105 aa, Homo sapiens
  SITE 1: note = misc_feature - Xaa can be any naturally occurring amino acid
XTLAAAADIATMVSGSSGLAAARLLSRSFLLPQNGIRHCSYTASRQHLYVDKNTKIICQGFTGKQELLLLTRHLSQPAGIGIWHQTRWRNHSRERRPDTSGLTCL

SEQ ID NO: 12943 - protein, 328 aa, Homo sapiens
MSAAGLLAPAPAQAGAPPAPEYYPEEDEELESAEDDERSCRGRESDEDTEDASETDLAKHDEEDYVEMKEQMYQDKLASLKRQLQQLQEGTLQEYQKRMKKLDQQYKERIRNAELFLQLETEQVERNYIKEKKAAVKEFEDKKVELKENLIAELEEKKKMIENEKLTMELTGDSMEVKPIMTRKLRRRPNDPVPIPDKRRKPAPAQLNYLLTDEQIMEDLRTLNKLKSPKRPASPSSPEHLPATPAESPAQRFEARIEDGKLYYDKRWYHKSQAIYLESKDNQKLSCVISSVGANEIWVRKTSDSTKMRIYLGQLQRGLFVIRRRSAA

SEQ ID NO: 12944 - protein, 29 aa, Homo sapiens
MKYSCCALVLAVLGTELLGSLCSTVRSPR

SEQ ID NO: 12945 - protein, 56 aa, Homo sapiens
MKYSCCALVLAVLGTELLGSLCSTVRSPRFRGRIQQERKNIRPNIILVLTDDQDVE

SEQ ID NO: 12946 - protein, 76 aa, Homo sapiens
MKYSCCALVLAVLGTELLGSLCSTVRSPRFRGRIQQERKNIRPNIILVLTDDQDVELGSLQVMNKTRKIMEHGGAT

SEQ ID NO: 12947 - protein, 85 aa, Homo sapiens
MKYSCCALVLAVLGTELLGSLCSTVRSPRFRGRIQQERKNIRPNIILVLTDDQDVELGSLQVMNKTRKIMEHGGATFINAFVTTP

SEQ ID NO: 12948 - protein, 172 aa, Homo sapiens
MKYSCCALVLAVLGTELLGSLCSTVRSPRFRGRIQQERKNIRPNIILVLTDDQDVELGSLQVMNKTRKIMEHGGATFINAFVTTPMCCPSRSSMLTGKYVHNHNVYTNNENCSSPSWQAMHEPRTFAVYLNNTGYRTAFFGKYLNEYNGSYIPPGWREWLGLIKNSRFYNYT

SEQ ID NO: 12949 - protein, 871 aa, Homo sapiens
MKYSCCALVLAVLGTELLGSLCSTVRSPRFRGRIQQERKNIRPNIILVLTDDQDVELGSLQVMNKTRKIMEHGGATFINAFVTTPMCCPSRSSMLTGKYVHNHNVYTNNENCSSPSWQAMHEPRTFAVYLNNTGYRTAFFGKYLNEYNGSYIPPGWREWLGLIKNSRFYNYTVCRNGIKEKHGFDYAKDYFTDLITNESINYFKMSKRMYPHRPVMMVISHAAPHGPEDSAPQFSKLYPNASQHITPSYNYAPNMDKHWIMQYTGPMLPIHMEFTNILQRKRLQTLMSVDDSVERLYNMLVETGELENTYIIYTADHGYHIGQFGLVKGKSMPYDFDIRVPFFIRGPSVEPGSIVPQIVLNIDLAPTILDIAGLDTPPDVDGKSVLKLLDPEKPGNRFRTNKKAKIWRDTFLVERGKFLRKKEESSKNIQQSNHLPKYERVKELCQQARYQTACEQPGQKWQCIEDTSGKLRIHKCKGPSDLLTVRQSTRNLYARGFHDKDKECSCRESGYRASRSQRKSQRQFLRNQGTPKYKPRFVHTRQTRSLSVEFEGEIYDINLEEEEELQVLQPRNIAKRHDEGHKGPRDLQASSGGNRGRMLADSSNAVGPPTTVRVTHKCFILPNDSIHCERELYQSARAWKDHKAYIDKEIEALQDKIKNLREVRGHLKRRKPEECSCSKQSYYNKEKGVKKQEKLKSHLHPFKEAAQEVDSKLQLFKENNRRRKKERKEKRRQRKGEECSLPGLTCFTHDNNHWQTAPFWNLGSFCACTSSNNNTYWCLRTVNETHNFLFCEFATGFLEYFDMNTDPYQLTNTVHTVERGILNQLHVQLMELRSCQGYKQCNPRPKNLDVGNKDGGSYDLHRGQLWDGWEG

SEQ ID NO: 12950 - protein, 871 aa, Homo sapiens; identical to SEQ ID NO: 12949

SEQ ID NO: 12951 - protein, 871 aa, Homo sapiens; identical to SEQ ID NO: 12949

SEQ ID NO: 12952 - protein, 871 aa, Homo sapiens; identical to SEQ ID NO: 12949

SEQ ID NO: 12953 - protein, 669 aa, Homo sapiens
MVISHAAPHGPEDSAPQFSKLYPNASQHITPSYNYAPNMDKHWIMQYTGPMLPIHMEFTNILQRKRLQTLMSVDDSVERLYNMLVETGELENTYIIYTADHGYHIGQFGLVKGKSMPYDFDIRVPFFIRGPSVEPGSIVPQIVLNIDLAPTILDIAGLDTPPDVDGKSVLKLLDPEKPGNRFRTNKKAKIWRDTFLVERGKFLRKKEESSKNIQQSNHLPKYERVKELCQQARYQTACEQPGQKWQCIEDTSGKLRIHKCKGPSDLLTVRQSTRNLYARGFHDKDKECSCRESGYRASRSQRKSQRQFLRNQGTPKYKPRFVHTRQTRSLSVEFEGEIYDINLEEEEELQVLQPRNIAKRHDEGHKGPRDLQASSGGNRGRMLADSSNAVGPPTTVRVTHKCFILPNDSIHCERELYQSARAWKDHKAYIDKEIEALQDKIKNLREVRGHLKRRKPEECSCSKQSYYNKEKGVKKQEKLKSHLHPFKEAAQEVDSKLQLFKENNRRRKKERKEKRRQRKGEECSLPGLTCFTHDNNHWQTAPFWNLGSFCACTSSNNNTYWCLRTVNETHNFLFCEFATGFLEYFDMNTDPYQLTNTVHTVERGILNQLHVQLMELRSCQGYKQCNPRPKNLDVGNKDGGSYDLHRMLLFLVPCSAPLTSRAMVSDASF

SEQ ID NO: 12954 - protein, 131 aa, Homo sapiens
  SITE 1: note = misc_feature - Xaa can be any naturally occurring amino acid
XREVRGHLKRRKPEECSCSKQSYYNKEKGVKKQEKLKSHLHPFKEAAQEVDSKLQLFKENNRRRKKERKEKRRQRKGEECSLPGLTCFTHDNNHWQTAPFWNPHKYSAHGRTRHFESATRTTNGAQKLSRI

SEQ ID NO: 12955 - protein, 189 aa, Homo sapiens
MGPPSLVLCLLSATVFSLLGGSSAFLSHHRLKGRFQRDRRNIRPNIILVLTDDQDVELGSMQVMNKTRRIMEQGGAHFINAFVTTPMCCPSRSSILTGKYVHNHNTYTNNENCSSPSWQAQHESRTFAVYLNSTGYRTAFFGKYLNEYNGSYVPPGWKEWVGLLKNSRFYNYTLCRNGVKEKHGSDYSK

SEQ ID NO: 12956 - protein, 870 aa, Homo sapiens
MGPPSLVLCLLSATVFSLLGGSSAFLSHHRLKGRFQRDRRNIRPNIILVLTDDQDVELGSMQVMNKTRRIMEQGGAHFINAFVTTPMCCPSRSSILTGKYVHNHNTYTNNENCSSPSWQAQHESRTFAVYLNSTGYRTAFFGKYLNEYNGSYVPPGWKEWVGLLKNSRFYNYTLCRNGVKEKHGSDYSKDYLTDLITNDSVSFFRTSKKMYPHRPVLMVISHAAPHGPEDSAPQYSRLFPNASQHITPSYNYAPNPDKHWIMRYTGPMKPIHMEFTNMLQRKRLQTLMSVDDSMETIYNMLVETGELDNTYIVYTADHGYHIGQFGLVKGKSMPYEFDIRVPFYVRGPNVEAGCLNPHIVLNIDLAPTILDIAGLDIPADMDGKSILKLLDTERPVNRFHLKKKMRVWRDSFLVERGKLLHKRDNDKVDAQEENFLPKYQRVKDLCQRAEYQTACEQLGQKWQCVEDATGKLKLHKCKGPMRLGGSRALSNLVPKYYGQGSEACTCDSGDYKLSLAGRRKKLFKKKYKASYVRSRSIRSVAIEVDGRVYHVGLGDAAQPRNLTKRHWPGAPEDQDDKDGGDFSGTGGLPDYSAANPIKVTHRCYILENDTVQCDLDLYKSLQAWKDHKLHIDHEIETLQNKIKNLREVRGHLKKKRPEECDCHKISYHTQHKGRLKHRGSSLHPFRKGLQEKDKVWLLREQKRKKKLRKLLKRLQNNDTCSMPGLTCFTHDNQHWQTAPFWTLGPFCACTSANNNTYWCMRTINETHNFLFCEFATGFLEYFDLNTDPYQLMNAVNTLDRDVLNQLHVQLMELRSCKGYKQCNPRTRNMDLGLKDGGSYEQYRQFQRRKWPEMKRPSSKSLGQLWEGWEG

SEQ ID NO: 12957 - protein, 870 aa, Homo sapiens; identical to SEQ ID NO: 12956

SEQ ID NO: 12958 - protein, 867 aa, Homo sapiens
MGPPSLVLCLLSATVFSLLGGSSAFLSHHRLKGRFQRDRRNIRPNIILVLTDDQDVELGSMQVMNKTRRIMEQGGAHFINAFVTTPMCCPSRSSILTGKYVHNHNTYTNNENCSSPSWQAQHESRTFAVYLNSTGYRTAFFGKYLNEYNGSYVPPGWKEWVGLLKNSRFYNYTLCRNGVKEKHGSDYSKDYLTDLITNDSVSFFRTSKKMYPHRPVLMVISHAAPHGPEDSAPQYSRLFPNASQHITPSYNYAPNPDKHWIMRYTGPMKPIHMEFTNMLQRKRLQTLMSVDDSMETIYNMLVETGELDNTYIVYTADHGYHIGQFGLVKGKSMPYEFDIRVPFYVRGPNVEAGCLNPHIVLNIDLAPTILDIAGLDIPADMDGKSILKLLDTERPVNRFHLKKKMRVWRDSFLVERGKLLHKRDNDKVDAQEENFLPKYQRVKDLCQRAEYQTACEQLGQKWQCVEDATGKLKLHKCKGPMRLGGSRALSNLVPKYYGQGSEACTCDSGDYKLSLAGRRKKLFKKKYKASYVRSRSIRSVAIEVDGRVYHVGLGDAAQPRNLTKRHWPGAPEDQDDKDGGDFSGTGGLPDYSAANPIKVTHRCYILENDTVQCDLDLYKSLQAWKDHKLHIDHEIETLQNKIKNLREVRGHLKKKRPEECDCHKISYHTQHKGRLKHRGSSLHPFRKGLQEKDKVWLLREQKRKKKLRKLLKRLQNNDTCSMPGLTCFTHDNQHWQTAPFWTLGPFCACTSANNNTYWCMRTINETHNFLFCEFATGFLEYFDLNTDPYQLMNAVNTLDRDVLNQLHVQLMELRSCKGYKQCNPRTRNMDLDGGSYEQYRQFQRRKWPEMKRPSSKSLGQLWEGWEG

SEQ ID NO: 12959 - protein, 207 aa, Homo sapiens
  SITE 1: note = misc_feature - Xaa can be any naturally occurring amino acid
XEVRGHLKKKRPEECDCHKISYHTQHKGRLKHRGSSLHPFRKGLQEKDKVWLLREQKRKKKLRKLLKRLQNNDTCSMPGLTCFTHDNQHWQTAPFWTLGPFCACTSANNNTYWCMRTINETHNFLFCEFATGFLEYFDLNTDPYQLMNAVNTLDRDVLNQLHVQLMELRSCKGYKQCNPRTRNMDLGLKDGGSYEQYRGQLWEGWEG

SEQ ID NO: 12960 - protein, 374 aa, Homo sapiens
MAAPALGLVCGRCPELGLVLLLLLLSLLCGAAGSQEAGTGAGAGSLAGSCGCGTPQRPGAHGSSAAAHRYSREANAPGPVPGERQLAHSKMVPIPAGVFTMGTDDPQIKQDGEAPARRVTIDAFYMDAYEVSNTEFEKFVNSTGYLTEAEKFGDSFVFEGMLSEQVKTNIQQAVAAAPWWLPVKGANWRHPEGPDSTILHRPDHPVLHVSWNDAVAYCTWAGKRLPTEAEWEYSCRGGLHNRLFPWGNKLQPKGQHYANIWQGEFPVTNTGEDGFQGTAPVDAFPPNGYGLYNIVGNAWEWTSDWWTVHHSVEETLNPKGPPSGKDRVKKGGSYMCHRSYCYRYRCAARSQNTPDSSASNLGFRCAADRLPTMD

SEQ ID NO: 12961 - protein, 354 aa, Homo sapiens
MAAPALGLVCGRCPELGLVLLLLLLSLLCGAAGSQEAGTGAGAGSLAGSCGCGTPQRPGAHGSSAAAHRYSREANAPGPVPGERQLAHSKMVPIPAGVFTMGTDDPQIKQDGEAPARRVTIDAFYMDAYEVSNTEFEKFVNSTGYLTEAEKFGDSFVFEGMLSEQVKTNIQQAVAAAPWWLPVKGANWRHPEGPDSTILHRPDHPVLHVSWNDAVAYCTWAGKRLPTEAEWEYSCRGGLHNRLFPWGNKLQPKGQHYANIWQGEFPVTNTGEDGFQGTAPVDAFPPNGYGLYNIVGNAWEWTSDWWTVHHSVEETLNPSYCYRYRCAARSQNTPDSSASNLGFRCAADRLPTMD

SEQ ID NO: 12962 - protein, 426 aa, Homo sapiens
MAAPALGLVCGRCPELGLVLLLLLLSLLCGAAGSQEAGTGAGAGSLAGSCGCGTPQRPGAHGSSAAAHRYSREANAPGPVPGERQLAHSKMVPIPAGVFTMGTDDPQIKQDGEAPARRVTIDAFYMDAYEVSNTEFEKFVNSTGYLTEAEKFGDSFVFEGMLSEQVKTNIQQAVAAAPWWLPVKGANWRHPEGPDSTILHRPDHPVLHVSWNDAVAYCTWAGKRLPTEAEWEYSCRGGLHNRLFPWGNKLQPKGQHYANIWQGEFPVTNTGEDGFQGTAPVDAFPPNGYGLYNIVGNAWEWTSDWWTVHHSVEETLNPKGPPSGKDRVKKGGSYMCHRSQEYYDPYFQDVASEMLRRHTASRWKAFSSLEPCCSIRRHQQYAAIERLTCGKFELRCASLRKIDCLNTNIACSYSMRQDGPRLHCVD

SEQ ID NO: 12963 - protein, 349 aa, Homo sapiens
MAAPALGLVCGRCPELGLVLLLLLLSLLCGAAGSQEAGTGAGAGSLAGSCGCGTPQRPGAHGSSAAAHRYSREANAPGPVPGERQLAHSKMVPIPAGVFTMGTDDPQIKQDGEAPARRVTIDAFYMDAYEVSNTEFEKFVNSTGYLTEVAAAPWWLPVKGANWRHPEGPDSTILHRPDHPVLHVSWNDAVAYCTWAGKRLPTEAEWEYSCRGGLHNRLFPWGNKLQPKGQHYANIWQGEFPVTNTGEDGFQGTAPVDAFPPNGYGLYNIVGNAWEWTSDWWTVHHSVEETLNPKGPPSGKDRVKKGGSYMCHRSYCYRYRCAARSQNTPDSSASNLGFRCAADRLPTMD

SEQ ID NO: 12964 - protein, 242 aa, Homo sapiens
MAAPALGLVCGRCPELGLVLLLLLLSLLCGAAGSQEAGTGAGAGSLAGSCGCGTPQRPGAHGSSAAAHRYSREANAPGPVPGERQLAHSKMVPIPAGVFTMGTDDPQIKQDGEAPARRVTIDAFYMDAYEVSNTEFEKFVNSTGYLTEVDAFPPNGYGLYNIVGNAWEWTSDWWTVHHSVEETLNPKGPPSGKDRVKKGGSYMCHRSYCYRYRCAARSQNTPDSSASNLGFRCAADRLPTMD

SEQ ID NO: 12965 - protein, 304 aa, Homo sapiens
HGLPLLPLLSLLVGAWLKLGNGQATSMVQLQGGRFLMGTNSPDSRDGDGPVREATVKPFAIDIFPVTNKDFRDFVREKKYRTEAEMFGWSFVFEDFVSDELRNKATQPMKSGRCLCWAGASCSRSPSFSQSVLWWLPVEKAFWRQPAGPGSGIRERLEHPVLHVSWNDARAYCAWRGKRLPTEEEWEFAARGGLKGQVYPWGNWFQPNRTNLWQGKFPKGDKAEDGFHGVSPVNAFPAQNNYGLYDLLGNVWEWTASPYQAAEQDMRVLRGASWIDTADGSANHRARVTTRMGNTPDSASDNLG

SEQ ID NO: 12966 - protein, 51 aa, Homo sapiens
MARHGLPLLPLLSLLVGAWLKLGILSGRKSIGQKLRCLDGALSLRTLSLMS

SEQ ID NO: 12967 - protein, 232 aa, Homo sapiens
MARHGLPLLPLLSLLVGAWLKLGNGQATSMVQLQGGRFLMGTNSPDSRDGDGPVREATVKPFAIDIFPVTNKDFRDFVREKKYRTEAEMFGWSFVFEDFVSDELRNKATQPMKSVLWWLPVEKAFWRQGKFPKGDKAEDGFHGVSPVNAFPAQNNYGLYDLLGNVWEWTASPYQAAEQDMRVLRGASWIDTADGSANHRARVTTRMGNTPDSASDNLGFRCAADAGRPPGEL

SEQ ID NO: 12968 - protein, 183 aa, Homo sapiens
MARHGLPLLPLLSLLVGAWLKLGNGQATSMVQLQGGRFLMGTNSPDSRDGDGPVREATVKPFAIDIFPVTNKDFRDFVREKKYRTEAEMFGWSFVFEDFVSDELRNKATQPMKSVLWWLPVEKAFWRQPAGPGSGIRERLEHPVLHVKFTHGGTGSSQTAPTCGRESSPRETKLRMASMESPQ

SEQ ID NO: 12969 - protein, 352 aa, Homo sapiens
MARHGLPLLPLLSLLVGAWLKLGNGQATSMVQLQGGRFLMGTNSPDSRDGDGPVREATVKPFAIDIFPVTNKDFRDFVREKKYRTEAEMFGWSFVFEDFVSDELRNKATQPMKSVLWWLPVEKAFWRQPAGPGSGIRERLEHPVLHVSWNDARAYCAWRGKRLPTEEEWEFAARGGLKGQVYPWGNWFQPNRTNLWQGKFPKGDKAEDGFHGVSPVNAFPAQNNYGLYDLLGNVWEWTASPYQAAEQDMRVLRGASWIDTADGSANHRARVTTRVLLCCPGWSAVAQSQLTTASNCQALAILPPQLLKYLGLQDGQHSRFSLRQPRFPLCCRRRPAARGAVSSRVVTRRKAF

SEQ ID NO: 12970 - protein, 165 aa, Homo sapiens
MARHGLPLLPLLSLLVGAWLKLGNGQATSMVQLQGGRFLMGTNSPDSRDGDGPVREATVKPFAIDIFPVTNKDFRDFVREKKYRTEAEMFGWSFVFEDFVSDELRNKATQPMKSVLWWLPVEKAFWRQVKFTHGGTGSSQTAPTCGRESSPRETKLRMASMESPQ

SEQ ID NO: 12971 - protein, 150 aa, Homo sapiens
MARHGLPLLPLLSLLVGAWLKLGNGQATSMVQLQGGRFLMGTNSPDSRDGDGPVREATVKPFAIDIFPVTNKDFRDFVREKKYRTEAEMFGWSFVFEDFVSDELRNKATQPMKVKFTHGGTGSSQTAPTCGRESSPRETKLRMASMESPQ

SEQ ID NO: 12972 - protein, 102 aa, Homo sapiens
MARHGLPLLPLLSLLVGAWLKLGNGQATSMVQLQGGRFLMGTNSPDSRDGDGPVREATVKPFAIDIFPVTNKDFRSSLPMGELVPAKPHQPVAGKVPQGRQS

SEQ ID NO: 12973 - protein, 213 aa, Homo sapiens
MFGWSFVFEDFVSDELRNKATQPMKSVLWWLPVEKAFWRQPAGPGSGIRERLEHPVLHVSWNDARAYCAWRGKRLPTEEEWEFAARGGLKGQVYPWGNWFQPNRTNLWQGKFPKGDKAEDGFHGVSPVNAFPAQNNYGLYDLLGNVWEWTASPYQAAEQDMRVLRGASWIDTADGSANHRARVTTRMGNTPDSASDNLGFRCAADAGRPPGEL

SEQ ID NO: 12974 - protein, 236 aa, Homo sapiens
MRAHAQRGRGCTRRSAAVLMARHGLPLLPLLSLLVGAWLKLGNGQATSMVQLQGGRFLMGTNSPDSRDGDGPVREATVKPFAIDIFPVTNKDFRDFVREKKYRTEAEMFGWSFVFEDFVSDELRNKATQPMKGKFPKGDKAEDGFHGVSPVNAFPAQNNYGLYDLLGNVWEWTASPYQAAEQDMRVLRGASWIDTADGSANHRARVTTRMGNTPDSASDNLGFRCAADAGRPPGEL

SEQ ID NO: 12975 - protein, 305 aa, Homo sapiens
MRAHAQRGRGCTRRSAAVLMARHGLPLLPLLSLLVGAWLKLGNGQATSMVQLQGGRFLMGTNSPDSRDGDGPVREATVKPFAIDIFPVTNKDFRDFVREKKYRTEAEMFGWSFVFEDFVSDELRNKATQPMKPAGPGSGIRERLEHPVLHVSWNDARAYCAWRGKRLPTEEEWEFAARGGLKGQVYPWGNWFQPNRTNLWQGKFPKGDKAEDGFHGVSPVNAFPAQNNYGLYDLLGNVWEWTASPYQAAEQDMRVLRGASWIDTADGSANHRARVTTRMGNTPDSASDNLGFRCAADAGRPPGEL

SEQ ID NO: 12976 - protein, 320 aa, Homo sapiens
MRAHAQRGRGCTRRSAAVLMARHGLPLLPLLSLLVGAWLKLGNGQATSMVQLQGGRFLMGTNSPDSRDGDGPVREATVKPFAIDIFPVTNKDFRDFVREKKYRTEAEMFGWSFVFEDFVSDELRNKATQPMKSVLWWLPVEKAFWRQPAGPGSGIRERLEHPVLHVSWNDARAYCAWRGKRLPTEEEWEFAARGGLKGQVYPWGNWFQPNRTNLWQGKFPKGDKAEDGFHGVSPVNAFPAQNNYGLYDLLGNVWEWTASPYQAAEQDMRVLRGASWIDTADGSANHRARVTTRMGNTPDSASDNLGFRCAADAGRPPGEL

SEQ ID NO: 12977 - protein, 358 aa, Homo sapiens
MRAHAQRGRGCTRRSAAVLMARHGLPLLPLLSLLVGAWLKLGNGQATSMVQLQGGRFLMGTNSPDSRDGDGPVREATVKPFAIDIFPVTNKDFRDFVREKKYRTEAEMFGWSFVFEDFVSDELRNKATQPMKSVLWWLPVEKAFWRQPAGPGSGIRERLEHPVLHVSWNDARAYCAWRGKRLPTEEEWEFAARGGLKGQVYPWGNWFQPNRTNLWQGKFPKGDKAEDGFHGVSPVNAFPAQNNYGWATLQIQPQTTSVSAVLQTQAGRQGSCKQPGGDKEKSLLGSLSFPGHVANSAIPSSRASASGKNFPFPVSHPSVAGASHQGRRGLSLLCFGEGAQCVLTMAGGQVFLLEAKYY

SEQ ID NO: 12978 - protein, 294 aa, Homo sapiens
MRAHAQRGRGCTRRSAAVLMARHGLPLLPLLSLLVGAWLKLGNGQATSMVQLQGGRFLMGTNSPDSRDGDGPVREATVKPFAIDIFPVTNKDFRYIRDFVREKKYRTEAEMFGWSFVFEDFVSDELRNKATQPMKSVLWWLPVEKAFWRQPAGPGSGIRERLEHPVLHVSWNDARAYCAWRGKRLPTEEEWEFAARGGLKGQVYPWGNWFQPNRTNLWQGKFPKGDKAEDGFHGVSPVNAFPAQNNYGLYDLLGNVWEWTASPYQAAEQDMRVLRGASWIDTADGSANHRARVT

SEQ ID NO: 12979 - protein, 747 aa, Homo sapiens
MGRGPWDAGPSRRLLPLLLLLGLARGAAGAPGPDGLDVCATCHEHATCQQREGKKICICNYGFVGNGRTQCVDKNECQFGATLVCGNHTSCHNTPGGFYCICLEGYRATNNNKTFIPNDGTFCTDIDECEVSGLCRHGGRCVNTHGSFECYCMDGYLPRNGPEPFHPTTDATSCTEIDCGTPPEVPDGYIIGNYTSSLGSQVRYACREGFFSVPEDTVSSCTGLGTWESPKLHCQEINCGNPPEMRHAILVGNHSSRLGGVARYVCQEGFESPGGKITSVCTEKGTWRESTLTCTEILTKINDVSLFNDTCVRWQINSRRINPKISYVISIKGQRLDPMESVREETVNLTTDSRTPEVCLALYPGTNYTVNISTAPPRRSMPAVIGFQTAEVDLLEDDGSFNISIFNETCLKLNRRSRKVGSEHMYQFTVLGQRWYLANFSHATSFNFTTREQVPVVCLDLYPTTDYTVNVTLLRSPKRHSVQITIATPPAVKQTISNISGFNETCLRWRSIKTADMEEMYLFHIWGQRWYQKEFAQEMTFNISSSSRDPEVCLDLRPGTNYNVSLRALSSELPVVISLTTQITEPPLPEVEFFTVHRGPLPRLRLRKAKEKNGPISSYQVLVLPLALQSTFSCDSEGASSFFSNASDADGYVAAELLAKDVPDDAMEIPIGDRLYYGEYYNAPLKRGSDYCIILRITSEWNKVRRHSCAVWAQVKDSSLMLLQMAGVGLGSLAVVIILTFLSFSAV

SEQ ID NO: 12980 - protein, 757 aa, Homo sapiens
MGRGPWDAGPSRRLLPLLLLLGLARGAAGAPGPDGLDVCATCHEHATCQQREGKKICICNYGFVGNGRTQCVDKNECQFGATLVCGNHTSCHNTPGGFYCICLEGYRATNNNKTFIPNDGTFCTDIDECEVSGLCRHGGRCVNTHGSFECYCMDGYLPRNGPEPFHPTTDATSCTEIDCGTPPEVPDGYIIGNYTSSLGSQVRYACREGFFSVPEDTVSSCTGLGTWESPKLHCQEINCGNPPEMRHAILVGNHSSRLGGVARYVCQEGFESPGGKITSVCTEKGTWRESTLTCTEILTKINDVSLFNDTCVRWQINSRRINPKISYVISIKGQRLDPMESVREETVNLTTDSRTPEVCLALYPGTNYTVNISTAPPRRSMPAVIGFQTAEVDLLEDDGSFNISIFNETCLKLNRRSRKVGSEHMYQFTVLGQRWYLANFSHATSFNFTTREQVPVVCLDLYPTTDYTVNVTLLRSPKRHSVQITIATPPAVKQTISNISGFNETCLRWRSIKTADMEEMYLFHIWGQRWYQKEFAQEMTFNISSSSRDPEVCLDLRPGTNYNVSLRALSSELPVVISLTTQITEPPLPEVEFFTVHRGPLPRLRLRKAKEKNGPISSYQVLVLPLALQSTFSCDSEGASSFFSNASDADGYVAAELLAKDVPDDAMEIPIGDRLYYGEYYNAPLKRGSDYCIILRITSEWNKVRRHSCAVWAQVKEIPCNCNFLRLHIHRANSGDTQIRHSCCCRWRVLDWVPWLL

SEQ ID NO: 12981 - protein, 722 aa, Homo sapiens
MGRGPWDAGPSRRLLPLLLLLGLARGAAGAPGPDGLDVCATCHEHATCQQREGKKICICNYGFVGNGRTQCVDKNECQFGATLVCGNHTSCHNTPGGFYCICLEGYRATNNNKTFIPNDGTFCTDIDECEVSGLCRHGGRCVNTHGSFECYCMDGYLPRNGPEPFHPTTDATSCTEIDCGTPPEVPDGYIIGNYTSSLGSQVRYACREGFFSVPEDTVSSCTGLGTWESPKLHCQEINCGNPPEMRHAILVGNHSSRLGGVARYVCQEGFESPGGKITSVCTEKGTWRESTLTCTEILTKINDVSLFNDTCVRWQINSRRINPKISYVISIKGQRLDPMESVREETVNLTTDSRTPEVCLALYPGTNYTVNISTAPPRRSMPAVIGFQTAEVDLLEDDGSFNISIFNETCLKLNRRSRKVGSEHMYQFTVLGQRWYLANFSHATSFNFTTREQVPVVCLDLYPTTDYTVNVTLLRSPKRHSVQITIATPPAVKQTISNISGFNETCLRWRSIKTADMEEMYLFHIWGQRWYQKEFAQEMTFNISSSSRDPEVCLDLRPGTNYNVSLRALSSELPVVISLTTQITEPPLPEVEFFTVHRGPLPRLRLRKAKEKNGPISSYQVLVLPLALQSTFSCDSEGASSFFSNASDADGYVAAELLAKDVPDDAMEIPIGDRLYYGEYYNAPLKRGSDYCIILRITSEWNKIRHSCCCRWRVLDWVPWLL

SEQ ID NO: 12982 - protein, 45 aa, Homo sapiens
VITALYYESQVNGISIKFILMRSVYIIVTGDQNPIHTTLSKELHS

SEQ ID NO: 12983 - protein, 281 aa, Homo sapiens
  SITE 1: note = misc_feature - Xaa can be any naturally occurring amino acid
XGYIIGNYTSSLGSQVRYACREGFFSVPEDTVSSCTGLGTWESPKLHCQEINCGNPPEMRHAILVGNHSSRLGGVARYVCQEGFESPGGKITSVCTEKGTWRESTLTCTEILTKINDVSLFNDTCVRWQINSRRINPKISYVISIKGQRLDPMESVREETVNLTTDSRTPEVCLALYPGTNYTVNISTAPPRRSMPAVIGFQTAGSRNSHGRNTHIKEVDLLEDDGSFNISIFNETCLKLNRRSRKVGSEHMYQFTVLGQRWYLANFSHATSFNFTTREQV

SEQ ID NO: 12984 - protein, 706 aa, Homo sapiens
  SITE 1: note = misc_feature - Xaa can be any naturally occurring amino acid
XLLLLGLARGAAGAPGPDGLDVCATCHEHATCQQREGKKICICNYGFVGNGRTQCVDKNECQFGATLVCGNHTSCHNTPGGFYCICLEGYRATNNNKTFIPNDGTFCTDIDECEVSGLCRHGGRCVNTHGSFECYCMDGYLPRNGPEPFHPTTDATSCTEIDCGTPPEVPDGYIIGNYTSSLGSQVRYACREGFFSVPEDTVSSCTGLGTWESPKLHCQEINCGNPPEMRHAILVGNHSSRLGGVARYVCQEGFESPGGKITSVCTEKGTWRESTLTCTEILTKINDVSLFNDTCVRWQINSRRINPKISYVISIKGQRLDPMESVREETVNLTTDSRTPEVCLALYPGTNYTVNISTAPPRRSMPAVIGFQTAEVDLLEDDGSFNISIFNETCLKLNRRSRKVGSEHMYQFTVLGQRWYLANFSHATSFNFTTREQVPVVCLDLYPTTDYTVNVTLLRSPKRHSVQITIATPPAVKQTISNISGFNETCLRWRSIKTADMEEMYLFHIWGQRWYQKEFAQEMTFNISSSSRDPEVCLDLRPGTNYNVSLRALSSELPVVISLTTQITEPPLPEVEFFTVHRGPLPRLRLRKAKEKNGPISSYQVLVLPLALQSTFSCDSEGASSFFSNASDADGYVAAELLAKDVPDDAMEIPIGDRLYYGEYYNAPLKRGSDYCIILRITSEWNKIRHSCCCRWRVLDWVPWLL

SEQ ID NO: 12985 - protein, 629 aa, Homo sapiens
MTAEGPSPPARWHRRLPGLWAAALLLLGLPRLSVRADGKFFVLESQNGSQGLQLEAARLSCKSRGAHLASADELRRVVQDCSFAVCTTGWLADGTLGTTVCSKGSGEQQIMRAVDVRIESNPVPGGTYSALCIKDEEKPCGDPPSFPHTILQGRTGLEMGDELLYVCAPGHIMGHRETAFTLLCNSCGEWYGLVQACGKDEAEAHIDYEDNFPDDRSVSFRELMEDSRTEADEDRGQGDSSEEAPKQDRLVSISVGRENIARDKVFVPTTGLPGAGSSVPADSPGSRLLQKHLFWFPAEAFHKPGLEKEVDDDTKKQFSAGDNHSGVKLVPGEPETKVIYGNTDGPSGPFVGKNDSKAGDPVVSSSDESWLDGYPVTEGAWRKTEAEEEEDGDRGDGSVGLDENVLVTPDQPILVEVKKPKSSTLTPSEGMTHSSVLPSQMLDVEALALRPVNASETEGIGDGDLTKYQSTLPWRFITEESPMATLSYELTSSTLEILTVNTVKQTPNHIPSTIMATTQPPVETTVPEIQDSFPYLLSEDFFGQEGPGPGASEELHPTLESCVGDGCPGLSRGPVIATIVTVLCLLLLLAGVGMVWGYRKCQHKSSVYKLNVGQRQARHYHQQIEMEKV

SEQ ID NO: 12986 - protein, 243 aa, Homo sapiens
  SITE 1: note = misc_feature - Xaa can be any naturally occurring amino acid
XAEGPSPPARWHRRLPGLWAAALLLLGLPRLSVRADGKFFVLESQNGSQGLQLEAARLSCKSRGAHLASADELRRVVQDCSFAVCTTGWLADGTLGTTVCSKGSGEQQIMRAVDVRIESNPVPGGTYSALCIKDEDEAEAHIDYEDNFPDDRSVSFRELMEDSRTEADEDRGQGDSSEEAPKQDRLVSISVGRENIARDKVFVPTTGLPGAGSSVPADSPGSRLLQKHLFWFPAEAFHKPGLE

SEQ ID NO: 12987 - protein, 3571 aa, Homo sapiens
MWPRLAFCCWGLALVSGWATFQQMSPSRNFSFRLFPETAPGAPGSIPAPPAPGDEAAGSRVERLGQAFRRRVRLLRELSERLELVFLVDDSSSVGEVNFRSELMFVRKLLSDFPVVPTATRVAIVTFSSKNYVVPRVDYISTRRARQHKCALLLQEIPAISYRGGGTYTKGAFQQAAQILLHARENSTKVVFLITDGYSNGGDPRPIAASLRDSGVEIFTFGIWQGNIRELNDMASTPKEEHCYLLHSFEEFEALARRALHEDLPSGSFIQDDMVHCSYLCDEGKDCCDRMGSCKCGTHTGHFECICEKGYYGKGLQYECTACPSGTYKPEGSPGGISSCIPCPDENHTSPPGSTSPEDCVCREGYRASGQTCELVHCPALKPPENGYFIQNTCNNHFNAACGVRCHPGFDLVGSSIILCLPNGLWSGSESYCRVRTCPHLRQPKHGHISCSTREMLYKTTCLVACDEGYRLEGSDKLTCQGNSQWDGPEPRCVERHCSTFQMPKDVIISPHNCGKQPAKFGTICYVSCRQGFILSGVKEMLRCTTSGKWNVGVQAAVCKDVEAPQINCPKDIEAKTLEQQDSANVTWQIPTAKDNSGEKVSVHVHPAFTPPYLFPIGDVAIVYTATDLSGNQASCIFHIKVIDAEPPVIDWCRSPPPVQVSEKVHAASWDEPQFSDNSGAELVITRSHTQGDLFPQGETIVQYTATDPSGNNRTCDIHIVIKGSPCEIPFTPVNGDFICTPDNTGVNCTLTCLEGYDFTEGSTDKYYCAYEDGVWKPTYTTEWPDCAKKRFANHGFKSFEMFYKAARCDDTDLMKKFSEAFETTLGKMVPSFCSDAEDIDCRLEENLTKKYCLEYNYDYENGFAIGPGGWGAANRLDYSYDDFLDTVQETATSIGNAKSSRIKRSAPLSDYKIKLIFNITASVPLPDERNDTLEWENQQRLLQTLETITNKLKRTLNKDPMYSFQLASEILIADSNSLETKKASPFCRPGSVLRGRMCVNCPLGTYYNLEHFTCESCRIGSYQDEEGQLECKLCPSGMYTEYIHSRNISDCKAQCKQGTYSYSGLETCESCPLGTYQPKFGSRSCLSCPENTSTVKRGAVNISACGVPCPEGKFSRSGLMPCHPCPRDYYQPNAGKAFCLACPFYGTTPFAGSRSITECSSFSSTFSAAEESVVPPASLGHIKKRHEISSQVFHECFFNPCHNSGTCQQLGRGYVCLCPLGYTGLKCETDIDECSPLPCLNNGVCKDLVGEFICECPSGYTGQRCEENINECSSSPCLNKGICVDGVAGYRCTCVKGFVGLHCETEVNECQSNPCLNNAVCEDQVGGFLCKCPPGFLGTRCGKNVDECLSQPCKNGATCKDGANSFRCLCAAGFTGSHCELNINECQSNPCRNQATCVDELNSYSCKCQPGFSGKRCETEQSTGFNLDFEVSGIYGYVMLDGMLPSLHALTCTFWMKSSDDMNYGTPISYAVDNGSDNTLLLTDYNGWVLYVNGREKITNCPSVNDGRWHHIAITWTSANGIWKVYIDGKLSDGGAGLSVGLPIPGGGALVLGQEQDKKGEGFSPAESFVGSISQLNLWDYVLSPQQVKSLATSCPEELSKGNVLAWPDFLSGIVGKVKIDSKSIFCSDCPRLGGSVPHLRTASEDLKPGSKVNLFCDPGFQLVGNPVQYCLNQGQWTQPLPHCERISCGVPPPLENGFHSADDFYAGSTVTYQCNNGYYLLGDSRMFCTDNGSWNGVSPSCLDVDECAVGSDCSEHASCLNVDGSYICSCVPPYTGDGKNCAEPIKCKAPGNPENGHSSGEIYTVGAEVTFSCQEGYQLMGVTKITCLESGEWNHLIPYCKAVSCGKPAIPENGCIEELAFTFGSKVTYRCNKGYTLAGDKESSCLANSSWSHSPPVCEPVKCSSPENINNGKYILSGLTYLSTASYSCDTGYSLQGPSIIECTASGIWDRAPPACHLVFCGEPPAIKDAVITGNNFTFRNTVTYTCKEGYTLAGLDTIECLADGKWSRSDQQCLAVSCDEPPIVDHASPETAHRLFGDIAFYYCSDGYSLADNSQLLCNAQGKWVPPEGQDMPRCIAHFCEKPPSVSYSILESVSKAKFAAGSVVSFKCMEGFVLNTSAKIECMRGGQWNPSPMSIQCIPVRCGEPPSIMNGYASGSNYSFGAMVAYSCNKGFYIKGEKKSTCEATGQWSSPIPTCHPVSCGEPPKVENGFLEHTTGRIFESEVRYQCNPGYKSVGSPVFVCQANRHWHSESPLMCVPLDCGKPPPIQNGFMKGENFEVGSKVQFFCNEGYELVGDSSWTCQKSGKWNKKSNPKCMPAKCPEPPLLENQLVLKELTTEVGVVTFSCKEGHVLQGPSVLKCLPSQQWNDSFPVCKIVLCTPPPLISFGVPIPSSALHFGSTVKYSCVGGFFLRGNSTTLCQPDGTWSSPLPECVPVECPQPEEIPNGIIDVQGLAYLSTALYTCKPGFELVGNTTTLCGENGHWLGGKPTCKAIECLKPKEILNGKFSYTDLHYGQTVTYSCNRGFRLEGPSALTCLETGDWDVDAPSCNAIHCDSPQPIENGFVEGADYSYGAIIIYSCFPGFQVAGHAMQTCEESGWSSSIPTCMPIDCGLPPHIDFGDCTKLKDDQGYFEQEDDMMEVPYVTPHPPYHLGAVAKTWENTKESPATHSSNFLYGTMVSYTCNPGYELLGNPVLICQEDGTWNGSAPSCISIECDLPTAPENGFLRFTETSMGSAVQYSCKPGHILAGSDLRLCLENRKWSGASPRCEAISCKKPNPVMNGSIKGSNYTYLSTLYYECDPGYVLNGTERRTCQDDKNWDEDEPICIPVDCSSPPVSANGQVRGDEYTFQKEIEYTCNEGFLLEGARSRVCLANGSWSGATPDCVPVRCATPPQLANGVTEGLDYGFMKEVTFHCHEGYILHGAPKLTCQSDGNWDAEIPLCKPVNCGPPEDLAHGFPNGFSFIHGGHIQYQCFPGYKLHGNSSRRCLSNGSWSGSSPSCLPCRCSTPVIEYGTVNGTDFDCGKAARIQCFKGFKLLGLSEITCEADGQWSSGFPHCEHTSCGSLPMIPNAFISETSSWKENVITYSCRSGYVIQGSSDLICTEKGVWSQPYPVCEPLSCGSPPSVANAVATGEAHTYESEVKLRCLEGYTMDTDTDTFTCQKDGRWFPERISCSPKKCPLPENITHILVHGDDFSVNRQVSVSCAEGYTFEGVNISVCQLDGTWEPPFSDESCSPVSCGKPESPEHGFVVGSKYTFESTIIYQCEPGYELEGNRERVCQENRQWSGGVAICKETRCETPLEFLNGKADIENRTTGPNVVYSCNRGYSLEGPSEAHCTENGTWSHPVPLCKPNPCPVPFVIPENALLSEKEFYVDQNVSIKCREGFLLQGHGIITCNPDETWTQTSAKCEKISCGPPAHVENAIARGVHYQYGDMITYSCYSGYMLEGFLRSVCLENGTWTSPPICRAVCRFPCQNGGICQRPNACSCPEGWMGRLCEEPICILPCLNGGRCVAPYQCDCPPGWTGSRCHTAVCQSPCLNGGKCVRPNRCHCLSSWTGHNCSRKRRTGF

SEQ ID NO: 12988 - protein, 868 aa, Homo sapiens
MWPRLAFCCWGLALVSGWATFQQMSPSRNFSFRLFPETAPGAPGSIPAPPAPGDEAAGSRVERLGQAFRRRVRLLRELSERLELVFLVDDSSSVGEVNFRSELMFVRKLLSDFPVVPTATRVAIVTFSSKNYVVPRVDYISTRRARQHKCALLLQEIPAISYRGGGTYTKGAFQQAAQILLHARENSTKVVFLITDGYSNGGDPRPIAASLRDSGVEIFTFGIWQGNIRELNDMASTPKEEHCYLLHSFEEFEALARRALHEDLPSGSFIQDDMVHCSYLCDEGKDCCDRMGSCKCGTHTGHFECICEKGYYGKGLQYECTACPSGTYKPEGSPGGISSCIPCPDENHTSPPGSTSPEDCVCREGYRASGQTCELVHCPALKPPENGYFIQNTCNNHFNAACGVRCHPGFDLVGSSIILCLPNGLWSGSESYCRVRTCPHLRQPKHGHISCSTREMLYKTTCLVACDEGYRLEGSDKLTCQGNSQWDGPEPRCVERHCSTFQMPKDVIISPHNCGKQPAKFGTICYVSCRQGFILSGVKEMLRCTTSGKWNVGVQAAVCKDVEAPQINCPKDIEAKTLEQQDSANVTWQIPTAKDNSGEKVSVHVHPAFTPPYLFPIGDVAIVYTATDLSGNQASCIFHIKVIDAEPPVIDWCRSPPPVQVSEKVHAASWDEPQFSDNSGAELVITRSHTQGDLFPQGETIVQYTATDPSGNNRTCDIHIVIKGSPCEIPFTPVNGDFICTPDNTGVNCTLTCLEGYDFTEGSTDKYYCAYEDGVWKPTYTTEWPDCAKKRFANHGFKSFEMFYKAARCDDTDLMKKFSEAFETTLGKMVPSFCSDAEDIDCRLEENLTKKYCLEYNYDYENGFAIGN

SEQ ID NO: 12989 - protein, 3574 aa, Homo sapiens
MWPRLAFCCWGLALVSGWATFQQMSPSRNFSFRLFPETAPGAPGSIPAPPAPGDEAAGSRVERLGQAFRRRVRLLRELSERLELVFLVDDSSSVGEVNFRSELMFVRKLLSDFPVVPTATRVAIVTFSSKNYVVPRVDYISTRRARQHKCALLLQEIPAISYRGGGTYTKGAFQQAAQILLHARENSTKVVFLITDGYSNGGDPRPIAASLRDSGVEIFTFGIWQGNIRELNDMASTPKEEHCYLLHSFEEFEALARRALHEDLPSGSFIQDDMVHCSYLCDEGKDCCDRMGSCKCGTHTGHFECICEKGYYGKGLQYECTACPSGTYKPEGSPGGISSCIPCPDENHTSPPGSTSPEDCVCREGYRASGQTCELVHCPALKPPENGYFIQNTCNNHFNAACGVRCHPGFDLVGSSIILCLPNGLWSGSESYCRVRTCPHLRQPKHGHISCSTREMLYKTTCLVACDEGYRLEGSDKLTCQGNSQWDGPEPRCVERHCSTFQMPKDVIISPHNCGKQPAKFGTICYVSCRQGFILSGVKEMLRCTTSGKWNVGVQAAVCKDVEAPQINCPKDIEAKTLEQQDSANVTWQIPTAKDNSGEKVSVHVHPAFTPPYLFPIGDVAIVYTATDLSGNQASCIFHIKVIDAEPPVIDWCRSPPPVQVSEKVHAASWDEPQFSDNSGAELVITRSHTQGDLFPQGETIVQYTATDPSGNNRTCDIHIVIKGSPCEIPFTPVNGDFICTPDNTGVNCTLTCLEGYDFTEGSTDKYYCAYEDGVWKPTYTTEWPDCAKKRFANHGFKSFEMFYKAARCDDTDLMKKFSEAFETTLGKMVPSFCSDAEDIDCRLEENLTKKYCLEYNYDYENGFAIGPGGWGAANRLDYSYDDFLDTVQETATSIGNAKSSRIKRSAPLSDYKIKLIFNITASVPLPDERNDTLEWENQQRLLQTLETITNKLKRTLNKDPMYSFQLASEILIADSNSLETKKASPFCRPGSVLRGRMCVNCPLGTYYNLEHFTCESCRIGSYQDEEGQLECKLCPSGMYTEYIHSRNISDCKAQCKQGTYSYSGLETCESCPLGTYQPKFGSRSCLSCPENTSTVKRGAVNISACGVPCPEGKFSRSGLMPCHPCPRDYYQPNAGKAFCLACPFYGTTPFAGSRSITECSSFSSTFSAAEESVVPPASLGHIKKRHEISSQVFHECFFNPCHNSGTCQQLGRGYVCLCPLGYTGLKCETDIDECSPLPCLNNGVCKDLVGEFICECPSGYTGQRCEENINECSSSPCLNKGICVDGVAGYRCTCVKGFVGLHCETEVNECQSNPCLNNAVCEDQVGGFLCKCPPGFLGTRCGKNVDECLSQPCKNGATCKDGANSFRCLCAAGFTGSHCELNINECQSNPCRNQATCVDELNSYSCKCQPGFSGKRCETEQSTGFNLDFEVSGIYGYVMLDGMLPSLHALTCTFWMKSSDDMNYGTPISYAVDNGSDNTLLLTDYNGWVLYVNGREKITNCPSVNDGRWHHIAITWTSANGIWKVYIDGKLSDGGAGLSVGLPIPGMLGGGALVLGQEQDKKGEGFSPAESFVGSISQLNLWDYVLSPQQVKSLATSCPEELSKGNVLAWPDFLSGIVGKVKIDSKSIFCSDCPRLGGSVPHLRTASEDLKPGSKVNLFCDPGFQLVGNPVQYCLNQGQWTQPLPHCERISCGVPPPLENGFHSADDFYAGSTVTYQCNNGYYLLGDSRMFCTDNGSWNGVSPSCLDVDECAVGSDCSEHASCLNVDGSYICSCVPPYTGDGKNCAEPIKCKAPGNPENGHSSGEIYTVGAEVTFSCQEGYQLMGVTKITCLESGEWNHLIPYCKAVSCGKPAIPENGCIEELAFTFGSKVTYRCNKGYTLAGDKESSCLANSSWSHSPPVCEPVKCSSPENINNGKYILSGLTYLSTASYSCDTGYSLQGPSIIECTASGIWDRAPPACHLVFCGEPPAIKDAVITGNNFTFRNTVTYTCKEGYTLAGLDTIECLADGKWSRSDQQCLAVSCDEPPIVDHASPETAHRLFGDIAFYYCSDGYSLADNSQLLCNAQGKWVPPEGQDMPRCIAHFCEKPPSVSYSILESVSKAKFAAGSVVSFKCMEGFVLNTSAKIECMRGGQWNPSPMSIQCIPVRCGEPPSIMNGYASGSNYSFGAMVAYSCNKGFYIKGEKKSTCEATGQWSSPIPTCHPVSCGEPPKVENGFLEHTTGRIFESEVRYQCNPGYKSVGSPVFVCQANRHWHSESPLMCVPLDCGKPPPIQNGFMKGENFEVGSKVQFFCNEGYELVGDSSWTCQKSGKWNKKSNPKCMPAKCPEPPLLENQLVLKELTTEVGVVTFSCKEGHVLQGPSVLKCLPSQQWNDSFPVCKIVLCTPPPLISFGVPIPSSALHFGSTVKYSCVGGFFLRGNSTTLCQPDGTWSSPLPECVPVECPQPEEIPNGIIDVQGLAYLSTALYTCKPGFELVGNTTTLCGENGHWLGGKPTCKAIECLKPKEILNGKFSYTDLHYGQTVTYSCNRGFRLEGPSALTCLETGDWDVDAPSCNAIHCDSPQPIENGFVEGADYSYGAIIIYSCFPGFQVAGHAMQTCEESGWSSSIPTCMPIDCGLPPHIDFGDCTKLKDDQGYFEQEDDMMEVPYVTPHPPYHLGAVAKTWENTKESPATHSSNFLYGTMVSYTCNPGYELLGNPVLICQEDGTWNGSAPSCISIECDLPTAPENGFLRFTETSMGSAVQYSCKPGHILAGSDLRLCLENRKWSGASPRCEAISCKKPNPVMNGSIKGSNYTYLSTLYYECDPGYVLNGTERRTCQDDKNWDEDEPICIPVDCSSPPVSANGQVRGDEYTFQKEIEYTCNEGFLLEGARSRVCLANGSWSGATPDCVPVRCATPPQLANGVTEGLDYGFMKEVTFHCHEGYILHGAPKLTCQSDGNWDAEIPLCKPVNCGPPEDLAHGFPNGFSFIHGGHIQYQCFPGYKLHGNSSRRCLSNGSWSGSSPSCLPCRCSTPVIEYGTVNGTDFDCGKAARIQCFKGFKLLGLSEITCEADGQWSSGFPHCEHTSCGSLPMIPNAFISETSSWKENVITYSCRSGYVIQGSSDLICTEKGVWSQPYPVCEPLSCGSPPSVANAVATGEAHTYESEVKLRCLEGYTMDTDTDTFTCQKDGRWFPERISCSPKKCPLPENITHILVHGDDFSVNRQVSVSCAEGYTFEGVNISVCQLDGTWEPPFSDESCSPVSCGKPESPEHGFVVGSKYTFESTIIYQCEPGYELEGNRERVCQENRQWSGGVAICKETRCETPLEFLNGKADIENRTTGPNVVYSCNRGYSLEGPSEAHCTENGTWSHPVPLCKPNPCPVPFVIPENALLSEKEFYVDQNVSIKCREGFLLQGHGIITCNPDETWTQTSAKCEKISCGPPAHVENAIARGVHYQYGDMITYSCYSGYMLEGFLRSVCLENGTWTSPPICRAVCRFPCQNGGICQRPNACSCPEGWMGRLCEEPICILPCLNGGRCVAPYQCDCPPGWTGSRCHTAVCQSPCLNGGKCVRPNRCHCLSSWTGHNCSRKRRTGF

SEQ ID NO: 12990 - protein, 229 aa, Homo sapiens
MPAAGPPLLLLGTPGSGKTALLFAAALEAAGEGQGPVLFLTRRPLQSMPRGTGTTLDPMRLQKIRFQYPPSTRELFRLLCSAHEAPGPAPSLLLLDGLEEYLAEDPEPQEAAYLIALLLDTAAHFSHRLGPGRDCGLMVALQTQEEAGSGDVLHLALLQRYFPAQCWLQPDAPGPGEHGLRACLEPGGLGPRTEWWVTFRSDGEMMIAPWPTQAGDPSSGKGSSSGGQP

SEQ ID NO: 12991 - protein, 352 aa, Homo sapiens
MFRGLSSWLGLQQPVAGGGQPNGDAPPEQPSETVAESAEEELQQAGDQELLHQAKDFGNYLFNFASAATKKITESVAETAQTIKKSVEEGKIDGIIDKTIIGDFQKEQKKFVEEQHTKKSEAAVPPWVDTNDEETIQQQILALSADKRNFLRDPPAGVQFNFDFDQMYPVALVMLQEDELLSKMRFALVPKLVKEEVFWRNYFYRVSLIKQSAQLTALAAQQQAAGKEEKSNGREQDLPLAEAVRPKTPPVVIKSQLKTQEDEEEISTSPGVSEFVSDAFDACNLNQEDLRKEMEQLVLDKKQEETAVLEEDSADWEKELQQELQEYEVVTESEKRDENWDKEIEKMLQEEN

SEQ ID NO: 12992 - protein, 134 aa, Homo sapiens
MSPLRPLLLALALASVPCAQGACPASADLKHSDGTRTCAKLYDKSDPYYENCCGGAELSLESGADLPYLPSNWANTASSLVVAPRCELTVWSRQGKAGKTHKFSAGTYPRLEEYRRGILGDWSNAISALYCRCS

SEQ ID NO: 12993 - protein, 111 aa, Homo sapiens
MKILVALAVFFLVSTQLFAEEIGANDDLNYWSDWYDSDQIKEELPEPFEHLLQRIARRPKPQQFFGLMGKRDADSSIEKQVALLKALYGHGQISHKMAYERSAMQNYERRR

SEQ ID NO: 12994 - protein, 129 aa, Homo sapiens
MKILVALAVFFLVSTQLFAEEIGANDDLNYWSDWYDSDQIKEELPEPFEHLLQRIARRPKPQQFFGLMGKRDADSSIEKQVALLKALYGHGQISHKRHKTDSFVGLMGKRALNSVAYERSAMQNYERRR

SEQ ID NO: 12995 - protein, 114 aa, Homo sapiens
MKILVALAVFFLVSTQLFAEEIGANDDLNYWSDWYDSDQIKEELPEPFEHLLQRIARRPKPQQFFGLMGKRDAGHGQISHKRHKTDSFVGLMGKRALNSVAYERSAMQNYERRR

SEQ ID NO: 12996 - protein, 103 aa, Homo sapiens
MRIMLLFTAILAFSLAQSFGAVCKEPQEEVVPGGGRSKRDPDLYQLLQRLFKSHSSLEGLLKALSQASTDPKESTSPEKHSPTDVNQENVPSFGILKYPPRAE

SEQ ID NO: 12997 - protein, 103 aa, Homo sapiens; identical to SEQ ID NO: 12996

SEQ ID NO: 12998 - protein, 103 aa, Homo sapiens; identical to SEQ ID NO: 12996

SEQ ID NO: 12999 - protein, 121 aa, Homo sapiens
MRIMLLFTAILAFSLAQSFGAVCKEPQEEVVPGGGRSKRDPDLYQLLQRLFKSHSSLEGLLKALSQASTDPKESTSPEKRDMHDFFVGLMGKRSVQPDSPTDVNQENVPSFGILKYPPRAE

SEQ ID NO: 13000 - protein, 121 aa, Homo sapiens; identical to SEQ ID NO: 12999

SEQ ID NO: 13001 - protein, 121 aa, Homo sapiens; identical to SEQ ID NO: 12999

SEQ ID NO: 13002 - protein, 121 aa, Homo sapiens; identical to SEQ ID NO: 12999

SEQ ID NO: 13003 - protein, 135 aa, Homo sapiens
MRIMLLFTAILAFSLAQSFGAVCKEPQEEVVPGGGRSKRDPDLYQLLQRLFKSHSSLEGLLKALSQASTDPKESTSPEKRDMHDFFVGLMGKRSVQPEGKTGPFLPSVRVPRPLHPNQLGSTGKSSLGTEEQRPL

SEQ ID NO: 13004 - protein, 135 aa, Homo sapiens; identical to SEQ ID NO: 13003

SEQ ID NO: 13005 - protein, 135 aa, Homo sapiens; identical to SEQ ID NO: 13003

SEQ ID NO: 13006 - protein, 96 aa, Homo sapiens
MLPCLALLLLMELSVCTVAGDGGEEQTLSTEAETWEGAGPSIQLQLQEVKTGKASQFFGLMGKRVGAYQLEHTFQGLLGKRSLFTEGREDEAQGSE

SEQ ID NO: 13007 - protein, 76 aa, Homo sapiens
MLPCLALLLLMELSVCTVAGDGGEEQTLSTEAETWEGAGPSIQLQLQEVKTGKASQFFGLMGKRVGGREDEAQGSE

SEQ ID NO: 13008 - protein, 107 aa, Homo sapiens
MLPCLALLLLMELSVCTVAGDGGEEQTLSTEAETWEGAGPSIQLQLQEVKTGKASQFFGLMGKRVGGRPLIQPRRKKAYQLEHTFQGLLGKRSLFTEGREDEAQGSE

SEQ ID NO: 13009 - protein, 87 aa, Homo sapiens
MLPCLALLLLMELSVCTVAGDGGEEQTLSTEAETWEGAGPSIQLQLQEVKTGKASQFFGLMGKRVGGRPLIQPRRKKGREDEAQGSE

SEQ ID NO: 13010 - protein, 113 aa, Homo sapiens
MLPCLALLLLMELSVCTVAGDGGEEQTLSTEAETWVIVALEEGAGPSIQLQLQEVKTGKASQFFGLMGKRVGGRPLIQPRRKKAYQLEHTFQGLLGKRSLFTEGREDEAQGSE

SEQ ID NO: 13011 - protein, 53 aa, Homo sapiens
MLPCLALLLLMELSVCTVAGDGGEEQTLSTEAETWVIVALEVLLGRGSDEGRG

SEQ ID NO: 13012 - protein, 187 aa, Homo sapiens
MANRGPAYGLSREVQQKIEKQYDADLEQILIQWITTQCRKDVGRPQPGRENFQNWLKDGTVLCELINALYPEGQAPVKKIQASTMAFKQMEQISQFLQAAERYGINTTDIFQTVDLWEGKNMACVQRTLMNLGGLAVARDDGLFSGDPNWFPKKSKENPRNFSDNQLQEGKNVIGLQMGTNRGASQA

SEQ ID NO: 13013 - protein, 199 aa, Homo sapiens
MANRGPAYGLSREVQQKIEKQYDADLEQILIQWITTQCRKDVGRPQPGRENFQNWLKDGTVLCELINALYPEGQAPVKKIQASTMAFKQMEQISQFLQAAERYGINTTDIFQTVDLWEGKNMACVQRTLMNLGGLAVARDDGLFSGDPNWFPKKSKENPRNFSDNQLQEGKNVIGLQMGTNRGASQAGMTGYGMPRQIL

SEQ ID NO: 13014 - protein, 199 aa, Homo sapiens; identical to SEQ ID NO: 13013

SEQ ID NO: 13015 - protein, 220 aa, Homo sapiens
MSAFSLALALVSSPQPPPPIGMANRGPAYGLSREVQQKIEKQYDADLEQILIQWITTQCRKDVGRPQPGRENFQNWLKDGTVLCELINALYPEGQAPVKKIQASTMAFKQMEQISQFLQAAERYGINTTDIFQTVDLWEGKNMACVQRTLMNLGGLAVARDDGLFSGDPNWFPKKSKENPRNFSDNQLQEGKNVIGLQMGTNRGASQAGMTGYGMPRQIL

SEQ ID NO: 13016 - protein, 192 aa, Homo sapiens
MKSLSLLLAVALDPAGALQAAFRRYPRGAPAPHCEMSRFVPLPASAKWASGLTPAQNCPRALDGAWLMVSISSPVLSLSSLLRPQPEPQQEPVLITMATVVLTVLTHTPAPRVRLGQDALLDLSFAYMPPTSEAASSLAPGPPPFGLEWRRQHLGKGHLLLAATPGLNGQMPAAQEGAVAFAAWDDDEPWGP

SEQ ID NO: 13017 - protein, 156 aa, Homo sapiens
MKSLSLLLAVALGLATAVSAGPAVIECWFVEDASGKGLAKRPGALLLRQGPGEPPPRPDLDPELYLSVHDPAGALQAAFRRYPRGAPAPHCEMSRFVPLPASAKWASGLTPAQNCPRALDGAWLMVSISSMGHAMPVEFTIPACLPRGAALRSPWR

SEQ ID NO: 13018 - protein, 466 aa, Homo sapiens
MKSLSLLLAVALGLATAVSAGPAVIECWFVEDASGKGLAKRPGALLLRQGPGEPPPRPDLDPELYLSVHDPAGALQAAFRRYPRGAPAPHCEMSRFVPLPASAKWASGLTPAQNCPRALDGAWLMVSISSPVLSLSSLLRPQPEPQQEPVLITMATVEMGFHHVGQAALELLTSVVLTVLTHTPAPRVRLGQDALLDLSFAYMPPTSEAASSLAPGPPPFGLEWRRQHLGKGHLLLAATPGLNGQMPAAQEGAVAFAAWDDDEPWGPWTGNGTFWLPTVQPFQEGTYLATIHLPYLQGQVTLELAVYKPPKVSLMPATLARAAPGEAPPELLCLVSHFYPSGGLEVEWELRGGPGGRSQKAEGQRWLSALRHHSDGSVSLSGHLQPPPVTTEQHGARYACRIHHPSLPASGRSAEVTLEVAGLSGPSLEDSVGLFLSAFLLLGLFKALGWAAVYLSTCKDSKKKAE

SEQ ID NO: 13019 - protein, 504 aa, Homo sapiens
MKSLSLLLAVALGLATAVSAGPAVIECWFVEDASGKGLAKRPGALLLRQGPGEPPPRPDLDPELYLSVHDPAGALQAAFRRYPRGAPAPHCEMSRFVPLPASAKWASGLTPAQNCPRALDGAWLMVSISSPVLSLSSLLRPQPEPQQEPVLITMATVVLTVLTHTPAPRVRLGQDALLDLSFAYMPPTSEAASSLAPGPPPFGLEWRRQHLGKGHLLLAATPGLNGQMPAAQEGAVAFAAWDDDEPWGPWTGNGTFWLPTVQPFQEGTYLATIHLPYLQGQVTLELAVYKPPKVSLMPATLARAAPGEAPPELLCLVSHFYPSGGLEVEWELRGGPGGRSQKAEGQRWLSALRHHSDGSVSLSGHLQPPPVTTEQHGARYACRIHHPSLPASGRSAEVTLEVAGLSGPSLEDSVGLFLSAFLLLGLFKALGWAAVYLSTCKDSKKVQCSTSLYLSLVTLSPHPISKPMEGGCWCGRQNLGLEFTLIWVKTWHYILTVGLFEHAT

SEQ ID NO: 13020 - protein, 448 aa, Homo sapiens
MKSLSLLLAVALGLATAVSAGPAVIECWFVEDASGKGLAKRPGALLLRQGPGEPPPRPDLDPELYLSVHDPAGALQAAFRRYPRGAPAPHCEMSRFVPLPASAKWASGLTPAQNCPRALDGAWLMVSISSPVLSLSSLLRPQPEPQQEPVLITMATVVLTVLTHTPAPRVRLGQDALLDLSFAYMPPTSEAASSLAPGPPPFGLEWRRQHLGKGHLLLAATPGLNGQMPAAQEGAVAFAAWDDDEPWGPWTGNGTFWLPTVQPFQEGTYLATIHLPYLQGQVTLELAVYKPPKVSLMPATLARAAPGEAPPELLCLVSHFYPSGGLEVEWELRGGPGGRSQKAEGQRWLSALRHHSDGSVSLSGHLQPPPVTTEQHGARYACRIHHPSLPASGRSAEVTLEVAGLSGPSLEDSVGLFLSAFLLLGLFKALGWAAVYLSTCKDSKKKAE

SEQ ID NO: 13021 - protein, 361 aa, Homo sapiens
MKSLSLLLAVALGLATAVSAGPAVIECWFVEDASGKGLAKRPGALLLRQGPGEPPPRPDLDPELYLSVHVVLTVLTHTPAPRVRLGQDALLDLSFAYMPPTSEAASSLAPGPPPFGLEWRRQHLGKGHLLLAATPGLNGQMPAAQEGAVAFAAWDDDEPWGPWTGNGTFWLPTVQPFQEGTYLATIHLPYLQGQVTLELAVYKPPKVSLMPATLARAAPGEAPPELLCLVSHFYPSGGLEVEWELRGGPGGRSQKAEGQRWLSALRHHSDGSVSLSGHLQPPPVTTEQHGARYACRIHHPSLPASGRSAEVTLEVAGLSGPSLEDSVGLFLSAFLLLGLFKALGWAAVYLSTCKDSKKKAE

SEQ ID NO: 13022 - protein, 468 aa, Homo sapiens
MGTQEGWCLLLCLALSGAAETKPHPAEGQWRAVDVVLDCFLAKDGAHRGALASSEDRARASLVLKQVPVLDDGSLEDFTDFQGGTLAQDDPPIIFEASVDLVQIPQAEALLHADCSGKEVTCEISRYFLQMTETTVKTAAWFMANMQVSGGGPSISLVMKTPRVTKNEALWHPTLNLPLSPQGTVRTAVEFQVMTQTQSLSFLLGSSASLDCGFSMAPGLDLISVEWRLQHKGRGQLVYSWTAGQGQAVRKGATLEPAQLGMARDASLTLPGLTIQDEGTYICQITTSLYRAQQIIQLNIQASPKVRLSLANEALLPTLICDIAGYYPLDVVVTWTREELGGSPAQVSGASFSSLRQSVAGTYSISSSLTAEPGSAGATYTCQVTHISLEEPLGASTQVVPPERRTALGVIFASSLFLLALMFLGLQRRQAPTGLGLLQAERWETTSCADTQSSHLHEDRTARVSQPS

SEQ ID NO: 13023 - protein, 185 aa, Homo sapiens
MGTQEGWCLLLCLALSGAAETMDLVQIPQAEALLHADCSGKEVTCEISRYFLQMTETTVKTAAWFMANMQVSGGGPSISLVMKTPRVTKNEALWHPTLNLPLSPQGTVRTAVEFQVMTQTQSLSFLLGSSASLDCGFSMAPGLDLISVEWRLQHKGRGRGDLHLPDHHLSVPSSADHPAQHPSFP

SEQ ID NO: 13024 - protein, 96 aa, Homo sapiens
MDFSSNGKYLATCADDRTIRIWSTKDFLQREHRSMRANVELDHATLVRFSPDCRAFIVWLANGDTLRVFKMTKREDGGYTFTATPEDFPKKHKAPV

SEQ ID NO: 13025 - protein, 43 aa, Homo sapiens
MELSQMSELMGLSVLLGLLALMATAAVARGWLRAGEERSGRPA

SEQ ID NO: 13026 - protein, 43 aa, Homo sapiens; identical to SEQ ID NO: 13025

SEQ ID NO: 13027 - protein, 46 aa, Homo sapiens
MELSQMSELMGLSVLLGLLALMATAAVARGWLRAGEERSGRPACGQ

SEQ ID NO: 13028 - protein, 107 aa, Homo sapiens
MELSQMSELMGLSVLLGLLALMATAAVARGWLRAGEERSGRPACQKANGFPPDKSSGSKKQKQYQRIRKEKPQQHNFTHRLLAAALKMIAPSASGAPRTSCSESTAA

SEQ ID NO: 13029 - protein, 176 aa, Homo sapiens
MELSQMSELMGLSVLLGLLALMATAAVARGWLRAGEERSGRPACQKANGFPPDKSSGSKKQKQYQRIRKEKPQQHNFTHRLLAAALKSHSGNISCMDFSSNGKYLATCADDRTIRIWSTKDFLQREHRSMRANVELDHATLSLHRLAGQRGHPPCLQDDQAGGWGLHLHSHPRGLP

SEQ ID NO: 13030 - protein, 447 aa, Homo sapiens
MELSQMSELMGLSVLLGLLALMATAAVARGWLRAGEERSGRPACQKANGFPPDKSSGSKKQKQYQRIRKEKPQQHNFTHRLLAAALKSHSGNISCMDFSSNGKYLATCADDRTIRIWSTKDFLQREHRSMRANVELDHATLVRFSPDCRAFIVWLANGDTLRVFKMTKREDGGYTFTATPEDFPKKHKAPVIDIGIANTGKFIMTASSDTTVLIWSLKGQVLSTINTNQMNNTHAAVSPCGRFVASCGFTPDVKVWEVCFGKKGEFQEVVRAFELKGHSAAVHSFAFSNDSRRMASVSKDGTWKLWDTDVEYKKKQDPYLLKTGRFEEAAGAAPCRLALSPNAQVLALASGSSIHLYNTRRGEKEECFERVHGECIANLSFDITGRFLASCGDRAVRLFHNTPGHRAMVEEMQGHLKRASNESTRQRLQQQLTQAQETLKSLGALKK

SEQ ID NO: 13031 - protein, 446 aa, Homo sapiens [sequence omitted]

SEQ ID NO: 13032 - protein, 75 aa, Homo sapiens
MELSQMSELMGLSVLLGLLALMATAAVARGWLRAGEERSGRPAWPRSFFPVGIGEHLQSFTTCQLCDSIKYLLQK

SEQ ID NO: 13033 - protein, 54 aa, Homo sapiens
MELSQMSELMGLSVLLGLLALMATAAVARGWLRAGEERSGRPAWSCSVTQDGMQ

SEQ ID NO: 13034 - protein, 64 aa, Homo sapiens
MGLSFSSGNVSFASRDGDPPCRAKKQMDFHLTNLRDPRSRNNISGFGRRSLNNTTSPTASWLQL

SEQ ID NO: 13035 - protein, 39 aa, Homo sapiens
MGLSFSSGPRSFFPVGIGEHLQSFTTCQLCDSIKYLLQK

SEQ ID NO: 13036 - protein, 411 aa, Homo sapiens
MGLSFSSGQKANGFPPDKSSGSKKQKQYQRIRKEKPQQHNFTHRLLAAALKSHSGNISCMDFSSNGKYLATCADDRTIRIWSTKDFLQREHRSMRANVELDHATLVRFSPDCRAFIVWLANGDTLRVFKMTKREDGGYTFTATPEDFPKKHKAPVIDIGIANTGKFIMTASSDTTVLIWSLKGQVLSTINTNQMNNTHAAVSPCGRFVASCGFTPDVKVWEVCFGKKGEFQEVVRAFELKGHSAAVHSFAFSNDSRRMASVSKDGTWKLWDTDVEYKKKQDPYLLKTGRFEEAAGAAPCRLALSPNAQVLALASGSSIHLYNTRRGEKEECFERVHGECIANLSFDITGRFLASCGDRAVRLFHNTPGHRAMVEEMQGHLKRASNESTRQRLQQQLTQAQETLKSLGALKK

SEQ ID NO: 13037 - protein, 385 aa, Homo sapiens
MAAFLSAGLGILAPSETYPLPTTSSGWEPRLGSPFPSGPCTSSTGAQAVAEPTGQGPKNPRVSRVTVQLEMKPLWEEFNQLGTEMIVTKAGRRMFPPFQVKILGMDSLADYALLMDFIPLDDKRYRYAFHSSAWLVAGKADPATPGRVHFHPDSPAKGAQWMRQIVSFDKLKLTNNLLDDNGHIILNSMHRYQPRFHVVFVDPRKDSERYAQENFKSFIFTETQFTAVTAYQNHRITQLKIASNPFAKGFRESDLDSWPVAPRPLLSVPARSHSSLSPCVLKGATDREKDPNKASASTSKTPAWLHHQLLPPPEVLLAPATYRPVTYQSLYSGAPSHLGIPRTRPAPYPLPNIRADRDQGGLPLPAGLGLLSPTVVCLGPGQDSQ

SEQ ID NO: 13038 - protein, 446 aa, Homo sapiens
MGKRYMHHPQIQMISTVNLLVIHLLSHQPVCSLALSLCKSYPPHSVSPTDINTSLPPMSSFHRGSTSSSPYVAASHTPPINGSDSILGTRGNAAGSSQTGDALGKALASIYSPDHTSSSFPSNPSTPVGSPSPLTGTSQWPRPGGQAPSSPSYENSLHSLQSRMEDRLDRLDDAIHVLRNHAVGPSTSLPAGHSDIHSLLGPSHNAPIGSLNSNYGGSSLVASSRSASMVGTHREDSVSLNGNHSVLSSTVTTSSTDLNHKTQENYRGGLQSQSGTVVTTEIKTENKEKDENLHEPPSSDDMKSDDESSQKDIKVSSRGRTSSTNEDEDLNPEQKIEREKERRMANNARERLRVRDINEAFKELGRMCQLHLKSEKPQTKLLILHQAVAVILSLEQQVRERNLNPKAACLKRREEEKVSAVSAEPPTTLPGTHPGLSETTNPMGHM

SEQ ID NO: 13039 - protein, 58 aa, Homo sapiens
MNPQQQRMAAIGTDKELSDLLDFSAMFSPPVNSGKTRPTTLGSSQFSGSGFYRQPSLQ

SEQ ID NO: 13040 - protein, 157 aa, Homo sapiens
MNPQQQRMAAIGTDKELSDLLDFSAMFSPPVNSGKTRPTTLGSSQFSGSGIDERGGTTSWGTSGQPSPSYDSSRGFTDSPHYSDHLNDSRLGAHEGLSPTPFMNSNLMGKTSERGSFSLYSRDTGLPGCQSSLLRQDLGLGSPAQLSSSGKPGTAYY

SEQ ID NO: 13041 - protein, 682 aa, Homo sapiens
MNPQQQRMAAIGTDKELSDLLDFSAMFSPPVNSGKTRPTTLGSSQFSGSGIDERGGTTSWGTSGQPSPSYDSSRGFTDSPHYSDHLNDSRLGAHEGLSPTPFMNSNLMGKTSERGSFSLYSRDTGLPGCQSSLLRQDLGLGSPAQLSSSGKPGTAYYSFSATSSRRRPLHDSAALDPLQAKKVRKVPPGLPSSVYAPSPNSDDFNRESPSYPSPKPPTSMFASTFFMQDGTHNSSDLWSSSNGMSQPGFGGILGTSTSHMSQSSSYGNLHSHDRLSYPPHSVSPTDINTSLPPMSSFHRGSTSSSPYVAASHTPPINGSDSILGTRGNAAGSSQTGDALGKALASIYSPDHTSSSFPSNPSTPVGSPSPLTGTSQWPRPGGQAPSSPSYENSLHSLQSRMEDRLDRLDDAIHVLRNHAVGPSTSLPAGHSDIHSLLGPSHNAPIGSLNSNYGGSSLVASSRSASMVGTHREDSVSLNGNHSVLSSTVTTSSTDLNHKTQENYRGGLQSQSGTVVTTEIKTENKEKDENLHEPPSSDDMKSDDESSQKDIKVSSRGRTSSTNEDEDLNPEQKIEREKERRMANNARERLRVRDINEAFKELGRMCQLHLKSEKPQTKLLILHQAVAVILSLEQQVRERNLNPKAACLKRREEEKVSAVSAEPPTTLPGTHPGLSETTNPMGHM

SEQ ID NO: 13042 - protein, 706 aa, Homo sapiens
MNPQQQRMAAIGTDKELSDLLDFSAMFSPPVNSGKTRPTTLGSSQFSGSGIDERGGTTSWGTSGQPSPSYDSSRGFTDSPHYSDHLNDSRLGAHEGLSPTPFMNSNLMGKTSERGSFSLYSRDTGLPGCQSSLLRQDLGLGSPAQLSSSGKPGTAYYSFSATSSRRRPLHDSAALDPLQAKKVRKVPPGLPSSVYAPSPNSDDFNRESPSYPSPKPPTSMFASTFFMQDGTHNSSDLWSSSNGMSQPGFGGILGTSTSHMSQSSSYGNLHSHDRLSYPPHSVSPTDINTSLPPMSSFHRGSTSSSPYVAASHTPPINGSDSILGTRGNAAGSSQTGDALGKALASIYSPDHTSSSFPSNPSTPVGSPSPLTGTSQWPRPGGQAPSSPSYENSLHSLKNRVEQQLHEHLQDAMSFLKDVCEQSRMEDRLDRLDDAIHVLRNHAVGPSTSLPAGHSDIHSLLGPSHNAPIGSLNSNYGGSSLVASSRSASMVGTHREDSVSLNGNHSVLSSTVTTSSTDLNHKTQENYRGGLQSQSGTVVTTEIKTENKEKDENLHEPPSSDDMKSDDESSQKDIKVSSRGRTSSTNEDEDLNPEQKIEREKERRMANNARERLRVRDINEAFKELGRMCQLHLKSEKPQTKLLILHQAVAVILSLEQQVRERNLNPKAACLKRREEEKVSAVSAEPPTTLPGTHPGLSETTNPMGHM

SEQ ID NO: 13043 - protein, 706 aa, Homo sapiens; identical to SEQ ID NO: 13042

SEQ ID NO: 13044 - protein, 682 aa, Homo sapiens; identical to SEQ ID NO: 13041

SEQ ID NO: 13045 - protein, 666 aa, Homo sapiens
MNPQQQRMAAIGTDKELSDLLDFSAMFSPPVNSGKTRPTTLGSSQFSGSGTIHEMKQLNSKARQKGQRIKGFTDSPHYSDHLNDSRLGAHEGLSPTPFMNSNLMGKTSERGSFSLYSRDTGLPGCQSSLLRQDLGLGSPAQLSSSGKPGTAYYSFSATSSRRRPLHDSAALDPLQAKKVRKVPPGLPSSVYAPSPNSDDFNRESPSYPSPKPPTSMFASTFFMQDGTHNSSDLWSSSNGMSQPGFGGILGTSTSHMSQSSSYGNLHSHDRLSYPPHSVSPTDINTSLPPMSSFHRGSTSSSPYVAASHTPPINGSDSILGTRGNAAGSSQTGDALGKALASIYSPDHTSSSFPSNPSTPVGSPSPLTGTSQWPRPGGQAPSSPSYENSLHSLKNRVEQQLHEHLQDAMSFLKDVCEQSRMEDRLDRLDDAIHVLRNHAVGPSTSLPAGHSDIHSLLGPSHNAPIGSLNSNYGGSSLVASSRSASMVGTHREDSVSLNGNHSVLSSTVTTSSTDLNHKTQENYRGGLQSQSGTVVTTEIKTENKEKDENLHEPPSSDDMKSDDESSQKDIKVSSRGRTSSTNEDEDLNPEQKIEREKERRMANNARERLRVRDINEAFKELGRMCQLHLKSEKPQTKLLILHQAVAVILSLEQQVRERNLNPKAACL

SEQ ID NO: 13046 - protein, 339 aa, Homo sapiens
MSSNSSTSQWPRPGGQAPSSPSYENSLHSLKNRVEQQLHEHLQDAMSFLKDVCEQSRMEDRLDRLDDAIHVLRNHAVGPSTSLPAGHSDIHSLLGPSHNAPIGSLNSNYGGSSLVASSRSASMVGTHREDSVSLNGNHSVLSSTVTTSSTDLNHKTQENYRGGLQSQSGTVVTTEIKTENKEKDENLHEPPSSDDMKSDDESSQKDIKVSSRGRTSTNEDEDLNPEQKIEREKERRMANNARERLRVRDINEAFKELGRMCQLHLKSEKPQTKLLILHQAVAVILSLEQQVRERNLNPKAACLKRREEEKVSAVSAEPPTTLPGTHPGLSETTNPMGHM

SEQ ID NO: 13047 - protein, 316 aa, Homo sapiens
MSSNSSTSQWPRPGGQAPSSPSYENSLHSLQSRMEDRLDRLDDAIHVLRNHAVGPSTSLPAGHSDIHSLLGPSHNAPIGSLNSNYGGSSLVASSRSASMVGTHREDSVSLNGNHSVLSSTVTTSSTDLNHKTQENYRGGLQSQSGTVVTTEIKTENKEKDENLHEPPSSDDMKSDDESSQKDIKVSSRGRTSSTNEDEDLNPEQKIEREKERRMANNARERLRVRDINEAFKELGRMCQLHLKSEKPQTKLLILHQAVAVILSLEQQVRERNLNPKAACLKRREEEKVSAVSAEPPTTLPGTHPGLSETTNPMGHM

SEQ ID NO: 13048 - protein, 536 aa, Homo sapiens
MYCAYPVPGMGSNSLMYYYNGKTVYAPSPNSDDFNRESPSYPSPKPPTSMFASTFFMQDGTHNSSDLWSSSNGMSQPGFGGILGTSTSHMSQSSSYGNLHSHDRLSYPPHSVSPTDINTSLPPMSSFHRGSTSSSPYVAASHTPPINGSDSILGTRGNAAGSSQTGDALGKALASIYSPDHTSSSFPSNPSTPVGSPSPLTGTSQWPRPGGQAPSSPSYENSLHSLKNRVEQQLHEHLQDAMSFLKDVCEQSRMEDRLDRLDDAIHVLRNHAVGPSTSLPAGHSDIHSLLGPSHNAPIGSLNSNYGGSSLVASSRSASMVGTHREDSVSLNGNHSVLSSTVTTSSTDLNHKTQENYRGGLQSQSGTVVTTEIKTENKEKDENLHEPPSSDDMKSDDESSQKDIKVSSRGRTSSTNEDEDLNPEQKIEREKERRMANNARERLRVRDINEAFKELGRMCQLHLKSEKPQTKLLILHQAVAVILSLEQQVRERNLNPKAACLKRREEEKVSAVSAEPPTTLPGTHPGLSETTNPMGHM

SEQ ID NO: 13049 - protein, 512 aa, Homo sapiens
MYCAYPVPGMGSNSLMYYYNGKTVYAPSPNSDDFNRESPSYPSPKPPTSMFASTFFMQDGTHNSSDLWSSSNGMSQPGFGGILGTSTSHMSQSSSYGNLHSHDRLSYPPHSVSPTDINTSLPPMSSFHRGSTSSSPYVAASHTPPINGSDSILGTRGNAAGSSQTGDALGKALASIYSPDHTSSSFPSNPSTPVGSPSPLTGTSQWPRPGGQAPSSPSYENSLHSLQSRMEDRLDRLDDAIHVLRNHAVGPSTSLPAGHSDIHSLLGPSHNAPIGSLNSNYGGSSLVASSRSASMVGTHREDSVSLNGNHSVLSSTVTTSSTDLNHKTQENYRGGLQSQSGTVVTTEIKTENKEKDENLHEPPSSDDMKSDDESSQKDIKVSSRGRTSSTNEDEDLNPEQKIEREKERRMANNARERLRVRDINEAFKELGRMCQLHLKSEKPQTKLLILHQAVAVILSLEQQVRERNLNPKAACLKRREEEKVSAVSAEPPTTLPGTHPGLSETTNPMGHM

SEQ ID NO: 13050 - protein, 48 aa, Homo sapiens
  SITE 1: note = misc_feature - Xaa can be any naturally occurring amino acid
XERNLNPKAACLKRREEEKVSAVSAEPPTTLPGTHPGLSETTNPMGHM

SEQ ID NO: 13051 - protein, 44 aa, Homo sapiens
  SITE 1: note = misc_feature - Xaa can be any naturally occurring amino acid
XNPKAACLKRREEEKVSAVSAEPPTTLPGTHPGLSETTNPMGHM

SEQ ID NO: 13052 - protein, 433 aa, Homo sapiens
MRQSHQLPLVGLLLFSFIPSQLCEICEVSEENYIRLKPLLNTMIQSNYNRGTSAVNVVLSLKLVGIQIQTLMQKMIQQIKYNVKSRLSDVSSGELALIILALGVCRNAEENLIYDYHLIDKLENKFQAEIENMEAHNGTPLTNYYQLSLDVLALCLFNGNYSTAEVVNHFTPENKNYYFGSQFSVDTGAMAVLALTCVKKSLINGQIKADEGSLKNISIYTKSLVEKILSEKKENGLIGNTFSTGEAMQALFVSSDYYNENDWNCQQTLNTVLTEISQGAFSNPNAAAQVLPALMGKTFLDINKDSSCVSASGNFNISADEPITVTPPDSQSYISVNYSVRINETYFTNVTVLNGSVFLSVMEKAQKMNDTIFGFTMEERSWGPYITCIQGLCANNNDRTYWELLSGGEPLSQGAGSYVVRNGENLEVRWSKY

SEQ ID NO: 13053 - protein, 402 aa, Homo sapiens
MDSHLVEKLGQHLLPWMDRLSLEHLNPSIYVGLRLSSLQAGTKEDLYLHSLKLGYQQCLLGSAFSEDDGDCQGKPSMGQLALYLLALRANCEFVRGHKGDRLVSQLKWFLEDEKRAIGHDHKGHPHTSYYQYGLGILALCLHQKRVHDSVVDKLLYAVEPFHQGHHSVDTAAMAGLAFTCLKRSNFNPGRRQRITMAIRTVREEILKAQTPEGHFGNVYSTPLALQFLMTSPMRGAELGTACLKARVALLASLQDGAFQNALMISQLLPVLNHKTYIDLIFPDCLAPRVMLEPAAETIPQTQEIISVTLQVLSLLPPYRQSISVLAGSTVEDVLKKAHELGGFTYETQASLSGPYLTSVMGKAAGEREFWQLLRDPNTPLLQGIADYRPKDGETIELRLVSW

SEQ ID NO: 13054 - protein, 423 aa, Homo sapiens
MRHLGAFLFLLGVLGALTEMCEIPEMDSHLVEKLGQHLLPWMDRLSLEHLNPSIYVGLRLSSLQAGTKEDLYLHSLKLGYQQCLLGEDDGDCQGKPSMGQLALYLLALRANCEFVRGHKGDRLVSQLKWFLEDEKRAIGHDHKGHPHTSYYQYGLGILALCLHQKRVHDSVVDKLLYAVEPFHQGHHSVDTAAMAGLAFTCLKRSNFNPGRRQRITMAIRTVREEILKAQTPEGHFGNVYSTPLALQFLMTSPMRGAELGTACLKARVALLASLQDGAFQNALMISQLLPVLNHKTYIDLIFPDCLAPRVMLEPAAETIPQTQEIISVTLQVLSLLPPYRQSISVLAGSTVEDVLKKAHELGGFTYETQASLSGPYLTSVMGKAAGEREFWQLLRDPNTPLLQGIADYRPKDGETIELRLVSW

SEQ ID NO: 13055 - protein, 427 aa, Homo sapiens
MRHLGAFLFLLGVLGALTEMCEIPEMDSHLVEKLGQHLLPWMDRLSLEHLNPSIYVGLRLSSLQAGTKEDLYLHSLKLGYQQCLLGSAFSEDDGDCQGKPSMGQLALYLLALRANCEFVRGHKGDRLVSQLKWFLEDEKRAIGHDHKGHPHTSYYQYGLGILALCLHQKRVHDSVVDKLLYAVEPFHQGHHSVDTAAMAGLAFTCLKRSNFNPGRRQRITMAIRTVREEILKAQTPEGHFGNVYSTPLALQFLMTSPMRGAELGTACLKARVALLASLQDGAFQNALMISQLLPVLNHKTYIDLIFPDCLAPRVMLEPAAETIPQTQEIISVTLQVLSLLPPYRQSISVLAGSTVEDVLKKAHELGGFTYETQASLSGPYLTSVMGKAAGEREFWQLLRDPNTPLLQGIADYRPKDGETIELRLVSW

SEQ ID NO: 13056 - protein, 400 aa, Homo sapiens
MRHLGAFLFLLGVLGALTEMCEIPEMDSHLVEKLGQHLLPWMDRLSLEHLNPSIYVGLRLSSLQAGTKEDLYLHSLKLGYQQCLLGSAFSEDDGDCQGKPSMGQLALYLLALRANWHDHKGHPHTSYYQYGLGILALCLHQKRVHDSVVDKLLYAVEPFHQGHHSVDTAAMAGLAFTCLKRSNFNPGRRQRITMAIRTVREEILKAQTPEGHFGNVYSTPLALQFLMTSPMRGAELGTACLKARVALLASLQDGAFQNALMISQLLPVLNHKTYIDLIFPDCLAPRVMLEPAAETIPQTQEIISVTLQVLSLLPPYRQSISVLAGSTVEDVLKKAHELGGFTYETQASLSGPYLTSVMGKAAGEREFWQLLRDPNTPLLQGIADYRPKDGETIELRLVSW

SEQ ID NO: 13057 - protein, 94 aa, Homo sapiens
DTDVLQPTLVNAGHFSLCVNVVLETDWSSPVSARSTEGEEPAVGPGLPRLRGPFWKFPGPGHAGLGAHPLHHPVIQQEGFLPAPRGFGYRSEVD

SEQ ID NO: 13058 - protein, 483 aa, Homo sapiens [sequence omitted]

SEQ ID NO: 13059 - protein, 73 aa, Homo sapiens
MKGRFLFPLRLLLWMCLHLQRQASELHQPSMPGCPLTSSSRLFDNAQMHQFLNIHVKFENCTFGEIKFYIQLA

SEQ ID NO: 13060 - protein, 88 aa, Homo sapiens
MRPRGLPPLLVVLLGCWASVSAQTDATPAVTTEGLNSTEAALATFGTFPSTRPPGTPRAPGPSSGPRPTPVTDGATASFVVKKQSSIH

SEQ ID NO: 13061 - protein, 88 aa, Homo sapiens; identical to SEQ ID NO: 13060

SEQ ID NO: 13062 - protein, 75 aa, Homo sapiens
MRPRGLPPLLVVLLGCWASVSAQTDATPAVTTEGLNSTEAALATFGTFPSTRPPGTPRAPGPSSGPRPTPVTDGG

SEQ ID NO: 13063 - protein, 100 aa, Homo sapiens
MRPRGLPPLLVVLLGCWASVSAQTDATPAVTTEGLNSTEAALATFGTFPSTRPPGTPRAPGPSSGPRPTPVTDGGYHVPAPGVHSDPTSRGQPRCCSLCL

SEQ ID NO: 13064 - protein, 100 aa, Homo sapiens; identical to SEQ ID NO: 13063

SEQ ID NO: 13065 - protein, 100 aa, Homo sapiens; identical to SEQ ID NO: 13063

SEQ ID NO: 13066 - protein, 106 aa, Homo sapiens
MRPRGLPPLLVVLLGCWASVSAQTDATPAVTTEGLNSTEAALATFGTFPSTRPPGTPRAPGPSSGPRPTPVTDGHATCRYRSRRLTVSGELDGKLQVASGSVGGEE

SEQ ID NO: 13067 - protein, 83 aa, Homo sapiens
MRPRGLPPLLVVLLGCWASVSAQTDATPAVTTEGLNSTEAALATFGTFPSTRPPGTPRAPGPSSGPRPTPVTDGSHSVTQAGV

SEQ ID NO: 13068 - protein, 162 aa, Homo sapiens
MRPRGLPPLLVVLLGCWASVSAQTDATPAVTTEGLNSTEAALATFGTFPSTRPPGTPRAPGPSSGPRPTPVTDVAVLCVCDLSPAQCDINCCCDPDCSSVDFSVFSACSVPVVTGDSQFCSQKAVIYSLNFTANPPQRVFELVDQINPSIFCIHITNCRCSV

SEQ ID NO: 13069 - protein, 179 aa, Homo sapiens
MRPRGLPPLLVVLLGCWASVSAQTDATPAVTTEGLNSTEAALATFGTFPSTRPPGTPRAPGPSSGPRPTPVTDVAVLCVCDLSPAQCDINCCCDPDCSSVDFSVFSACSVPVVTGDSQFCSQKAVIYSLNFTANPPQRVFELVDQINPSIFCIHITNSHFTPGLSRWLCESRSRILSFP

SEQ ID NO: 13070 - protein, 245 aa, Homo sapiens
MRPRGLPPLLVVLLGCWASVSAQTDATPAVTTEGLNSTEAALATFGTFPSTRPPGTPRAPGPSSGPRPTPVTDVAVLCVCDLSPAQCDINCCCDPDCSSVDFSVFSACSVPVVTGDSQFCSQKAVIYSLNFTANPPQRVFELVDQINPSIFCIHITNYKPALSFINPEVPDENNFDTLMKTSDGFTLNAESYVSFTTKLDIPTAAKYEVSLNLIDSFHPITNIFPCKLIFKVTRKTGFLETELIL

SEQ ID NO: 13071 - protein, 592 aa, Homo sapiens
MRPRGLPPLLVVLLGCWASVSAQTDATPAVTTEGLNSTEAALATFGTFPSTRPPGTPRAPGPSSGPRPTPVTDVAVLCVCDLSPAQCDINCCCDPDCSSVDFSVFSACSVPVVTGDSQFCSQKAVIYSLNFTANPPQRVFELVDQINPSIFCIHITNYKPALSFINPEVPDENNFDTLMKTSDGFTLNAESYVSFTTKLDIPTAAKYEYGVPLQTSDSFLRFPSSLTSSLCTDNNPAAFLVNQAVKCTRKINLEQCEEIEALSMAFYSSPEILRVPDSRKKVPITVQSIVIQSLNKTLTRREDTDVLQPTLVNAGHFSLCVNVVLEVKYSLTYTDAGEVTKADLSFVLGTVSSVVVPLQQKFEIHFLQENTQPVPLSGNPGYVVGLPLAAGFQPHKGSGIIQTTNRYGQLTILHSTTEQDCLALEGVRTPVLFGYTMQSGCKLRLTGALPCQLVAQKVKSLLWGQGFPDYVAPFGNSQAQDMLDWVPIHFITQSFNRKHFVLQDSCQLPGALVIEVKWTKYGSLLNPQAKIVNVTANLISSSFPEANSGNERTILISTAVTFVDVSAPAEAGFRAPPAINARLPFNFFFPFV

SEQ ID NO: 13072 - protein, 587 aa, Homo sapiens
MRPRGLPPLLVVLLGCWASVSAQTDATPAVTTEGLNSTEAALATFGTFPSTRPPGTPRAPGPSSGPRPTPVTDVAVLCVCDLSPAQCDINCCCDPDCSSVDFSVFSACSVPVVTGDSQFCSQKAVIYSLNFTANPPQRVFELVDQINPSIFCIHITNYKPALSFINPEVPDENNFDTLMKTSDGFTLNAESYVSFTTKLDIPTAAKYEYGVPLQTSDSFLRFPSSLTSSLCTDNNPAAFLVNQAVKCTRKINLEQCEEIEALSMAFYSSPEILRVPDSRKKVPITVQSIVIQSLNKTLTRREDTDVLQPTLVNAGHFSLCVNVVLEVKYSLTYTDAGEVTKADLSFVLGTVSSVVVPLQQKFEIHFLQENTQPVPLSGNPGYVVGLPLAAGFQPHKGSGIIQTTNRYGQLTILHSTTEQDCLALEGVRTPVLFGYTMQSGCKLRLTGALPCQLVAQKVKSLLWGQGFPDYVAPFGNSQAQDMLDWVPIHFITQSFNRKDSCQLPGALVIEVKWTKYGSLLNPQAKIVNVTANLISSSFPEANSGNERTILISTAVTFVDVSAPAEAGFRAPPAINARLPFNFFFPFV

SEQ ID NO: 13073 - protein, 573 aa, Homo sapiens
MRPRGLPPLLVVLLGCWASVSAQTDATPAVTTEGLNSTEAALATFGTFPSTRPPGTPRAPGPSSGPRPTPVTDVAVLCVCDLSPAQCDINCCCDPDCSSVDFSVFSACSVPVVTGDSQFCSQKAVIYSLNFTANPPQRVFELVDQINPSIFCIHITNYKPALSFINPEVPDENNFDTLMKTSDGFTLNAESYVSFTTKLDIPTAAKYEYGVPLQTSDSFLRFPSSLTSSLCTDNNPAGQAYWFTPVIPALWEAEARGSLEVPDSRKKVPITVQSIVIQSLNKTLTRREDTDVLQPTLVNAGHFSLCVNVVLEVKYSLTYTDAGEVTKADLSFVLGTVSSVVVPLQQKFEIHFLQENTQPVPLSGNPGYVVGLPLAAGFQPHKGSGIIQTTNRYGQLTILHSTTEQDCLALEGVRTPVLFGYTMQSGCKLRLTGALPCQLVAQKVKSLLWGQGFPDYVAPFGNSQAQDMLDWVPIHFITQSFNRKDSCQLPGALVIEVKWTKYGSLLNPQAKIVNVTANLISSSFPEANSGNERTILISTAVTFVDVSAPAEAGFRAPPAINARLPFNFFFPFV

SEQ ID NO: 13074 - protein, 263 aa, Homo sapiens
MRPRGLPPLLVVLLGCWASVSAQTDATPAVTTEGLNSTEAALATFGTFPSTRPPGTPRAPGPSSGPRPTPVTDVAVLCVCDLSPAQCDINCCCDPDCSSVDFSVFSACSVPVVTGDSQFCSQKAVIYSLNFTANPPQRVFELVDQINPSIFCIHITNYKPALSFINPEVPDENNFDTLMKTSDGFTLNAESYVSFTTKLDIPTAAKYEYGVPLQTSDSFLRFPSSLTSSLCTDNNPAGQAYWFTPVIPALWEAEARGSLERFW

SEQ ID NO: 13075 - protein, 573 aa, Homo sapiens [sequence omitted]

SEQ ID NO: 13076 - protein, 625 aa, Homo sapiens
MRLETAEAYVGPGGPECPMRTPQLALLQVFFLVFPDGVRPQPSSSPSGAVPTSLELQRGTDGGTLQSPSEATATRPAVPGLPTVVPTLVTPSAPGNRTVDLFPVLPICVCDLTPGACDINCCCDRDCYLLHPRTVFSFCLPGSVRSSSWVCVDNSVIFRSNSPFPSRVFMDSNGIRQFCVHVNNSNLNYFQKLQKVNATNFQALAAEFGGESFTSTFQTQSPPSFYRAGDPILTYFPKWSVISLLRQPAGVGAGGLCAESNPAGFLESKSTTCTRFFKNLASSCTLDSALNAASYYNFTVLKVPRSMTDPQNMEFQVPVILTSQANAPLLAGNTCQNVVSQVTYEIETNGTFGIQKVSVSLGQTNLTVEPGASLQQHFILRFRAFQQSTAASLTSPRSGNPGYIVGKPLLALTDDISYSMTLLQSQGNGSCSVKRHEVQFGVNAISGCKLRLKKADCSHLQQEIYQTLHGRPRPEYVAIFGNADPAQKGGWTRILNRHCSISAINCTSCCLIPVSLEIQVLWAYVGLLSNPQAHVSGVRFLYQCQSIQDSQQVTEVSLTTLVNFVDITQKPQPPRGQPKMDWKWPFDFFPFKVAFSRGVFSQKCSVSPILILCLLLLGVLNLETM

SEQ ID NO: 13077 - protein, 459 aa, Homo sapiens
MRTPQLALLQVFFLVFPDGVRPQPSSSPSGAVPTSLELQRGTDGGTLQSPSEATATRPAVPGLPTVVPTLVTPSAPGNRTVDLFPVLPICVCDLTPGACDINCCCDRDCYLLHPRTVFSFCLPGSVRSSSWVCVDNSVIFRSNSPFPSRVFMDSNGIRQFCVHVNNCFLESKSTTCTRFFKNLASSCTLDSALNAASYYNFTVLKVPRSMTDPQNMEAFQQSTAASLTSPRSGNPGYIVGKPLLALTDDISYSMTLLQSQGNGSCSVKRHEVQFGVNAISGCKLRLKKADCSHLQQEIYQTLHGRPRPEYVAIFGNADPAQKGGWTRILNRHCSISAINCTSCCLIPVSLEIQVLWAYVGLLSNPQAHVSGVRFLYQCQSIQDSQQVTEVSLTTLVNFVDITQKPQPPRGQPKMDWKWPFDFFPFKVAFSRGVFSQKCSVSPILILCLLLLGVLNLETM

SEQ ID NO: 13078 - protein, 443 aa, Homo sapiens
MRTPQLALLQVFFLVFPDGVRPQPSSSPSGAVPTSLELQRGTDGGTLQSPSEATATRPAVPGLPTVVPTLVTPSAPGNRTVDLFPVLPICVCDLTPGACDINCCCDRDCYLLHPRTVFSFCLPGSVRSSSWVCVDNSVIFRSNSPFPSRVFMDSNGIRQFCVHVNNSNLNYFQKLQKVNATNFQALAAEFGGESFTSTFQTQSPPSFYRAGDPILTYFPKWSVISLLRQPAGVGAGGLCAESNPAGFLESKSTTCTRFFKNLASSCTLDSALNAASYYNFTVLKVPRSMTDPQNMEFQVPVILTSQANAPLLAGNTCQNVVSQVTYEIETNGTFGIQKVSVSLGQTNLTVEPGASLQQHFILRFRAFQQSTAASLTSPRSGNPGYIVGKPLLALTDDISYSVSFLELGGLLQPNEKSCKGFQTYVRLAKGEEFFVHYNEVLIY

SEQ ID NO: 13079 - protein, 607 aa, Homo sapiens
MRTPQLALLQVFFLVFPDGVRPQPSSSPSGAVPTSLELQRGTDGGTLQSPSEATATRPAVPGLPTVVPTLVTPSAPGNRTVDLFPVLPICVCDLTPGACDINCCCDRDCYLLHPRTVFSFCLPGSVRSSSWVCVDNSVIFRSNSPFPSRVFMDSNGIRQFCVHVNNSNLNYFQKLQKVNATNFQALAAEFGGESFTSTFQTQSPPSFYRAGDPILTYFPKWSVISLLRQPAGVGAGGLCAESNPAGFLESKSTTCTRFFKNLASSCTLDSALNAASYYNFTVLKVPRSMTDPQNMEFQVPVILTSQANAPLLAGNTCQNVVSQVTYEIETNGTFGIQKVSVSLGQTNLTVEPGASLQQHFILRFRAFQQSTAASLTSPRSGNPGYIVGKPLLALTDDISYSMTLLQSQGNGSCSVKRHEVQFGVNAISGCKLRLKKADCSHLQQEIYQTLHGRPRPEYVAIFGNADPAQKGGWTRILNRHCSISAINCTSCCLIPVSLEIQVLWAYVGLLSNPQAHVSGVRFLYQCQSIQDSQQVTEVSLTTLVNFVDITQKPQPPRGQPKMDWKWPFDFFPFKVAFSRGVFSQKCSVSPILILCLLLLGVLNLETM

SEQ ID NO: 13080 - protein, 607 aa, Homo sapiens; identical to SEQ ID NO: 13079

SEQ ID NO: 13081 - protein, 304 aa, Homo sapiens
MATWKSPCFLYCLFILGPRLTGQNNSVDLTNEETTDSTTSKISPSEDTQQENGSMFSLITWNIDGLDLNNLSERARGVCSYLALYSPDVIFLQEVIPPYYSYLKKRSSNYEIITGHEEGYFTAIMLKKSRVKLKSQEIIPFPSTKMMRNLLCVHVNVSGNELCLMTSHLESTRGHAAERMNQLKMVLKKMQEAPESATVIFAGDTNLRDREVTRCGGLPNNIVDVWEFLGKPKHCQYTWDTQMNSNLGITAACKLRFDRIFFRAAAEEGHIIPRSLDLLGLEKLDCGRFPSDHWGLLCNLDIIL

SEQ ID NO: 13082 - protein, 362 aa, Homo sapiens
MELGSCLEGGREAAEEEGEPEVKKRRLLCVEFASVASCDAAVAQCFLAENDWEMERALNSYFEPPVEESALERRPETISEPKTYVDLTNEETTDSTTSKISPSEDTQQENGSMFSLITWNIDGLDLNNLSERARGVCSYLALYSPDVIFLQEVIPPYYSYLKKRSSNYEIITGHEEGYFTAIMLKKSRVKLKSQEIIPFPSTKMMRNLLCVHVNVSGNELCLMTSHLESTRGHAAERMNQLKMVLKKMQEAPESATVIFAGDTNLRDREVTRCGGLPNNIVDVWEFLGKPKHCQYTWDTQMNSNLGITAACKLRFDRIFFRAAAEEGHIIPRSLDLLGLEKLDCGRFPSDHWGLLCNLDIIL

SEQ ID NO: 13083 - protein, 426 aa, Homo sapiens
MGRRRQRVDPAAGARAGALPEAIAALSRSLPSGPSPEIFRRAKFDRPEATSALWQLLFRVLSPLPAGNALASLALEVQARLVKSALCSQGYPRLALAQLPEDGSQGSRELLLALSWLLARGPVPEQMLAQARVPLGDEMTVCQCEALASPGPPAPHMEAEGPVDVRHVQWLMGKLRFRWRQLVSSQQEQCALLSKIHLYTRGCHSDQSLSHLSVTEAEMLRDPEGGQQLLRTLERENQRLEAVLAWRRSELVFWRWMDTVLGTCAPEVPAAASQPTFLPWVPERGGGELDLVVRELQALEEELREAAERRRAAWEAKAGGCGRGPEWSAARRASREAVEKELGALQQCWERDGGPAQPHGPHRLVRREDGAAGDRDLRAAVVIRTLRSQEACLEAVLRRLQGQCRQELARLVGARPGLIWIPPPGR

SEQ ID NO: 13084 - protein, 495 aa, Homo sapiens
MGRRRQRVDPAAGARAGALPEAIAALSRSLPSGPSPEIFRRAKFDRPEATSALWQLLFRVLSPLPAGNALASLALEVQARLVKSALCSQGYPRLALAQLPEDGSQGSRELLLALSWLLARGPVPEQMLAQARVPLGDEMTVCQCEALASPGPPAPHMEAEGPVDVRHVQWLMGKLRFRWRQLVSSQQEQCALLSKIHLYTRGCHSDQSLSHLSVTEAEMLRDPEGGQQVSGAGAAQNLDLAYPKCLHSFCTPGMGPRTFWNDLWLVCEQPGLLPGDWAAPLDPGGASACSLLSPFRALLRTLERENQRLEAVLAWRRSELVFWRWMDTVLGTCAPEVPAAASQPTFLPWVPERGGGELDLVVRELQALEEELREAAERRRAAWEAKAGGCGRGPEWSAARRASREAVEKELGALQQCWERDGGPAQPHGPHRLVRREDGAAGDRDLRAAVVIRTLRSQEACLEAVLRRLQGQCRQELARLVGARPGLIWIPPPGR

SEQ ID NO: 13085 - protein, 393 aa, Homo sapiens
MGRRRQRVDPAAGARAGALPEAIAALSRSLPSGPSPEIFRRAKFDRPEATSALWQLLFRVLSPLPAGNALASLALEVQARLVKSALCSQGYPRLALAQLPEDGSQGSRELLLALSWLLARGPVPEQMLAQARVPLGDEMTVCQCEALASPGPPAPHMEAEGPVDVRHVQWLMGKLRFRWRQLVSSQQEQCALLSKLLRTLERENQRLEAVLAWRRSELVFWRWMDTVLGTCAPEVPAAASQPTFLPWVPERGGGELDLVVRELQALEEELREAAERRRAAWEAKAGGCGRGPEWSAARRASREAVEKELGALQQCWERDGGPAQPHGPHRLVRREDGAAGDRDLRAAVVIRTLRSQEACLEAVLRRLQGQCRQELARLVGARPGLIWIPPPGR

SEQ ID NO: 13086 - protein, 119 aa, Homo sapiens
MGRRRQRVDPAAGARAGALPEAIAALSRSLPSGPSPEIFRRAKFDRPEATSALWQLLFRVLSPLPAGNALATRGWHWHNYLRMARRAVGSCCWLCPGSWPEDLCPSRCWPRPECLWVTR

SEQ ID NO: 13087 - protein, 54 aa, Homo sapiens
MLAQARVPLGDEMTVCQCEALASPGPPAPHMEAEGPVDVRHVQWLMGKLRFRWR

SEQ ID NO: 13088 - protein, 157 aa, Homo sapiens
MLAQARVPLGDEMTVCQCEALASPGPPAPHMEAEGPVDVRHVQWLMGKLRFRWRQLVSSQQEQCALLSKIHLYTRGCHSDQSLSHLSVTEAEMLRDPEGGQQLLRTLERENQRLEAVLAWRRSELVFWRWMDTVLGTCAPEVPAAASQPTFLPWVPE

SEQ ID NO: 13089 - protein, 248 aa, Homo sapiens
MLAQARVPLGDEMTVCQIHLYTRGCHSDQSLSHLSVTEAEMLRDPEGGQQLLRTLERENQRLEAVLAWRRSELVFWRWMDTVLGTCAPEVPAAASQPTFLPWVPERGGGELDLVVRELQALEEELREAAERRRAAWEAKAGGCGRGPEWSAARRASREAVEKELGALQQCWERDGGPAQPHGPHRLVRREDGAAGDRDLRAAVVIRTLRSQEACLEAVLRRLQGQCRQELARLVGARPGLIWIPPPGR

SEQ ID NO: 13090 - protein, 248 aa, Homo sapiens; identical to SEQ ID NO: 13089

SEQ ID NO: 13091 - protein, 80 aa, Homo sapiens
MSGQRGDWTSALWQLLFRVLSPLPAGNALASLALEVQARLVKSALCSQGYPRLALAQLPEDGSQGSRELLLALSWLLARG

SEQ ID NO: 13092 - protein, 110 aa, Homo sapiens
MSGQRGDWTSALWQLLFRVLSPLPAGNALASLALEVQARLVKSALCSQGYPRLALAQLPEDGSQGSRELLLALSWLLARGPVPEQMLAQARVPLGDEMTVCQCEALASPG

SEQ ID NO: 13093 - protein, 216 aa, Homo sapiens
MSGQRGDWTSALWQLLFRVLSPLPAGNALASLALEVQARLVKSALCSQGYPRLALAQLPEDGSQGSRELLLALSWLLARGPVPEQMLAQARVPLGDEMTVCQCEALASPGPPAPHMEAEGPVDVRHVQWLMGKLRFRWRQLVSSQQEQCALLSKIHLYTRGCHSDQSLSHLSVTEAEMLRDPEGGQQLLRTLERENQRLEAVLAWRRSELVFWRWM

SEQ ID NO: 13094 - protein, 303 aa, Homo sapiens [sequence omitted]

SEQ ID NO: 13095 - protein, 352 aa, Homo sapiens
MSGQRGDWTSALWQLLFRVLSPLPAGNALASLALEVQARLVKSALCSQGYPRLALAQLPEDGSQGSRELLLALSWLLARGPVPEQMLAQARVPLGDEMTVCQCEALASPGPPAPHMEAEGPVDVRHVQWLMGKLRFRWRQLVSSQQEQCALLSKLLRTLERENQRLEAVLAWRRSELVFWRWMDTVLGTCAPEVPAAASQPTFLPWVPERGGGELDLVVRELQALEEELREAAERRRAAWEAKAGGCGRGPEWSAARRASREAVEKELGALQQCWERDGGPAQPHGPHRLVRREDGAAGDRDLRAAVVIRTLRSQEACLEAVLRRLQGQCRQELARLVGARPGLIWIPPPGR

SEQ ID NO: 13096 - protein, 354 aa, Homo sapiens
MSGQRGDWVQTSALWQLLFRVLSPLPAGNALASLALEVQARLVKSALCSQGYPRLALAQLPEDGSQGSRELLLALSWLLARGPVPEQMLAQARVPLGDEMTVCQCEALASPGPPAPHMEAEGPVDVRHVQWLMGKLRFRWRQLVSSQQEQCALLSKLLRTLERENQRLEAVLAWRRSELVFWRWMDTVLGTCAPEVPAAASQPTFLPWVPERGGGELDLVVRELQALEEELREAAERRRAAWEAKAGGCGRGPEWSAARRASREAVEKELGALQQCWERDGGPAQPHGPHRLVRREDGAAGDRDLRAAVVIRTLRSQEACLEAVLRRLQGQCRQELARLVGARPGLIWIPPPGR

SEQ ID NO: 13097 - protein, 976 aa, Homo sapiens
MDSLASLVLCGVSLLLSASFLPATLTMTVDKGDNVNISFKKVLIKEEDAVIYKNGSFIHSVPRHEVPDILEVHLPHAQPQDAGVYSARYIGGNLFTSAFTRLIVRRCEAQKWGPECNHLCTACMNNGVCHEDTGECICPPGFMGRTCEKACELHTFGRTCKERCSGQEGCKSYVFCLPDPYGCSCATGWKGLQCNEGIQRMTPKIVDLPDHIEVNSGKFNPICKASGWPLPTNEEMTLVKPDGTVLHPKDFNHTDHFSVAIFTIHRILPPDSGVWVCSVNTVAGMVEKPFNISVKVLPKPLNAPNVIDTGHNFAVINISSEPYFGDGPIKSKKLLYKPVNHYEAWQHIQVTNEIVTLNYLEPRTEYELCVQLVRRGEGGEGHPGPVRRFTTASIGLPPPRGLNLLPKSQTTLNLTWQPIFPSSEDDFYVEVERRSVQKSDQQNIKVPGNLTSVLLNNLHPREQYVVRARVNTKAQGEWSEDLTAWTLSDILPPQPENIKISNITHSSAVISWTILDGYSISSITIRYKVQGKNEDQHVDVKIKNATITQYQLKGLEPETAYQVDIFAENNIGSSNPAFSHELVTLPESQAPADLGGGKMLLIAILGSAGMTCLTVLLAFLIILQLKRANVQRRMAQAFQNREEPAVQFNSGTLALNRKVKNNPDPTIYPVLDWNDIKFQDVIGEGNFGQVLKARIKKDGLRMDAAIKRMKEYASKDDHRDFAGELEVLCKLGHHPNIINLLGACEHRGYLYLAIEYAPHGNLLDFLRKSRVLETDPAFAIANSTASTLSSQQLLHFAADVARGMDYLSQKQFIHRDLAARNILVGENYVAKIADFGLSRGQEVYVKKTMGRLPVRWMAIESLNYSVYTTNSDVWSYGVLLWEIVSLGGTPYCGMTCAELYEKLPQGYRLEKPLNCDDEVYDLMRQCWREKPYERPSFAQILVSLNRMLEERKTYVNTTLYEKFTYAGIDCSAEEAA

SEQ ID NO: 13098 - protein, 1124 aa, Homo sapiens
MDSLASLVLCGVSLLLSGTVEGAMDLILINSLPLVSDAETSLTCIASGWRPHEPITIGRDFEALMNQHQDPLEVTQDVTREWAKKVVWKREKASKINGAYFCEGRVRGEAIRIRTMKMRQQASFLPATLTMTVDKGDNVNISFKKVLIKEEDAVIYKNGSFIHSVPRHEVPDILEVHLPHAQPQDAGVYSARYIGGNLFTSAFTRLIVRRCEAQKWGPECNHLCTACMNNGVCHEDTGECICPPGFMGRTCEKACELHTFGRTCKERCSGQEGCKSYVFCLPDPYGCSCATGWKGLQCNEACHPGFYGPDCKLRCSCNNGEMCDRFQGCLCSPGWQGLQCEREGIQRMTPKIVDLPDHIEVNSGKFNPICKASGWPLPTNEEMTLVKPDGTVLHPKDFNHTDHFSVAIFTIHRILPPDSGVWVCSVNTVAGMVEKPFNISVKVLPKPLNAPNVIDTGHNFAVINISSEPYFGDGPIKSKKLLYKPVNHYEAWQHIQVTNEIVTLNYLEPRTEYELCVQLVRRGEGGEGHPGPVRRFTTASIGLPPPRGLNLLPKSQTTLNLTWQPIFPSSEDDFYVEVERRSVQKSDQQNIKVPGNLTSVLLNNLHPREQYVVRARVNTKAQGEWSEDLTAWTLSDILPPQPENIKISNITHSSAVISWTILDGYSISSITIRYKVQGKNEDQHVDVKIKNATITQYQLKGLEPETAYQVDIFAENNIGSSNPAFSHELVTLPESQAPADLGGGKMLLIAILGSAGMTCLTVLLAFLIILQLKRANVQRRMAQAFQNVREEPAVQFNSGTLALNRKVKNNPDPTIYPVLDWNDIKFQDVIGEGNFGQVLKARIKKDGLRMDAAIKRMKEYASKDDHRDFAGELEVLCKLGHHPNIINLLGACEHRGYLYLAIEYAPHGNLLDFLRKSRVLETDPAFAIANSTASTLSSQQLLHFAADVARGMDYLSQKQFIHRDLAARNILVGENYVAKIADFGLSRGQEVYVKKTMGRLPVRWMAIESLNYSVYTTNSDVWSYGVLLWEIVSLGGTPYCGMTCAELYEKLPQGYRLEKPLNCDDEVYDLMRQCWREKPYERPSFAQILVSLNRMLEERKTYVNTTLYEKFTYAGIDCSAEEAA

SEQ ID NO: 13099 - protein, 1081 aa, Homo sapiens
MDSLASLVLCGVSLLLSGTVEGAMDLILINSLPLVSDAETSLTCIASGWRPHEPITIGRDFEALMNQHQDPLEVTQDVTREWAKKVVWKREKASKINGAYFCEGRVRGEAIRIRTMKMRQQASFLPATLTMTVDKGDNVNISFKKVLIKEEDAVIYKNGSFIHSVPRHEVPDILEVHLPHAQPQDAGVYSARYIGGNLFTSAFTRLIVRRCEAQKWGPECNHLCTACMNNGVCHEDTGECICPPGFMGRTCEKACELHTFGRTCKERCSGQEGCKSYVFCLPDPYGCSCATGWKGLQCNEGIQRMTPKIVDLPDHIEVNSGKFNPICKASGWPLPTNEEMTLVKPDGTVLHPKDFNHTDHFSVAIFTIHRILPPDSGVWVCSVNTVAGMVEKPFNISVKVLPKPLNAPNVIDTGHNFAVINISSEPYFGDGPIKSKKLLYKPVNHYEAWQHIQVTNEIVTLNYLEPRTEYELCVQLVRRGEGGEGHPGPVRRFTTASIGLPPPRGLNLLPKSQTTLNLTWQPIFPSSEDDFYVEVERRSVQKSDQQNIKVPGNLTSVLLNNLHPREQYVVRARVNTKAQGEWSEDLTAWTLSDILPPQPENIKISNITHSSAVISWTILDGYSISSITIRYKVQGKNEDQHVDVKIKNATITQYQLKGLEPETAYQVDIFAENNIGSSNPAFSHELVTLPESQAPADLGGGKMLLIAILGSAGMTCLTVLLAFLIILQLKRANVQRRMAQAFQNVREEPAVQFNSGTLALNRKVKNNPDPTIYPVLDWNDIKFQDVIGEGNFGQVLKARIKKDGLRMDAAIKRMKEYASKDDHRDFAGELEVLCKLGHHPNIINLLGACEHRGYLYLAIEYAPHGNLLDFLRKSRVLETDPAFAIANSTASTLSSQQLLHFAADVARGMDYLSQKQFIHRDLAARNILVGENYVAKIADFGLSRGQEVYVKKTMGRLPVRWMAIESLNYSVYTTNSDVWSYGVLLWEIVSLGGTPYCGMTCAELYEKLPQGYRLEKPLNCDDEVYDLMRQCWREKPYERPSFAQILVSLNRMLEERKTYVNTTLYEKFTYAGIDCSAEEAA

SEQ ID NO: 13100 - protein, 468 aa, Homo sapiens
MDSLASLVLCGVSLLLSGTVEGAMDLILINSLPLVSDAETSLTCIASGWRPHEPITIGRDFEALMNQHQDPLEVTQDVTREWAKKVVWKREKASKINGAYFCEGRVRGEAIRIRTMKMRQQASFLPATLTMTVDKGDNVNISFKKVLIKEEDAVIYKNGSFIHSVPRHEVPDILEVHLPHAQPQDAGVYSARYIGGNLFTSAFTRLIVRRCEAQKWGPECNHLCTACMNNGVCHEDTGECICPPGFMGRTCEKACELHTFGRTCKERCSGQEGCKSYVFCLPDPYGCSCATGWKGLQCNEGIQRMTPKIVDLPDHIEVNSGKFNPICKASGWPLPTNEEMTLVKPDGTVLHPKDFNHTDHFSVAIFTIHRILPPDSGVWVCSVNTVAGMVEKPFNISVKVLPKPLNAPNVIDTGHNFAVINISSEPYFGDGPIKSKKLLYKPVNHYEAWQHIQVSMEKQRLTKANSDK

SEQ ID NO: 13101 - protein, 468 aa, Homo sapiens
MDSLASLVLCGVSLLLSVPRHEVPDILEVHLPHAQPQDAGVYSARYIGGNLFTSAFTRLIVRRCEAQKWGPECNHLCTACMNNGVCHEDTGECICPPGFMGRTCEKACELHTFGRTCKERCSGQEGCKSYVFCLPDPYGCSCATGWKGLQCNEGIQRMTPKIVDLPDHIEVNSGKFNPICKASGWPLPTNEEMTLVKPDGTVLHPKDFNHTDHFSVAIFTIHRILPPDSGVWVCSVNTVAGMVEKPFNISVKVLPKPLNAPNVIDTGHNFAVINISSEPYFGDGPIKSKKLLYKPVNHYEAWQHIQVTNEIVTLNYLEPRTEYELCVQLVRRGEGGEGHPGPVRRFTTASIGLPPPRGLNLLPKSQTTLNLTWQPIFPSSEDDFYVEVERRSVQKSDQQNIKVPGNLTSVLLNNLHPREQYVVRARVNTKAQGEWSEDLTAWTLSDILPPQPENIKISNITHSSAVIS

SEQ ID NO: 13102 - protein, 298 aa, Homo sapiens
MGIVCAQCSFILLLSIIRARPPPFLFCPLSSQRTESPYKPVHLGLGPTDKVAAIAMARIIDLVPWDDGSTHVYASPAILLPMERQRNQLAGVKQQLYHPALPTLRHMDRDTVKACLPDEHCQSTTYCRKDEFDNAHFTLLGVPNKPLQCLDITATGQKLRNRYHEGKLAPIAPGINRVDWPCFTRAIEDWSHFVSSAGEFKLPCLRKRAEGLSGYAVRYLKPDVTQTWRQEALCGAWAGRPCSPDSPRPYPCCPPQYCLSQNPSLDRYGQKPLPFDSLNTFRSFGSSYSRVNYLTPWH

SEQ ID NO: 13103 - protein, 271 aa, Homo sapiens
MGIVCAQCSFILLLSIIRARPPPFLFCPLSSQRTESPYKPVHLGLGPTDKVAAIAMARIIDLVPWDDGSTHVYASPAILLPMERQRNQLAGVKQQLYHPALPTLRHMDRDTVKACLPDEHCQSTTYCRKDEFDNAHFTLLGVPNKPLQCLDITATGQKLRNRYHEGKLAPIAPGINRVDWPCFTRAIEDWSHFVSSAGEFKLPCLRKRAEGLSGYAVRYLKPDVTQTWRYCLSQNPSLDRYGQKPLPFDSLNTFRSFGSSYSRVNYLTPWH

SEQ ID NO: 13104 - protein, 267 aa, Homo sapiens
MGARQIQTSSSQTSPEEAMGTPRIQHLLILLVLGASLLTSGLELYCQKGLSMTVEADPANMFNWTTEEVETCDKGALCQETILIIKAGTETAILATKGCIPEGEEAITIVQHSSPPGLIVTSYSNYCEDSFCNDKDSLSQFWEFSETTASTVSTTLHCPTCVALGTCFSAPSLPCPNGTTRCYQGKLEITGGGIESSVEVKGCTAMIGCRLMSGILAVGPMFVREACPHQLLTQPRKTENGATCLPIPVWGLQLLLPLLLPSFIHFS

SEQ ID NO: 13105 - protein, 249 aa, Homo sapiens
MGTPRIQHLLILLVLGASLLTSGLELYCQKGLSMTVEADPANMFNWTTEEVETCDKGALCQETILIIKAGTETAILATKGCIPEGEEAITIVQHSSPPGLIVTSYSNYCEDSFCNDKDSLSQFWEFSETTASTVSTTLHCPTCVALGTCFSAPSLPCPNGTTRCYQGKLEITGGGIESSVEVKGCTAMIGCRLMSGILAVGPMFVREACPHQLLTQPRKTENGATCLPIPVWGLQLLLPLLLPSFIHFS

SEQ ID NO: 13106 - protein, 239 aa, Homo sapiens
MSDLLLLGLIGGLTLLLLLTLLAFAGYSGLLAGVEVSAGSPPIRNVTVAYKFHMGLYGETGRLFTESCSISPKLRSIAVYYDNPHMERKLCAYPRLEIYQEDQIHFMCPLARQGDFYVPEMKETEWKWRGLVEAIDTQVDGTGADTMSDTSSVSLEVSPGSRETSAATLSPGASSRGWDDGDTRSEHSYSESGASGSSFEELDLEGEGPLGESRLDPGTEPLGTTKWLWEPTAPEKGKE

SEQ ID NO: 13107 - protein, 104 aa, Homo sapiens
MSDLLLLGLIGGLTLLLLLTLLAFAGYSGLLAGVEVSAGSPPIRNVTVAYKFHMGLYGETGRLFTESCSISPKLRSIAVYYDNPHMVPPDKCRCAVGSILSEGE

SEQ ID NO: 13108 - protein, 140 aa, Homo sapiens
MSDLLLLGLIGGLTLLLLLTLLAFAGYSGLLAGVEVSAGSPPIRNVTVAYKFHMGLYGETGRLFTESCSISPKLRSIAVYYDNPHMVPPDKCRCAVGSILSEGEESPSPELIDLYQKFGFKVFSFPAPSHVVTATFPYTT

SEQ ID NO: 13109 - protein, 151 aa, Homo sapiens
MSDLLLLGLIGGLTLLLLLTLLAFAGYSGLLAGVEVSAGSPPIRNVTVAYKFHMGLYGETGRLFTESCSISPKLRSIAVYYDNPHMVPPDKCRCAVGSILSEGEESPSPELIDLYQKFGFKVFSFPAPSHVVTATFPYTTILSIWLATRRV

SEQ ID NO: 13110 - protein, 216 aa, Homo sapiens
MSDLLLLGLIGGLTLLLLLTLLAFAGYSGLLAGVEVSAGSPPIRNVTVAYKFHMGLYGETGRLFTESCSISPKLRSIAVYYDNPHMVPPDKCRCAVGSILSEGEESPSPELIDLYQKFGFKVFSFPAPSHVVTATFPYTTILSIWLATRRVHPALDTYIKERKLCAYPRLEIYQEDQIHFMCPLARQGDFYVPEMKETEWKWRGLVEAIDTQVDGT

SEQ ID NO: 13111 - protein, 217 aa, Homo sapiens
MSDLLLLGLIGGLTLLLLLTLLAFAGYSGLLAGVEVSAGSPPIRNVTVAYKFHMGLYGETGRLFTESCSISPKLRSIAVYYDNPHMVPPDKCRCAVGSILSEGEESPSPELIDLYQKFGFKVFSFPAPSHVVTATFPYTTILSIWLATRRVHPALDTYIKERKLCAYPRLEIYQEDQIHFMCPLARQGDFYVPEMKETEWKWRGLVEAIDTQVDGTG

SEQ ID NO: 13112 - protein, 313 aa, Homo sapiens
MSDLLLLGLIGGLTLLLLLTLLAFAGYSGLLAGVEVSAGSPPIRNVTVAYKFHMGLYGETGRLFTESCSISPKLRSIAVYYDNPHMVPPDKCRCAVGSILSEGEESPSPELIDLYQKFGFKVFSFPAPSHVVTATFPYTTILSIWLATRRVHPALDTYIKERKLCAYPRLEIYQEDQIHFMCPLARQGDFYVPEMKETEWKWRGLVEAIDTQVDGTGADTMSDTSSVSLEVSPGSRETSAATLSPGASSRGWDDGDTRSEHSYSESGASGSSFEELDLEGEGPLGESRLDPGTEPLGTTKWLWEPTAPEKGKE

SEQ ID NO: 13113 - protein, 313 aa, Homo sapiens; identical to SEQ ID NO: 13112

SEQ ID NO: 13114 - protein, 313 aa, Homo sapiens; identical to SEQ ID NO: 13112

SEQ ID NO: 13115 - protein, 313 aa, Homo sapiens; identical to SEQ ID NO: 13112

SEQ ID NO: 13116 - protein, 313 aa, Homo sapiens; identical to SEQ ID NO: 13112

SEQ ID NO: 13117 - protein, 313 aa, Homo sapiens; identical to SEQ ID NO: 13112

SEQ ID NO: 13118 - protein, 121 aa, Homo sapiens
MSLHGILASAGTIGAVAAWLMSYKPALFGFLFLLLLLSNWLVKYEHKLTLPEPQQDEILQRLLFSEMKMKVLENQMFIIWNKMNHHGRSSRHRNFPMKKHRMRRHESICPTLSDCTSSSPS

SEQ ID NO: 13119 - protein, 121 aa, Homo sapiens
RSLHGILASAGTIGAVAAWLMSYKPALFGFLFLLLLLSNWLVKYEHKLTLPEPQQDEILQRLLFSEMKMKVLENQMFIIWNKMNHHGRSSRHRNFPMKKHRMRRHESICPTLSDCTSSSPS

SEQ ID NO: 13120 - protein, 147 aa, Homo sapiens
  SITE 1: note = misc_feature - Xaa can be any naturally occurring amino acid
XSAGTIGAVAAWLMSYKPALFGFLFLLLLLSNWLVKYEHKLTLPEPQQEEEKPKTSENDSKNSKAVNTKEVNRTHACFALQDEILQRLLFSEMKMKVLENQMFIIWNKMNHHGRSSRHRNFPMKKHRMRRHESICPTLSDCTSSSPS

SEQ ID NO: 13121 - protein, 76 aa, Homo sapiens
MKSVIPSDGPSVACVKKASYLDCIRAIAANEADAVTLDAGLVYDAYLAPNNLKPVVAEFYGSKEDPQTFYYAVAVV

SEQ ID NO: 13122 - protein, 134 aa, Homo sapiens
MNQLRGKKSCHTGLGRSAGWNIPIGLLYCDLPEPRKPLEKAVANFFSGSCAPCADGTDFPQLCQLCPGCGCSTLNQYFGYSGAFKCLKDGAGDVAFVKHSTIFENLANKADRDQYELLCLDNTRKPVDEYKDCH

SEQ ID NO: 13123 - protein, 102 aa, Homo sapiens
MRLAVGALLVCAVLGLCLAVPDKTVRWCAVSEHEATKCQSFRDHMKSVIPSDGPFSYRRGPKYGRQGGLDLGASQPGPGTFWQRQIKRIPTIQLSSWEGPAV

SEQ ID NO: 13124 - protein, 120 aa, Homo sapiens
MRLAVGALLVCAVLGLCLAVPDKTVRWCAVSEHEATKCQSFRDHMKSVIPSDGPSVACVKKASYLDCIRAIAANEADAVTLDAGLVYDAYLAPNNLKPVVAEFYGSKEDFLLCCCCGEEG

SEQ ID NO: 13125 - protein, 698 aa, Homo sapiens
MRLAVGALLVCAVLGLCLAVPDKTVRWCAVSEHEATKCQSFRDHMKSVIPSDGPSVACVKKASYLDCIRAIAANEADAVTLDAGLVYDAYLAPNNLKPVVAEFYGSKEDPQTFYYAVAVVKKDSGFQMNQLRGKKSCHTGLGRSAGWNIPIGLLYCDLPEPRKPLEKAVANFFSGSCAPCADGTDFPQLCQLCPGCGCSTLNQYFGYSGAFKCLKDGAGDVAFVKHSTIFENLANKADRDQYELLCLDNTRKPVDEYKDCHLAQVPSHTVVARSMGGKEDLIWELLNQAQEHFGKDKSKEFQLFSSPHGKDLLFKDSAHGFLKVPPRMDAKMYLGYEYVTAIRNLREGTCPEAPTDECKPVKWCALSHHERLKCDEWSVNSVGKIECVSAETTEDCIAKIMNGEADAMSLDGGFVYIAGKCGLVPVLAENYNKSDNCEDTPEAGYFAIAVVKKSASDLTWDNLKGKKSCHTAVGRTAGWNIPMGLLYNKINHCRFDEFFSEGCAPGSKKDSSLCKLCMGSGLNLCEPNNKEGYYGYTGAFRCLVEKGDVAFVKHQTVPQNTGGKNPDPWAKNLNEKDYELLCLDGTRKPVEEYANCHLARAPNHAVVTRKDKEACVHKILRQQQHLFGSNVTDCSGNFCLFRSETKDLLFRDDTVCLAKLHDRNTYEKYLGEEYVKAVGNLRKCSTSSLLEACTFRRP

SEQ ID NO: 13126 - protein, 115 aa, Homo sapiens
MRLAVGALLVCAVLGLCLAVPDKTVRWCAVSEHEATKCQSFRDHMKSVIPSDGPSVACVKKASYLDCIRAIAVSRCCLKESGRKPYFLCFQSLWNNSLLTGKRSGCCDTGCRFGV

SEQ ID NO: 13127 - protein, 143 aa, Homo sapiens
  SITE 1: note = misc_feature - Xaa can be any naturally occurring amino acid
XYFAIAVVKKSASDLTWDNLKGKKSCHTAVGRTAGWNIPMGLLYNKINHCRFDEFFSEGCAPGSKKDSSLCKLCMGSGLNLCEPNNKEGYYGYTGAFRCLVEKGDVAFVKHQTVPQNTGETIQKRRGKGAEMGYRPVSHRKKP

SEQ ID NO: 13128 - protein, 214 aa, Homo sapiens
MAFLRSMWGVLSALGRSGAELCTGCGSRLRSPFSFVYLPRWFSSVLASCPKKPVSSYLRFSKEQLPIFKAQNPDAKTTELIRRIAQRWRELPDSKKKIYQDAYRAEWQVYKEEISRFKEQLTPSQIMSLEKEIMDKHLKRKAMTKKKEKLKTVKENWKNLSDSEKELYIQHAKEDETRYHNEMKSWEEQMIEVGRKDLLRRTIKKQRKYGAEEC

SEQ ID NO: 13129 - protein, 246 aa, Homo sapiens
MAFLRSMWGVLSALGRSGAELCTGCGSRLRSPFSFVYLPRWFSSVLASCPKKPVSSYLRFSKEQLPIFKAQNPDAKTTELIRRIAQRWRELPDSKKKIYQDAYRAEWQVYKEEISRFKEQLTPSQIMSLEKEIMDKHLKRKAMTKKKELTLLGKPKRPRSAYNVYVAERFQEAKGDSPQEKLKTVKENWKNLSDSEKELYIQHAKEDETRYHNEMKSWEEQMIEVGRKDLLRRTIKKQRKYGAEEC

SEQ ID NO: 13130 - protein, 219 aa, Homo sapiens
  SITE 1: note = misc_feature - Xaa can be any naturally occurring amino acid
XELCTGCGSRLRSPFSFVYLPRWFSSVLASCPKKPVSSYLRFSKEQLPIFKAQNPDAKTTELIRRIAQRWRELPDSKKKIYQDAYRAEWQVYKEEISRFKEQLTPSQIMSLEKEIMDKHLKRKAMTKKKELTLLGKPKRPRSAYNVYVAERFQEAKGDSPQEKLKTVKENWKNLSDSEKEVSITVVSLKCLLRISVRECIRARLDSCEDNLVLLIIQVF

SEQ ID NO: 13131 - protein, 84 aa, Homo sapiens
MATMENKVICALVLVSMLALGTLAEAQTETCTVAPRERQNCGFPGVTPSQCANKGCCFDDTVRGVPWCFYPNTIDVPPEEECEF

SEQ ID NO: 13132 - protein, 129 aa, Homo sapiens
MGRRDAQLLAALLVLGLCALAGSEKPSPCQCSRLSPHNRTNCGFPGITSDQCFDNGCCFDSSVTGVPWCFHPLPKQESDQCVMEVSDRRNCGYPGISPEECASRKCCFSNFIFEVPWCFFPKSVEDCHY

SEQ ID NO: 13133 - protein, 94 aa, Homo sapiens
MKRVLSCVPEPTVVMAARALCMLGLVLALLSSSSAEEYVGLSANQCAVPAKDRVDCGYPHVTPKECNNRGCCFDSRIPGVPWCFKPLQEAECTF

SEQ ID NO: 13134 - protein, 74 aa, Homo sapiens [sequence omitted]

SEQ ID NO: 13135 - protein, 125 aa, Homo sapiens
  SITE 1: note = misc_feature - Xaa can be any naturally occurring amino acid
XALLSSSSAEEYVGLSQQGLWQLTGLCLGQLQTSVPCQPRTGWTAATPMSPPRSATTGAAALTPGSLECLGVSSPCRKQNAPSEAPPAAPGRGMRGSEHPCPAVIAARHCSSQLFCPFAPGKRFC

SEQ ID NO: 13136 - protein, 61 aa, Homo sapiens
MIYTMKKVHALWASVCLLLNLAPAPLNADSEEDEEHTIITDTELPPLKLMHSFCAFKADDG

SEQ ID NO: 13137 - protein, 76 aa, Homo sapiens
MIYTMKKVHALWASVCLLLNLAPAPLNADSEEDEEHTIITDTELPPLKLMHSFCAFKADDGPCKAIMKRFFFNIFT

SEQ ID NO: 13138 - protein, 105 aa, Homo sapiens
MIYTMKKVHALWASVCLLLNLAPAPLNADSEEDEEHTIITDTELPPLKLMHSFCAFKADDGPCKAIMKRFFFNIFTRQCEEFIYGGCEGNQNRFESLEECKKMCT

SEQ ID NO: 13139 - protein, 106 aa, Homo sapiens
MIYTMKKVHALWASVCLLLNLAPAPLNADSEEDEEHTIITDTELPPLKLMHSFCAFKADDGPCKAIMKRFFFNIFTRQCEEFIYGGCEGNQNRFESLEECKKMCTR

SEQ ID NO: 13140 - protein, 106 aa, Homo sapiens; identical to SEQ ID NO: 13139

SEQ ID NO: 13141 - protein, 304 aa, Homo sapiens
MIYTMKKVHALWASVCLLLNLAPAPLNADSEEDEEHTIITDTELPPLKLMHSFCAFKADDGPCKAIMKRFFFNIFTRQCEEFIYGGCEGNQNRFESLEECKKMCTRDNANRIIKTTLQQEKPDFCFLEEDPGICRGYITRYFYNNQTKQCERFKYGGCLGNMNNFETLEECKNICEDGPNGFQVDNYGTQLNAVNNSLTPQSTKVPSLFEFHGPSWCLTPADRGLCRANENRFYYNSVIGKCRPFKYSGCGGNENNFTSKQECLRACKKGFIQRISKGGLIKTKRKRKKQRVKIAYEEIFVKNM

SEQ ID NO: 13142 - protein, 304 aa, Homo sapiens; identical to SEQ ID NO: 13141

SEQ ID NO: 13143 - protein, 251 aa, Homo sapiens
MIYTMKKVHALWASVCLLLNLAPAPLNADSEEDEEHTIITDTELPPLKLMHSFCAFKADDGPCKAIMKRFFFNIFTRQCEEFIYGGCEGNQNRFESLEECKKMCTRDNANRIIKTTLQQEKPDFCFLEEDPGICRGYITRYFYNNQTKQCERFKYGGCLGNMNNFETLEECKNICEDGPNGFQVDNYGTQLNAVNNSLTPQSTKVPSLFVTKEGTNDGWKNAAHIYQVFLNAFCIHASMFFLGLDSISCLC

SEQ ID NO: 13144 - protein, 251 aa, Homo sapiens; identical to SEQ ID NO: 13143

SEQ ID NO: 13145 - protein, 215 aa, Homo sapiens
MIYTMKKVHALWASVCLLLNLAPAPLNADSEEDEEHTIITDTELPPLKLMHSFCAFKADDGPCKAIMKRFFFNIFTRQCEEFIYGGCEGNQNRFESLEECKKMCTREKPDFCFLEEDPGICRGYITRYFYNNQTKQCERFKYGGCLGNMNNFETLEECKNICEDGPNGFQVDNYGTQLNAVNNSLTPQSTKVPSLFEFHGPSWCLTPADRGLCRA

SEQ ID NO: 13146 - protein, 107 aa, Homo sapiens
EACDDACWRIEKVPKVCRLQVSVDDQCEGSTEKYFFNLSSMTCEKFFSGGCHRNRIENRFPDEATCMGFCAPKKNTEPVMLSPILAVEGMTITLLAGRIANVHVQKL

SEQ ID NO: 13147 - protein, 235 aa, Homo sapiens
MDPARPLGLSILLLFLTEAALGDAAQEPTGNNAEICLLPLDYGPCRALLLRYYYDRYTQSCRQFLYGGCEGNANNFYTWEACDDACWRIEKVPKVCRLQVSVDDQCEGSTEKYFFNLSSMTCEKFFSGGCHRNRIENRFPDEATCMGFCAPKKIPSFCYSPKDEGLCSANVTRYYFNPRYRTCDAFTYTGCGGNDNNFVSREDCKRACAKALKKKKKMPKLRFASRIRKIRKKQF

SEQ ID NO: 13148 - protein, 59 aa, Homo sapiens
MALVLEIFTLLASICWVSANIFEYQVDAQPLRPCELQRETAFLKQADYVPQCAEDGSFQ

SEQ ID NO: 13149 - protein, 2768 aa, Homo sapiens
MALVLEIFTLLASICWVSANIFEYQVDAQPLRPCELQRETAFLKQADYVPQCAEDGSFQTVQCQNDGRSCWCVGANGSEVLGSRQPGRPVACLSFCQLQKQQILLSGYINSTDTSYLPQCQDSGDYAPVQCDVQQVQCWCVDAEGMEVYGTRQLGRPKRCPRSCEIRNRRLLHGVGDKSPPQCSAEGEFMPVQCKFVNTTDMMIFDLVHSYNRFPDAFVTFSSFQRRFPEVSGYCHCADSQGRELAETGLELLLDEIYDTIFAGLDLPSTFTETTLYRILQRRFLAVQSVISGRFRCPTKCEVERFTATSFGHPYVPSCRRNGDYQAVQCQTEGPCWCVDAQGKEMHGTRQQGEPPSCAEGQSCASERQQALSRLYFGTSGYFSQHDLFSSPEKRWASPRVARFATSCPPTIKELFVDSGLLRPMVEGQSQQFSVSENLLKEAIRAIFPSRGLARLALQFTTNPKRLQQNLFGGKFLVNVGQFNLSGALGTRGTFNFSQFFQQLGLASFLNGGRQEDLAKPLSVGLDSNSSTGTPEAAKKDGTMNKPTVGSFGFEINLQENQNALKFLASLLELPEFLLFLQHAISVPEDVARDLGDVMETVLSSQTCEQTPERLFVPSCTTEGSYEDVQCFSGECWCVNSWGKELPGSRVRGGQPRCPTDCEKQRARMQSLMGSQPAGSTLFVPACTSEGHFLPVQCFNSECYCVDAEGQAIPGTRSAIGKPKKCPTPCQLQSEQAFLRTVQALLSNSSMLPTLSDTYIPQCSTDGQWRQVQCNGPPEQVFELYQRWEAQNKGQDLTPAKLLVKIMSYREAASGNFSLFIQSLYEAGQQDVFPVLSQYPSLQDVPLAALEGKRPQPRENILLEPYLFWQILNGQLSQYPGSYSDFSTPLAHFDLRNCWCVDEAGQELEGMRSEPSKLPTCPGSCEEAKLRVLQFIRETEEIVSASNSSRFPLGESFLVAKGIRLRNEDLGLPPLFPPREAFAEQFLRGSDYAIRLAAQSTLSFYQRRRFSPDDSAGASALLRSGPYMPQCDAFGSWEPVQCHAGTGHCWCVDEKGGFIPGSLTARSLQIPQCPTTCEKSRTSGLLSSWKQARSQENPSPKDLFVPACLETGEYARLQASGAGTWCVDPASGEELRPGSSSSAQCPSLCNVLKSGVLSRRVSPGYVPACRAEDGGFSPVQCDQAQGSCWCVMDSGEEVPGTRVTGGQPACESPRCPLPFNASEVVGGTILCETISGPTGSAMQQCQLLCRQGSWSVFPPGPLICSLESGRWESQLPQPRACQRPQLWQTIQTQGHFQLQLPPGKMCSADYADLLQTFQVFILDELTARGFCQIQVKTFGTLVSIPVCNNSSVQVGCLTRERLGVNVTWKSRLEDIPVASLPDLHDIERALVGKDLLGRFTDLIQSGSFQLHLDSKTFPAETIRFLQGDHFGTSPRTWFGCSEGFYQVLTSEASQDGLGCVKCPEGSYSQDEECIPCPVGFYQEQAGSLACVPCPVGRTTISAGAFSQTHCVTDCQRNEAGLQCDQNGQYRASQKDRGSGKAFCVDGEGRRLPWWETEAPLEDSQCLMMQKFEKVPESKVIFDANAPVAVRSKVPDSEFPVMQCLTDCTEDEACSFFTVSTTEPEISCDFYAWTSDNVACMTSDQKRDALGNSKATSFGSLRCQVKVRSHGQDSPAVYLKKGQGSTTTLQKRFEPTGFQNMLSGLYNPIVFSASGANLTDAHLFCLLACDRDLCCDGFVLTQVQGGAIICGLLSSPSVLLCNVKDWMDPSEAWANATCPGVTYDQESHQVILRLGDQEFIKSLTPLEGTQDTFTNFQQVYLWKDSDMGSRPESMGCRKDTVPRPASPTEAGLTTELFSPVDLNQVIVNGNQSLSSQKHWLFKHLFSAQQANLWCLSRCVQEHSFCQLAEITESASLYFTCTLYPEAQVCDDIMESNAQGCRLILPQMPKALFRKKVILEDKVKNFYTRLPFQKLMGISIRNKVPMSEKSISNGFFECERRCDADPCCTGFGFLNVSQLKGGEVTCLTLNSLGIQMCSEENGGAWRILDCGSPDIEVHTYPFGWYQKPIAQNNAPSFCPLVVLPSLTEKVSLDSWQSLALSSVVVDPSIRHFDVAHVSTAATSNFSAVRDLCLSECSQHEACLITTLQTQPGAVRCMFYADTQSCTHSLQGQNCRLLLREEATHIYRKPGISLLSYEASVPSVPISTHGRLLGRSQAIQVGTSWKQVDQFLGVPYAAPPLAERRFQAPEPLNWTGSWDASKPRASCWQPGTRTSTSPGVSEDCLYLNVFIPQNVAPNASVLVFFHNTMDREESEGWPAIDGSFLAAVGNLIVVTASYRVGVFGFLSSGSGEVSGNWGLLDQVAALTWVQTHIRGFGGDPRRVSLAADRGGADVASIHLLTARATNSQLFRRAVLMGGSALSPAAVISHERAQQQAIALAKEVSCPMSSSQEVVSCLRQKPANVLNDAQTKLLAVSGPFHYWGPVIDGHFLREPPARALKRSLWVEVDLLIGSSQDDGLINRAKAVKQFEESRGRTSSKTAFYQALQNSLGGEDSDARVEAAATWYYSLEHSTDDYASFSRALENATRDYFIICPIIDMASAWAKRARGNVFMYHAPENYGHGSLELLADVQFALGLPFYPAYEGQFSLEEKSLSLKIMQYFSHFIRSGNPNYPYEFSRKVPTFATPWPDFVPRAGGENYKEFSELLPNRQGLKKADCSFWSKYISSLKTSADGAKGGQSAESEEEELTAGSGLREDLLSLQEPGSKTYSK

SEQ ID NO: 13150 - protein, 901 aa, Homo sapiens
MLPGLTTELFSPVDLNQVIVNGNQSLSSQKHWLFKHLFSAQQANLWCLSRCVQEHSFCQLAEITESASLYFTCTLYPEAQVCDDIMESNAQGCRLILPQMPKALFRKKVILEDKVKNFYTRLPFQKLMGISIRNKVPMSEKSISNGFFECERRCDADPCCTGFGFLNVSQLKGGEVTCLTLNSLGIQMCSEENGGAWRILDCGSPDIEVHTYPFGWYQKPMSLDSWQSLALSSVVVDPSIRHFDVAHVSTAATSNFSAVRDLCLSECSQHEACLITTLQTQPGAVRCMFYADTQSCTHSLQGQNCRLLLREEATHIYRKPGISLLSYEASVPSVPISTHGRLLGRSQAIQVGTSWKQVDQFLGVPYAAPPLAERRFQAPEPLNWTGSWDASKPRASCWQPGTRTSTSPGVSEDCLYLNVFIPQNVAPNASVLVFFHNTMDREESEGWPAIDGSFLAAVGNLIVVTASYRVGVFGFLSSGSGEVSGNWGLLDQVAALTWVQTHIRGFGGDPRRVSLAADRGGADVASIHLLTARATNSQLFRRAVLMGGSALSPAAVISHERAQQQAIALAKEVSCPMSSSQEVVSCLRQKPANVLNDAQTKLLAVSGPFHYWGPVIDGHFLREPPARALKRSLWVEVDLLIGSSQDDGLINRAKAVKQFEESRGRTSSKTAFYQALQNSLGGEDSDARVEAAATWYYSLEHSTDDYASFSRALENATRDYFIICPIIDMASAWAKRARGNVFMYHAPENYGHGSLELLADVQFALGLPFYPAYEGQFSLEEKSLSLKIMQYFSHFIRSGNPNYPYEFSRKVPTFATPWPDFVPRAGGENYKEFSELLPNRQGLKKADCSFWSKYISSLKTSADGAKGGQSAESEEEELTAGSGLREDLLSLQEPGSKTYSK

SEQ ID NO: 13151 - protein, 172 aa, Homo sapiens
SDARVEAAATWYYSLEHSTDDYASFSRALENATRDYFIICPIIDMASAWAKRARGNVFMYHAPENYGHGRNPNYPYEFSRKVPTFATPWPDFVPRAGGENYKEFSELLPNRQGLKKADCSFWSKYISSLKTSADGAKGGQSAESEEEELTAGSGLREDLLSLQEPGSKTYSK

SEQ ID NO: 13152 - protein, 74 aa, Homo sapiens
  SITE 1: note = misc_feature - Xaa can be any naturally occurring amino acid
XGIQMCSEENGGAWRILDCGSPDIEVHTYPFGWYQKPIAQNNAPSFCPLVVLPSLTEKVFKVREVRGTQLKRME

SEQ ID NO: 13153 - protein, 226 aa, Homo sapiens
  SITE 1: note = misc_feature - Xaa can be any naturally occurring amino acid
XGSWEPVQCHAGTGHCWCVDEKGGFIPGSLTARSLQIPQCPTTCEKSRTSGLLSSWKQARSQENPSPKDLFVPACLETGEYARLQASGAGTWCVDPASGEELRPGSSSSAQSCRAEDGGFSPVQCDQAQGSCWCVMDSGEEVPGTRVTGGQPACESPRCPLPFNASEVVGGTILCETISGPTGSAMQQCQLLCRQGSWSVFPPGPLICSLESGRWESQLPQPRACQ

SEQ ID NO: 13154 - protein, 194 aa, Homo sapiens
  SITE 1: note = misc_feature - Xaa can be any naturally occurring amino acid
XHSECQWREHSLRPLPFLTPFSSLSQQESLCSAMRHLYLLCPFPPMAGCWAGPRPSRASCWQPGTRTSTSPGVSEDCLYLNVFIPQNVAPNASVLVFFHNTMDREESEGWPAIDGSFLAAVGNLIVVTASYRVGVFGFLSSGSGEVSGNWGLLDQVAALTWVQTHIRGFGGDPRRVSLAADRGGADVASIHLLT

SEQ ID NO: 13155 - protein, 1224 aa, Homo sapiens
  SITE 1: note = misc_feature - Xaa can be any naturally occurring amino acid
XQEQAGSLACVPCPVGRTTISAGAFSQTHCVTDCQRNEAGLQCDQNGQYRASQKDRGSGKAFCVDGEGRRLPWWETEAPLEDSQCLMMQKFEKVPESKVIFDANAPVAVRSKVPDSEFPVMQCLTDCTEDEACSFFTVSTTEPEISCDFYAWTSDNVACMTSDQKRDALGNSKATSFGSLRCQVKVRSHGQDSPAVYLKKGAIICGLLSSPSVLLCNVKDWMDPSEAWANATCPGVTYDQESHQVILRLGDQEFIKSLTPLEGTQDTFTNFQQVYLWKDSDMGSRPESMGCRKDTVPRPASPTEAGLTTELFSPVDLNQVIVNGNQSLSSQKHWLFKHLFSAQQANLWCLSRCVQEHSFCQLAEITESASLYFTCTLYPEAQVCDDIMESNAQGCRLILPQMPKALFRKKVILEDKVKNFYTRLPFQKLMGISIRNKVPMSEKSISNGFFECERRCDADPCCTGFGFLNVSQLKGGEVTCLTLNSLGIQMCSEENGGAWRILDCGSPDIEVHTYPFGWYQKPIAQNNAPSFCPLVVLPSLTEKVSLDSWQSLALSSVVVDPSIRHFDVAHVSTAATSNFSAVRDLCLSECSQHEACLITTLQTQPGAVRCMFYADTQSCTHSLQGQNCRLLLREEATHIYRKPGISLLSYEASVPSVPISTHGRLLGRSQAIQVGTSWKQVDQFLGVPYAAPPLAERRFQAPEPLNWTGSWDASKPRASCWQPGTRTSTSPGVSEDCLYLNVFIPQNVAPNASVLVFFHNTMDREESEGWPAIDGSFLAAVGNLIVVTASYRVGVFGFLSSGSGEVSGNWGLLDQVAALTWVQTHIRGFGGDPRRVSLAADRGGADVASIHLLTARATNSQLFRRAVLMGGSALSPAAVISHERAQQQAIALAKEVSCPMSSSQEVVSCLRQKPANVLNDAQTKLLAVSGPFHYWGPVIDGHFLREPPARALKRSLWVEVDLLIGSSQDDGLINRAKAVKQFEESRGRTSSKTAFYQALQNSLGGEDSDARVEAAATWYYSLEHSTDDYASFSRALENATRDYFIICPIIDMASAWAKRARGNVFMYHAPENYGHGSLELLADVQFALGLPFYPAYEGQFSLEEKSLSLKIMQYFSHFIRSGNPNYPYEFSRKVPTFATPWPDFVPRAGGENYKEFSELLPNRQGLKKADCSFWSKYISSLKTSADGAKGGQSAESEEEELTAGSGLREDLLSLQEPGSKTYSK

SEQ ID NO: 13156 - protein, 147 aa, Homo sapiens
  SITE 1: note = misc_feature - Xaa can be any naturally occurring amino acid
XSAGASALLRSGPYMPQCDAFGSWEPVQCHAGTGHCWCVDEKGGFIPGSLTARSLQIPQCPTTCEKSRTSGLLSSWKQARSQENPSPKDLFVPACLEARGVRCHSTRRRWLVEQSCVRQSRAPQALPCSSANCCAARAPGACFHQGH

SEQ ID NO: 13157 - protein, 62 aa, Homo sapiens
  SITE 1: note = misc_feature - Xaa can be any naturally occurring amino acid
XSDMGSRPESMGCRKDTVPRPASPTEAGCVQEHSFCQLAEITESASLYFTCTLYPEAQVCDD

SEQ ID NO: 13158 - protein, 390 aa, Homo sapiens
MPPSGLRLLPLLLPLLWLLVLTPGRPAAGLSTCKTIDMELVKRKRIEAIRGQILSKLRLASPPSQGEVPPGPLPEAVLALYNSTRDRVAGESAEPEPEPEADYYAKEVTRVLMVETHNEIYDKFKQSTHSIYMFFNTSELREAVPEPVLLSRAELRLLRLKLKVEQHVELYQKYSNNSWRYLSNRLLAPSDSPEWLSFDVTGVVRQWLSRGGEIEGFRLSAHCSCDSRDNTLQVDINGFTTGRRGDLATIHGMNRPFLLLMATPLERAQHLQSSRHRRALDTNYCFSSTEKNCCVRQLYIDFRKDLGWKWIHEPKGYHANFCLGPCPYIWSLDTQYSKVLALYNQHNPGASAAPCCVPQALEPLPIVYYVGRKPKVEQLSNMIVRSCKCS

SEQ ID NO: 13159 - protein, 120 aa, Homo sapiens
  SITE 1: note = misc_feature - Xaa can be any naturally occurring amino acid
XFTTGRRGDLATIHGMNRPFLLLMATPLERAQHLQSSRHRRALDTNYCFSSTEKNCCVRQLYIDFRKDLGWKWIHEPKGYHANFCLGPCPYIWSLDTQYSKLNEQNLIQEVPNIWQREVG

SEQ ID NO: 13160 - protein, 414 aa, Homo sapiens
MHYCVLSAFLILHLVTVALSLSTCSTLDMDQFMRKRIEAIRGQILSKLKLTSPPEDYPEPEEVPPEVISIYNSTRDLLQEKASRRAAACERERSDEEYYAKEVYKIDMPPFFPSENAIPPTFYRPYFRIVRFDVSAMEKNASNLVKAEFRVFRLQNPKARVPEQRIELYQILKSKDLTSPTQRYIDSKVVKTRAEGEWLSFDVTDAVHEWLHHKDRNLGFKISLHCPCCTFVPSNNYIIPNKSEELEARFAGIDGTSTYTSGDQKTIKSTRKKNSGKTPHLLLMLLPSYRLESQQTNRRKKRALDAAYCFRNVQDNCCLRPLYIDFKRDLGWKWIHEPKGYNANFCAGACPYLWSSDTQHSRVLSLYNTINPEASASPCCVSQDLEPLTILYYIGKTPKIEQLSNMIVKSCKCS

SEQ ID NO: 13161 - protein, 442 aa, Homo sapiens
MHYCVLSAFLILHLVTVALSLSTCSTLDMDQFMRKRIEAIRGQILSKLKLTSPPEDYPEPEEVPPEVISIYNSTRDLLQEKASRRAAACERERSDEEYYAKEVYKIDMPPFFPSETVCPVVTTPSGSVGSLCSRQSQVLCGYLDAIPPTFYRPYFRIVRFDVSAMEKNASNLVKAEFRVFRLQNPKARVPEQRIELYQILKSKDLTSPTQRYIDSKVVKTRAEGEWLSFDVTDAVHEWLHHKDRNLGFKISLHCPCCTFVPSNNYIIPNKSEELEARFAGIDGTSTYTSGDQKTIKSTRKKNSGKTPHLLLMLLPSYRLESQQTNRRKKRALDAAYCFRNVQDNCCLRPLYIDFKRDLGWKWIHEPKGYNANFCAGACPYLWSSDTQHSRVLSLYNTINPEASASPCCVSQDLEPLTILYYIGKTPKIEQLSNMIVKSCKCS

SEQ ID NO: 13162 - protein, 412 aa, Homo sapiens
MKMHLQRALVVLALLNFATVSLSLSTCTTLDFGHIKKKRVEAIRGQILSKLRLTSPPEPTVMTHVPYQVLALYNSTRELLEEMHGEREEGCTQENTESEYYAKEIHKFDMIQGLAEHNELAVCPKGITSKVFRFNVSSVEKNRTNLFRAEFRVLRVPNPSSKRNEQRIELFQILRPDEHIAKQRYIGGKNLPTRGTAEWLSFDVTDTVREWLLRRESNLGLEISIHCPCHTFQPNGDILENIHEVMEIKFKGVDNEDDHGRGDLGRLKKQKDHHNPHLILMMIPPHRLDNPGQGGQRKKRALDTNYCFRNLEENCCVRPLYIDFRQDLGWKWVHEPKGYYANFCSGPCPYLRSADTTHSTVLGLYNTLNPEASASPCCVPQDLEPLTILYYVGRTPKVEQLSNMVVKSCKCS

SEQ ID NO: 13163 - protein, 309 aa, Homo sapiens
MKMHLQRALVVLALLNFATVSLSLSTCTTLDFGHIKKKRVEAIRGQILSKLRLTSPPEPTVMTHVPYQVLALYNSTRELLEEMHGEREEGCTQENTESEYYAKEIHKFDMIQGLAEHNELAVCPKGITSKVFRFNVSSVEKNRTNLFRAEFRVLRVPNPSSKRNEQRIELFQILRPDEHIAKQRYIGGKNLPTRGTAEWLSFDVTDTVREWLLRRESNLGLEISIHCPCHTFQPNGDILENIHEVMEIKFKGVDNEDDHGRGDLGRLKKQKDHHNPHLILMMIPPHRLDNPGQGGQRKKRALDTNYCFR

SEQ ID NO: 13164 - protein, 683 aa, Homo sapiens
MALFVRLLALALALALGPAATLAGPAKSPYQLVLQHSRLRGRQHGPNVCAVQKVIGTNRKYFTNCKQWYQRKICGKSTVISYECCPGYEKVPGEKGCPAALPLSNLYETLGVVGSTTTQLYTDRTEKLRPEMEGPGSFTIFAPSNEAWASLPAEVLDSLVSNVNIELLNALRYHMVGRRVLTDELKHGMTLTSMYQNSNIQIHHYPNGIVTVNCARLLKADHHATNGVVHLIDKVISTITNNIQQIIEIEDTFETLRAAVAASGLNTMLEGNGQYTLLAPTNEAFEKIPSETLNRILGDPEALRDLLNNHILKSAMCAEAIVAGLSVETLEGTTLEVGCSGDMLTINGKAIISNKDILATNGVIHYIDELLIPDSAKTLFELAAESDVSTAIDLFRQAGLGNHLSGSERLTLLAPLNSVFKDGTPPIDAHTRNLLRNHIIKDQLASKYLYHGQTLETLGGKKLRVFVYRNSLCIENSCIAAHDKRGRYGTLFTMDRVLTPPMGTVMDVLKGDNRFSMLVAAIQSAGLTETLNREGVYTVFAPTNEAFRALPPRERSRLLGDAKELANILKYHIGDEILVSGGIGALVRLKSLQGDKLEVSLKNNVVSVNKEPVAEPDIMATNGVVHVITNVLQPPANRPQERGDELADSALEIFKQASAFSRASQRSVRLAPVYQKLLERMKH

SEQ ID NO: 13165 - protein, 65 aa, Homo sapiens
MATNGVVHVITNVLQPPANRPQERGDELADSALEIFKQASAFSRASQRSVRLAPVYQKLLERMKH

SEQ ID NO: 13166 - protein, 219 aa, Homo sapiens
RAAVAASGLNTMLEGNGQYTLLAPTNEAFEKIPSETLNRILGDPEALRDLLNNHILKSAMCAEAIVAGLSVETLEGTTLEVGCSGDMLTINGKAIISNKDILATNGVIHYIDELLIPDSAKTLFELAAESDVSTAIDLFRQAGLGNHLSGSERLTLLAPLNSVFKDGTPPIDAHTRNLLRNHIIKDQLASKYLYHGQTLETLGGKKLRVFVYRNVSSGS

SEQ ID NO: 13167 - protein, 366 aa, Homo sapiens
  SITE 1: note = misc_feature - Xaa can be any naturally occurring amino acid
XAFEKIPSETLNRILGDPEALRDLLNNHILKSAMCAEAIVAGLSVETLEGTTLEVGCSGDMLTINGKAIISNKDILATNGVIHYIDELLIPDSAKTLFELAAESDVSTAIDLFRQAGLGNHLSGSERLTLLAPLNSVFKDGTPPIDAHTRNLLRNHIIKDQLASKYLYHGQTLETLGGKKLRVFVYRNSLCIENSCIAAHDKRGRYGTLFTMDRVLTPPMGTVMDVLKGDNRFSMLVAAIQSAGLTETLNREGVYTVFAPTNEAFRALPPRERSRLLGDAKELANILKYHIGDEILVSGGIGALVRLKSLQGDKLEVSLKNNVVSVNKEPVAEPDIMATNGVVHVITNVLQPPAPVYQKLLERMKH

SEQ ID NO: 13168 - protein, 59 aa, Homo sapiens
  SITE 1: note = misc_feature - Xaa can be any naturally occurring amino acid
XKTLFELAAESDVSTAIDLFRQAGLGNHLSGSERLTLLAPLNSVFKGAHLSGPNHHPFL

SEQ ID NO: 13169 - protein, 194 aa, Homo sapiens
  SITE 1: note = misc_feature - Xaa can be any naturally occurring amino acid
XNGVVHLIDKVISTITNNIQQIIEIEDTFETLRAAVAASGLNTMLEGNGQYTLLAPTNEAFEKIPSETLNRILGDPEALRDMLTINGKAIISNKDILATNGVIHYIDELLIPDSAKTLFELAAESDVSTAIDLFRQAGLGNHLSGSERLTLLAPLNSVFKDGTPPIDAHTRNLLRNHIIKDQLASKYLYHGQTL

SEQ ID NO: 13170 - protein, 128 aa, Homo sapiens
  SITE 1: note = misc_feature - Xaa can be any naturally occurring amino acid
XPYQLVLQHSRLRGRQHGPNVCAVQKVIGTNRKYFTNCKQWYQRKICGKSTVISYECCPGYEKVPGEKGCPAALPLSNLYETLGVVGSTTTQLYTDRTEKLRPEMEGPGSFTIFAPSNEAWASLPAVR

SEQ ID NO: 13171 - protein, 78 aa, Homo sapiens
  SITE 1: note = misc_feature - Xaa can be any naturally occurring amino acid
XQGDKLEVSLKNNVVSVNKEPVAEPDIMATNGVVHVITNVLQPPANRPQERGDELADSALEIFKQASAFSRPLSIKSY

SEQ ID NO: 13172 - protein, 114 aa, Homo sapiens
MCIAEIDLIPRDRPFVCAPSSKTGSVTTTYCCNQDHCNKIELPTTGLPLLVQRTIARTIVLQESIGKGRFGEVWRGKWRGEEVAVKIFSSREERSWFREAEIYQTVMLRHENIL

SEQ ID NO: 13173 - protein, 114 aa, Homo sapiens
MCIAEIDLIPRDRPFVCAPSSKTGSVTTTYCCNQDHCNKIELPTTGPFSVKSSPGLGPVELAAVIAGPVCFVCISLMLMVYICHNRTVIHHRVPNEEDPSLDRPFISEGTTLKD

SEQ ID NO: 13174 - protein, 126 aa, Homo sapiens
MCIAEIDLIPRDRPFVCAPSSKTGSVTTTYCCNQDHCNKIELPTTGPFSVKSSPGLGPVELAAVIAGPVCFVCISLMLMVYICHNRTVIHHRVPNEEDPSLDRPFISEGTTLKDLIYDMTTSGSGS

SEQ ID NO: 13175 - protein, 118 aa, Homo sapiens
MCIAEIDLIPRDRPFVCAPSSKTGSVTTTYCCNQDHCNKIELPTTVKSSPGLGPVELAAVIAGPVCFVCISLMLMVYICHNRTVIHHRVPNEEDPSLDRPFISEGTTLKDLIYDMTTS

SEQ ID NO: 13176 - protein, 122 aa, Homo sapiens
MCIAEIDLIPRDRPFVCAPSSKTGSVTTTYCCNQDHCNKIELPTTVKSSPGLGPVELAAVIAGPVCFVCISLMLMVYICHNRTVIHHRVPNEEDPSLDRPFISEGTTLKDLIYDMTTSGSGS

SEQ ID NO: 13177 - protein, 434 aa, Homo sapiens
MCIAEIDLIPRDRPFVCAPSSKTGSVTTTYCCNQDHCNKIELPTTVKSSPGLGPVELAAVIAGPVCFVCISLMLMVYICHNRTVIHHRVPNEEDPSLDRPFISEGTTLKDLIYDMTTSGSGSGLPLLVQRTIARTIVLQESIGKGRFGEVWRGKWRGEEVAVKIFSSREERSWFREAEIYQTVMLRHENILGFIAADNKDNGTWTQLWLVSDYHEHGSLFDYLNRYTVTVEGMIKLALSTASGLAHLHMEIVGTQGKPAIAHRDLKSKNILVKKNGTCCIADLGLAVRHDSATDTIDIAPNHRVGTKRYMAPEVLDDSINMKHFESFKRADIYAMGLVFWEIARRCSIGGIHEDYQLPYYDLVPSDPSVEEMRKVVCEQKLRPNIPNRWQSCEALRVMAKIMRECWYANGAARLTALRIKKTLSQLSQQEGIKM

SEQ ID NO: 13178 - protein, 426 aa, Homo sapiens
MEAAVAAPRPRLLLLVLAAAAAAAAALLPGATALQCFCHLCTKDNFTCVTDGLCFVSVTETTDKVIHNSMCIAEIDLIPRDRPFVCAPSSKTGSVTTTYCCNQDHCNKIELPTTGLPLLVQRTIARTIVLQESIGKGRFGEVWRGKWRGEEVAVKIFSSREERSWFREAEIYQTVMLRHENILGFIAADNKDNGTWTQLWLVSDYHEHGSLFDYLNRYTVTVEGMIKLALSTASGLAHLHMEIVGTQGKPAIAHRDLKSKNILVKKNGTCCIADLGLAVRHDSATDTIDIAPNHRVGTKRYMAPEVLDDSINMKHFESFKRADIYAMGLVFWEIARRCSIGGIHEDYQLPYYDLVPSDPSVEEMRKVVCEQKLRPNIPNRWQSCEALRVMAKIMRECWYANGAARLTALRIKKTLSQLSQQEGIKM

SEQ ID NO: 13179 - protein, 383 aa, Homo sapiens
MEAAVAAPRPRLLLLVLAAAAAAAAALLPGATALQCFCHLCTKDNFTCVTDGLCFVSVTETTDKVIHNSMCIAEIDLIPRDRPFVCAPSSKTGSVTTTYCCNQDHCNKIELPTTGPFSVKSSPGLGPVELAAVIAGPVCFVCISLMLMVYICHNRTVIHHRVPNEEDPSLDRPFISEGTTLKDLIYDMTTSGSGSGLPLLVQRTIARTIVLQESIGKGRFGEVWRGKWRGEEVAVKIFSSREERSWFREAEIYQTVMLRHENILGFIAADNKDNGTWTQLWLVSDYHEHGSLFDYLNRYTVTVEGMIKLALSTASGLAHLHMEIVGTQGKPAIAHRDLKSKNILVKKNGTCCIADLGLAVRHDSATDTIDIAPNHRVGTKRNS

SEQ ID NO: 13180 - protein, 507 aa, Homo sapiens
MEAAVAAPRPRLLLLVLAAAAAAAAALLPGATALQCFCHLCTKDNFTCVTDGLCFVSVTETTDKVIHNSMCIAEIDLIPRDRPFVCAPSSKTGSVTTTYCCNQDHCNKIELPTTGPFSVKSSPGLGPVELAAVIAGPVCFVCISLMLMVYICHNRTVIHHRVPNEEDPSLDRPFISEGTTLKDLIYDMTTSGSGSGLPLLVQRTIARTIVLQESIGKGRFGEVWRGKWRGEEVAVKIFSSREERSWFREAEIYQTVMLRHENILGFIAADNKDNGTWTQLWLVSDYHEHGSLFDYLNRYTVTVEGMIKLALSTASGLAHLHMEIVGTQGKPAIAHRDLKSKNILVKKNGTCCIADLGLAVRHDSATDTIDIAPNHRVGTKRYMAPEVLDDSINMKHFESFKRADIYAMGLVFWEIARRCSIGGIHEDYQLPYYDLVPSDPSVEEMRKVVCEQKLRPNIPNRWQSCEALRVMAKIMRECWYANGAARLTALRIKKTLSQLSQQEGIKM

SEQ ID NO: 13181 - protein, 503 aa, Homo sapiens
MEAAVAAPRPRLLLLVLAAAAAAAAALLPGATALQCFCHLCTKDNFTCVTDGLCFVSVTETTDKVIHNSMCIAEIDLIPRDRPFVCAPSSKTGSVTTTYCCNQDHCNKIELPTTVKSSPGLGPVELAAVIAGPVCFVCISLMLMVYICHNRTVIHHRVPNEEDPSLDRPFISEGTTLKDLIYDMTTSGSGSGLPLLVQRTIARTIVLQESIGKGRFGEVWRGKWRGEEVAVKIFSSREERSWFREAEIYQTVMLRHENILGFIAADNKDNGTWTQLWLVSDYHEHGSLFDYLNRYTVTVEGMIKLALSTASGLAHLHMEIVGTQGKPAIAHRDLKSKNILVKKNGTCCIADLGLAVRHDSATDTIDIAPNHRVGTKRYMAPEVLDDSINMKHFESFKRADIYAMGLVFWEIARRCSIGGIHEDYQLPYYDLVPSDPSVEEMRKVVCEQKLRPNIPNRWQSCEALRVMAKIMRECWYANGAARLTALRIKKTLSQLSQQEGIKM

SEQ ID NO: 13182 - protein, 35 aa, Homo sapiens
MTSHYVIAIFALMSSCLATAGPEPGALCELSPVSA

SEQ ID NO: 13183 - protein, 89 aa, Homo sapiens
MTSHYVIAIFALMSSCLATAGPEPGALCELSPVSASHPVQALMESFTVLSGCASRGTTGLPQEVHVLNLRTAGQGPGQLQREACSMNHY

SEQ ID NO: 13184 - protein, 851 aa, Homo sapiens
MTSHYVIAIFALMSSCLATAGPEPGALCELSPVSASHPVQALMESFTVLSGCASRGTTGLPQEVHVLNLRTAGQGPGQLQREVTLHLNPISSVHIHHKSVVFLLNSPHPLVWHLKTERLATGVSRLFLVSEGSVVQFSSANFSLTAETEERNFPHGNEHLLNWARKEYGAVTSFTELKIARNIYIKVGEDQVFPPKCNIGKNFLSLNYLAEYLQPKAAEGCVMSSQPQNEEVHIIELITPNSNPYSAFQVDITIDIRPSQEDLEVVKNLILILKCKKSVNWVIKSFDVKGSLKIIAPNSIGFGKESERSMTMTKSIRDDIPSTQGNLVKWALDNGYSPITSYTMAPVANRFHLRLENNAEEMGDEEVHTIPPELRILLDPGALPALQNPPIRGGEGQNGGLPFPFPDISRRVWNEEGEDGLPRPKDPVIPSIQLFPGLREPEEVQGSVDIALSVKCDNEKMIVAVEKDSFQASGYSGMDVTLLDPTCKAKMNGTHFVLESPLNGCGTRPRWSALDGVVYYNSIVIQVPALGDSSGWPDGYEDLESGDNGFPGDMDEGDASLFTRPEIVVFNCSLQQVRNPSSFQEQPHGNITFNMELYNTDLFLVPSQGVFSVPENGHVYVEVSVTKAEQELGFAIQTCFISPYSNPDRMSHYTIIENICPKDESVKFYSPKRVHFPIPQADMDKKRFSFVFKPVFNTSLLFLQCELTLCTKMEKHPQKLPKCVPPDEACTSLDASIIWAMMQNKKTFTKPLAVIHHEAESKEKGPSMKEPNPISPPIFHGLDTLTVMGIAFAAFVIGALLTGALWYIYSHTGETAGRQQVPTSPPASENSSAAHSIGSTQSTPCSSSSTA

SEQ ID NO: 13185 - protein, 850 aa, Homo sapiens
MTSHYVIAIFALMSSCLATAGPEPGALCELSPVSASHPVQALMESFTVLSGCASRGTTGLPQEVHVLNLRTAGQGPGQLQREVTLHLNPISSVHIHHKSVVFLLNSPHPLVWHLKTERLATGVSRLFLVSEGSVVQFSSANFSLTAETEERNFPHGNEHLLNWARKEYGAVTSFTELKIARNIYIKVGEDQVFPPKCNIGKNFLSLNYLAEYLQPKAAEGCVMSSQPQNEEVHIIELITPNSNPYSAFQVDITIDIRPSQEDLEVVKNLILILKCKKSVNWVIKSFDVKGSLKIIAPNSIGFGKESERSMTMTKSIRDDIPSTQGNLVKWALDNGYSPITSYTMAPVANRFHLRLENNEEMGDEEVHTIPPELRILLDPGALPALQNPPIRGGEGQNGGLPFPFPDISRRVWNEEGEDGLPRPKDPVIPSIQLFPGLREPEEVQGSVDIALSVKCDNEKMIVAVEKDSFQASGYSGMDVTLLDPTCKAKMNGTHFVLESPLNGCGTRPRWSALDGVVYYNSIVIQVPALGDSSGWPDGYEDLESGDNGFPGDMDEGDASLFTRPEIVVFNCSLQQVRNPSSFQEQPHGNITFNMELYNTDLFLVPSQGVFSVPENGHVYVEVSVTKAEQELGFAIQTCFISPYSNPDRMSHYTIIENICPKDESVKFYSPKRVHFPIPQADMDKKRFSFVFKPVFNTSLLFLQCELTLCTKMEKHPQKLPKCVPPDEACTSLDASIIWAMMQNKKTFTKPLAVIHHEAESKEKGPSMKEPNPISPPIFHGLDTLTVMGIAFAAFVIGALLTGALWYIYSHTGETAGRQQVPTSPPASENSSAAHSIGSTQSTPCSSSSTA

SEQ ID NO: 13186 - protein, 850 aa, Homo sapiens; identical to SEQ ID NO: 13185

SEQ ID NO: 13187 - protein, 851 aa, Homo sapiens; identical to SEQ ID NO: 13184

SEQ ID NO: 13188 - protein, 49 aa, Homo sapiens
MTSHYVIAIFALMSSCLATAGWSAMARSWLTATSASRVQAILLPQPPEY

SEQ ID NO: 13189 - protein, 94 aa, Homo sapiens
MGLAWGLGVLFLMHVCGTNRIPESGGDNSVFDIFELTGAARKGSGRRLVKGPDPSSPAFRIEDANLIPPVPDDKFQDLVDAVRAEKGFLLLASL

SEQ ID NO: 13190 - protein, 1170 aa, Homo sapiens
MGLAWGLGVLFLMHVCGTNRIPESGGDNSVFDIFELTGAARKGSGRRLVKGPDPSSPAFRIEDANLIPPVPDDKFQDLVDAVRAEKGFLLLASLRQMKKTRGTLLALERKDHSGQVFSVVSNGKAGTLDLSLTVQGKQHVVSVEEALLATGQWKSITLFVQEDRAQLYIDCEKMENAELDVPIQSVFTRDLASIARLRIAKGGVNDNFQGVLQNVRFVFGTTPEDILRNKGCSSSTSVLLTLDNNVVNGSSPAIRTNYIGHKTKDLQAICGISCDELSSMVLELRGLRTIVTTLQDSIRKVTEENKELANELRRPPLCYHNGVQYRNNEEWTVDSCTECHCQNSVTICKKVSCPIMPCSNATVPDGECCPRCWPSDSADDGWSPWSEWTSCSTSCGNGIQQRGRSCDSLNNRCEGSSVQTRTCHIQECDKRFKQDGGWSHWSPWSSCSVTCGDGVITRIRLCNSPSPQMNGKPCEGEARETKACKKDACPINGGWGPWSPWDICSVTCGGGVQKRSRLCNNPTPQFGGKDCVGDVTENQICNKQDCPIDGCLSNPCFAGVKCTSYPDGSWKCGACPPGYSGNGIQCTDVDECKEVPDACFNHNGEHRCENTDPGYNCLPCPPRFTGSQPFGQGVEHATANKQVCKPRNPCTDGTHDCNKNAKCNYLGHYSDPMYRCECKPGYAGNGIICGEDTDLDGWPNENLVCVANATYHCKKDNCPNLPNSGQEDYDKDGIGDACDDDDDNDKIPDDRDNCPFHYNPAQYDYDRDDVGDRCDNCPYNHNPDQADTDNNGEGDACAADIDGDGILNERDNCQYVYNVDQRDTDMDGVGDQCDNCPLEHNPDQLDSDSDRIGDTCDNNQDIDEDGHQNNLDNCPYVPNANQADHDKDGKGDACDHDDDNDGIPDDKDNCRLVPNPDQKDSDGDGRGDACKDDFDHDSVPDIDDICPENVDISETDFRRFQMIPLDPKGTSQNDPNWVVRHQGKELVQTVNCDPGLAVGYDEFNAVDFSGTFFINTERDDDYAGFVFGYQSSSRFYVVMWKQVTQSYWDTNPTRAQGYSGLSVKVVNSTTGPGEHLRNALWHTGNTPGQVRTLWHDPRHIGWKDFTAYRWRLSHRPKTGFIRVVMYEGKKIMADSGPIYDKTYAGGRLGLFVFSQEMVFFSDLKYECRDP

SEQ ID NO: 13191 - protein, 83 aa, Homo sapiens
MVWRLVLLALWVWPSTQAGHQDKDTTFDLFSISNINRKTIGAKQFRGPDPGVPAYRFVRFDYIPPVNADDLSKITKIMRQKEG

SEQ ID NO: 13192 - protein, 1172 aa, Homo sapiens
MVWRLVLLALWVWPSTQAGHQDKDTTFDLFSISNINRKTIGAKQFRGPDPGVPAYRFVRFDYIPPVNADDLSKITKIMRQKEGFFLTAQLKQDGKSRGTLLALEGPGLSQRQFEIVSNGPADTLDLTYWIDGTRHVVSLEDVGLADSQWKNVTVQVAGETYSLHVGCDLIDSFALDEPFYEHLQAEKSRMYVAKGSARESHFRGLLQNVHLVFENSVEDILSKKGCQQGQGAEINAISENTETLRLGPHVTTEYVGPSSERRPEVCERSCEELGNMVQELSGLHVLVNQLSENLKRVSNDNQFLWELIGGPPKTRNMSACWQDGRFFAENETWVVDSCTTCTCKKFKTICHQITCPPATCASPSFVEGECCPSCLHSVDGEEGWSPWAEWTQCSVTCGSGTQQRGRSCDVTSNTCLGPSIQTRACSLSKCDTRIRQDGGWSHWSPWSSCSVTCGVGNITRIRLCNSPVPQMGGKNCKGSGRETKACQGAPCPIDGRWSPWSPWSACTVTCAGGIRERTRVCNSPEPQYGGKACVGDVQERQMCNKRSCPVDGCLSNPCFPGAQCSSFPDGSWSCGSCPVGFLGNGTHCEDLDECALVPDICFSTSKVPRCVNTQPGFHCLPCPPRYRGNQPVGVGLEAAKTEKQVCEPENPCKDKTHNCHKHAECIYLGHFSDPMYKCECQTGYAGDGLICGEDSDLDGWPNLNLVCATNATYHCIKDNCPHLPNSGQEDFDKDGIGDACDDDDDNDGVTDEKDNCQLLFNPRQADYDKDEVGDRCDNCPYVHNPAQIDTDNNGEGDACSVDIDGDDVFNERDNCPYVYNTDQRDTDGDGVGDHCDNCPLVHNPDQTDVDNDLVGDQCDNNEDIDDDGHQNNQDNCPYISNANQADHDRDGQGDACDPDDDNDGVPDDRDNCRLVFNPDQEDLDGDGRGDICKDDFDNDNIPDIDDVCPENNAISETDFRNFQMVPLDPKGTTQIDPNWVIRHQGKELVQTANSDPGIAVGFDEFGSVDFSGTFYVNTDRDDDYAGFVFGYQSSSRFYVVMWKQVTQTYWEDQPTRAYGYSGVSLKVVNSTTGTGEHLRNALWHTGNTPGQVRTLWHDPRNIGWKDYTAYRWHLTHRPKTGYIRVLVHEGKQVMADSGPIYDQTYAGGRLGLFVFSQEMVYFSDLKYECRDI

SEQ ID NO: 13193 - protein, 1172 aa, Homo sapiens; identical to SEQ ID NO: 13192

SEQ ID NO: 13194 - protein, 485 aa, Homo sapiens
MDNNKHCKQDNCLLTPNSGQEDADNDGVGDQCDDDADGDGIKNVEDNCRLFPNKDQQNSDTDSFGDACDNCPNVPNNDQKDTDGNGEGDACDNDVDGDGIPNGLDNCPKVPNPLQTDRDEDGVGDACDSCPEMSNPTQTDADSDLVGDVCDTNEDSDGDGHQDTKDNCPQLPNSSQLDSDNDGLGDECDGDDDNDGIPDYVPPGPDNCRLVPNPNQKDSDGNGVGDVCEDDFDNDAVVDPLDVCPESAEVTLTDFRAYQTVVLDPEGDAQIDPNWVVLNQGMEIVQTMNSDPGLAVGYTAFNGVDFEGTFHVNTVTDDDYAGFLFSYQDSGRFYVVMWKQTEQTYWQATPFRAVAQPGLQLKAVTSVSGPGEHLRNALWHTGHTPDQVRLLWTDPRNVGWRDKTSYRWQLLHRPQVGYIRVKLYEGPQLVADSGVIIDTSMRGGRLGVFCFSQENIIWSNLQYRCNDTVPEDFEPFRRQLLQGRV

SEQ ID NO: 13195 - protein, 947 aa, Homo sapiens
METQELRGALALLLLCFFTSASQDLQVIDLLTVGESRQMVAVAEKIRTALLTAGDIYLLSTFRLPPKQGGVLFGLYSRQDNTRWLEASVVGKINKVLVRYQREDGKVHAVNLQQAGLADGRTHTVLLRLRGPSRPSPALHLYVDCKLGDQHAGLPALAPIPPAEVDGLEIRTGQKAYLRMQGFVESMKIILGGSMARVGALSECPFQGDESIHSAGEQTKALVTQLTLFNQILVELRDDIRDQVKEMSLIRNTIMECQVCGFHEQRSHCSPNPCFRGVDCMEVYEYPGYRCGPCPPGLQGNGTHCSDINECAHADPCFPGSSCINTMPGFHCEACPRGYKGTQVSGVGIDYARASKQVCNDIDECNDGNNGGCDPNSICTNTVGSFKCGPCRLGFLGNQSQGCLPARTCHSPAHSPCHIHAHCLFERNGAVSCQCNVGWAGNGNVCGTDTDIDGYPDQALPCMDNNKHCKQDNCLLTPNSGQEDADNDGVGDQCDDDADGDGIKNVEDNCRLFPNKDQQNSDTDSFGDACDNCPNVPNNDQKDTDGNGEGDACDNDVDGDGIPNGLDNCPKVPNPLQTDRDEDGVGDACDSCPEMSNPTQTDADSDLVGDVCDTNEDSDGDGHQDTKDNCPQLPNSSQLDSDNDGLGDECDGDDDNDGIPDYVPPGPDNCRLVPNPNQKDSDGNGVGDVCEDDFDNDAVVDPLDVCPESAEVTLTDFRAYQTVVLDPEGDAQIDPNWVVLNQGMEIVQTMNSDPGLAVGYTAFNGVDFEGTFHVNTVTDDDYAGFLFSYQDSGRFYVVMWKQTEQTYWQATPFRAVAQPGLQLKAVTSVSGPGEHLRNALWHTGHTPDQVRLLWTDPRNVGWRDKTSYRWQLLHRPQVGYIRVKLYEGPQLVADSGVIIDTSMRGGRLGVFCFSQENIIWSNLQYRCNDTVPEDFEPFRRQLLQGRV

SEQ ID NO: 13196 - protein, 956 aa, Homo sapiens
METQELRGALALLLLCFFTSASQDLQVIDLLTVGESRQMVAVAEKIRTALLTAGDIYLLSTFRLPPKQGGVLFGLYSRQDNTRWLEASVVGKINKVLVRYQREDGKVHAVNLQQAGLADGRTHTVLLRLRGPSRPSPALHLYVDCKLGDQHAGLPALAPIPPAEVDGLEIRTGQKAYLRMQGFVESMKIILGGSMARVGALSECPFQGDESIHSAVTNALHSILGEQTKALVTQLTLFNQILVELRDDIRDQVKEMSLIRNTIMECQVCGFHEQRSHCSPNPCFRGVDCMEVYEYPGYRCGPCPPGLQGNGTHCSDINECAHADPCFPGSSCINTMPGFHCEACPRGYKGTQVSGVGIDYARASKQVCNDIDECNDGNNGGCDPNSICTNTVGSFKCGPCRLGFLGNQSQGCLPARTCHSPAHSPCHIHAHCLFERNGAVSCQCNVGWAGNGNVCGTDTDIDGYPDQALPCMDNNKHCKQDNCLLTPNSGQEDADNDGVGDQCDDDADGDGIKNVEDNCRLFPNKDQQNSDTDSFGDACDNCPNVPNNDQKDTDGNGEGDACDNDVDGDGIPNGLDNCPKVPNPLQTDRDEDGVGDACDSCPEMSNPTQTDADSDLVGDVCDTNEDSDGDGHQDTKDNCPQLPNSSQLDSDNDGLGDECDGDDDNDGIPDYVPPGPDNCRLVPNPNQKDSDGNGVGDVCEDDFDNDAVVDPLDVCPESAEVTLTDFRAYQTVVLDPEGDAQIDPNWVVLNQGMEIVQTMNSDPGLAVGYTAFNGVDFEGTFHVNTVTDDDYAGFLFSYQDSGRFYVVMWKQTEQTYWQATPFRAVAQPGLQLKAVTSVSGPGEHLRNALWHTGHTPDQVRLLWTDPRNVGWRDKTSYRWQLLHRPQVGYIRVKLYEGPQLVADSGVIIDTSMRGGRLGVFCFSQENIIWSNLQYRCNDTVPEDFEPFRRQLLQGRV

SEQ ID NO: 13197 - protein, 400 aa, Homo sapiens
METQELRGALALLLLCFFTSASQDLQVIDLLTVGESRQMVAVAEKIRTALLTAGDIYLLSTFRLPPKQGGVLFGLYSRQDNTRWLEASVVGKINKVTNALHSILGEGNVPDPKHHYGVSGFHEQRSHCSPNPCFRGVDCMEVYEYPGYRCGPCPPGLQGNGTHCSDINECAHADPCFPGSSCINTMPGFHCEACPRGYKGTQVSGVGIDYARASKQVCNDIDECNDGNNGGCDPNSICTNTVGSFKCGPCRLGFLGNQSQGCLPARTCHSPAHSPCHIHAHCLFERNGAVSCQCNVGWAGNGNVCGTDTDIDGYPDQALPCMDNNKHCKQDNCLLTPNSGQEDADNDGVGDQCDDDADGDGIKNVEASPMDWTIALKSPTHYRQTGMRTGWEMLATAALK

SEQ ID NO: 13198 - protein, 836 aa, Homo sapiens
METQELRGALALLLLCFFTSASQDLQVIDLLTVGESRQMVAVAEKIRTALLTAGDIYLLSTFRLPPKQGGVLFGLYSRQDNTRWLEASVVGKINKVTNALHSILGEQTKALVTQLTLFNQILVELRDDIRDQVKEMSLIRNTIMECQVCGFHEQRSHCSPNPCFRGVDCMEVYEYPGYRCGPCPPGLQGNGTHCSDINECAHADPCFPGSSCINTMPGFHCEACPRGYKGTQVSGVGIDYARASKQVCNDIDECNDGNNGGCDPNSICTNTVGSFKCGPCRLGFLGNQSQGCLPARTCHSPAHSPCHIHAHCLFERNGAVSCQCNVGWAGNGNVCGTDTDIDGYPDQALPCMDNNKHCKQDNCLLTPNSGQEDADNDGVGDQCDDDADGDGIKNVEDNCRLFPNKDQQNSDTDSFGDACDNCPNVPNNDQKDTDGNGEGDACDNDVDGDGIPNGLDNCPKVPNPLQTDRDEDGVGDACDSCPEMSNPTQTDADSDLVGDVCDTNEDSDGDGHQDTKDNCPQLPNSSQLDSDNDGLGDECDGDDDNDGIPDYVPPGPDNCRLVPNPNQKDSDGNGVGDVCEDDFDNDAVVDPLDVCPESAEVTLTDFRAYQTVVLDPEGDAQIDPNWVVLNQGMEIVQTMNSDPGLAVGYTAFNGVDFEGTFHVNTVTDDDYAGFLFSYQDSGRFYVVMWKQTEQTYWQATPFRAVAQPGLQLKAVTSVSGPGEHLRNALWHTGHTPDQVRLLWTDPRNVGWRDKTSYRWQLLHRPQVGYIRVKLYEGPQLVADSGVIIDTSMRGGRLGVFCFSQENIIWSNLQYRCNDTVPEDFEPFRRQLLQGRV

SEQ ID NO: 13199 - protein, 870 aa, Homo sapiens
MGRLNKAILRYLKNDGKVHLVVFNNLQLADGRRHRILLRLSNLQRGAGSLELYLDCIQVDSVHNLPRAFAGPSQKPETIELRTFQRKPQDFLEELKLVVRGSLFQVASLQDCFLQQSEPLAATGTGDFNRQFLGQMTQLNQLLGEVKDLLRQQVKETSFLRNTIAECQACGPLKFQSPTPSTVVPPAPPAPPTRPPRRCDSNPCFRGVQCTDSRDGFQCGPCPEGYTGNGITCIDVDECKYHPCYPGVHCINLSPGFRCDACPVGFTGPMVQGVGISFAKSNKQVCTDIDECRNGACVPNSICVNTLGSYRCGPCKPGYTGDQIRGCKAERNCRNPELNPCSVNAQCIEERQGDVTCVCGVGWAGDGYICGKDVDIDSYPDEELPCSARNCKKDNCKYVPNSGQEDADRDGIGDACDEDADGDGILNEQDNCVLIHNVDQRNSDKDIFGDACDNCLSVLNNDQKDTDGDGRGDACDDDMDGDGIKNILDNCPKFPNRDQRDKDGDGVGDACDSCPDVSNPNQSDVDNDLVGDSCDTNQDSDGDGHQDSTDNCPTVINSAQLDTDKDGIGDECDDDDDNDGIPDLVPPGPDNCRLVPNPAQEDSNSDGVGDICESDFDQDQVIDRIDVCPENAEVTLTDFRAYQTVVLDPEGDAQIDPNWVVLNQGMEIVQTMNSDPGLAVGYTAFNGVDFEGTFHVNTQTDDDYAGFIFGYQDSSSFYVVMWKQTEQTYWQATPFRAVAEPGIQLKAVKSKTGPGEHLRNSLWHTGDTSDQVRLLWKDSRNVGWKDKVSYRWFLQHRPQVGYIRVRFYEGSELVADSGVTIDTTMRGGRLGVFCFSQENIIWSNLKYRCNDTIPEDFQEFQTQNFDRFDN

SEQ ID NO: 13200 - protein, 961 aa, Homo sapiens
MLAPRGAAVLLLHLVLQRWLAAGAQATPQVFDLLPSSSQRLNPGALLPVLTDPALNDLYVISTFKLQTKSSATIFGLYSSTDNSKYFEFTVMGRLNKAILRYLKNDGKVHLVVFNNLQLADGRRHRILLRLSNLQRGAGSLELYLDCIQVDSVHNLPRAFAGPSQKPETIELRTFQRKPQDFLEELKLVVRGSLFQVASLQDCFLQQSEPLAATGTGDFNRQFLGQMTQLNQLLGEVKDLLRQQVKETSFLRNTIAECQACGPLKFQSPTPSTVVPPAPPAPPTRPPRRCDSNPCFRGVQCTDSRDGFQCGPCPEGYTGNGITCIDVDECKYHPCYPGVHCINLSPGFRCDACPVGFTGPMVQGVGISFAKSNKQVCTDIDECRNGACVPNSICVNTLGSYRCGPCKPGYTGDQIRGCKAERNCRNPELNPCSVNAQCIEERQGDVTCVCGVGWAGDGYICGKDVDIDSYPDEELPCSARNCKKDNCKYVPNSGQEDADRDGIGDACDEDADGDGILNEQDNCVLIHNVDQRNSDKDIFGDACDNCLSVLNNDQKDTDGDGRGDACDDDMDGDGIKNILDNCPKFPNRDQRDKDGDGVGDACDSCPDVSNPNQSDVDNDLVGDSCDTNQDSDGDGHQDSTDNCPTVINSAQLDTDKDGIGDECDDDDDNDGIPDLVPPGPDNCRLVPNPAQEDSNSDGVGDICESDFDQDQVIDRIDVCPENAEVTLTDFRAYQTVVLDPEGDAQIDPNWVVLNQGMEIVQTMNSDPGLAVGYTAFNGVDFEGTFHVNTQTDDDYAGFIFGYQDSSSFYVVMWKQTEQTYWQATPFRAVAEPGIQLKAVKSKTGPGEHLRNSLWHTGDTSDQVRLLWKDSRNVGWKDKVSYRWFLQHRPQVGYIRVRFYEGSELVADSGVTIDTTMRGGRLGVFCFSQENIIWSNLKYRCNDTIPEDFQEFQTQNFDRFDN

SEQ ID NO: 13201 - protein, 57 aa, Homo sapiens
HDGKMLASASEDHFIDIAEVETVQQTHSASQKAAGPLAKRPVCSIVIIPPSLLPFES

SEQ ID NO: 13202 - protein, 105 aa, Homo sapiens
MAVPAAAMGPSALGQSGPGSMAPWCSVSSGPSRYVLGMQELFRGHSKTREFLAHSAKVHSVAWSCDGRRLASGSFDKTASVFLLEKDRLGRTLISAGVLMGRPLL

SEQ ID NO: 13203 - protein, 105 aa, Homo sapiens; identical to SEQ ID NO: 13202

SEQ ID NO: 13204 - protein, 351 aa, Homo sapiens
MAVPAAAMGPSALGQSGPGSMAPWCSVSSGPSRYVLGMQELFRGHSKTREFLAHSAKVHSVAWSCDGRRLASGSFDKTASVFLLEKDRLVKENNYRGHGDSVDQLCWHPSNPDLFVTASGDKTIRIWDVRTTKCIATVNTKGENINICWSPDGQTIAVGNKDDVVTFIDAKTHRSKAEEQFKFEVNEISWNNDNNMFFLTNGNGCINILSYPELKPVQSINAHPSNCICIKFDPMGKYFATGSADALVSLWDVDELVCVRCFSRLDWPVRTLSFSHDGKMLASASEDHFIDIAEVETGDKLWEVQCESPTFTVAWHPKRPLLAFACDDKDGKYDSSREAGTVKLFGLPNDS

SEQ ID NO: 13205 - protein, 327 aa, Homo sapiens
MAVPAAAMGPSALGQSGPGSMAPWCSVSSGPSRYVLGMQELFRGHSKTREFLAHSAKVHSVAWSCDGRRLASGSFDKTASVFLLEKDRLVKENNYRGHGDSVDQLCWHPSNPDLFVTASGDKTIRIWDVRTTKCIATVNTKGENINICWSPDGQTIAVGNKDDVVTFIDAKTHRSKAEEQFKFEVNEISWNNDNNMFFLTNGNGCINILSYPELKPVQSINAHPSNCICIKFDPMGKYFATGSADALVSLWDVDELVCVRCFSRLDWPVRTLSFSHDGKMLASASEDHFIDIAEVETGNFMRIYRLSPLAVRTSLVISSLHVTTSPA

SEQ ID NO: 13206 - protein, 166 aa, Homo sapiens
MAWLCGSLPVVVAVTAMETAARQECYPELKPVQSINAHPSNCICIKFDPMGKYFATGSADALVSLWDVDELVCVRCFSRLDWPVRTLSFSHDGKMLASASEDHFIDIAEVETGDKLWEVQCESPTFTVAWHPKRPLLAFACDDKDGKYDSSREAGTVKLFGLPNDS

SEQ ID NO: 13207 - protein, 13 aa, Homo sapiens
VAVTAMETAARQE

SEQ ID NO: 13208 - protein, 55 aa, Homo sapiens
VVVAVTAMETAARQEWSKKTIIGDMGIVWTSFVGIQVILTYLLRRPEIKPFASGM

SEQ ID NO: 13209 - protein, 56 aa, Homo sapiens
  SITE 1: note = misc_feature - Xaa can be any naturally occurring amino acid
XQSINAHPSNCICIKFDPMGKYFATGSADALVSLWDVDELVCVRCFSRGQTMGGTV

SEQ ID NO: 13210 - protein, 75 aa, Homo sapiens
  SITE 1: note = misc_feature - Xaa can be any naturally occurring amino acid
XVSLWDVDELVCVRCFSRLDWPVRTLSFSHDGKMLASASEDHFIDIAEVETDRVSFCHPAWCAVVQAILLPQPPK

SEQ ID NO: 13211 - protein, 349 aa, Homo sapiens
MELTELLLVVMLLLTARLTLSSPAPPACDLRVLSKLLRDSHVLHSRLSQCPEVHPLPTPVLLPAVDFSLGEWKTQMEETKAQDILGAVTLLLEGVMAARGQLGPTCLSSLLGQLSGQVRLLLGALQSLLGTQGRTTAHKDPNAIFLSFQHLLRGKVRFLMLVGGSTLCVRRAPPTTAVPSRTSLVLTLNELPNRTSGLLETNFTASARTTGSGLLKWQQGFRAKIPGLLNQTSRSLDQIPGYLNRIHELLNGTRGLFPGPSRRTLGAPDISSGTSDTGSLPPNLQPGYSPSPTHPPTGQYTLFPLPPTLPTPVVQLHPLLPDPSAPTPTPTSPLLNTSYTHSQNLSQEG

SEQ ID NO: 13212 - protein, 286 aa, Homo sapiens
MELTELLLVVMLLLTARLTLSSPAPPACDLRVLSKLLRDSHVLHSRLSQCPEVHPLPTPVLLPAVDFSLGEWKTQMEETKAQDILGAVTLLLEGVMAARGQLGPTCLSSLLGQLSGQVRLLLGALQSLLGTQLPPQGRTTAHKDPNAIFLSFQHLLRGKDFWIVGDKLHCLSQNYWLWASEVAAGIQSQDSWSAEPNLQVPGPNPRIPEQDTRTLEWNSWTLSWTLTQDPRSPGHFLRNIRHRLPATQPPAWIFSFPNPSSYWTVYALPSSTHLAHPCGPAPPPAS

SEQ ID NO: 13213 - protein, 353 aa, Homo sapiens
MELTELLLVVMLLLTARLTLSSPAPPACDLRVLSKLLRDSHVLHSRLSQCPEVHPLPTPVLLPAVDFSLGEWKTQMEETKAQDILGAVTLLLEGVMAARGQLGPTCLSSLLGQLSGQVRLLLGALQSLLGTQLPPQGRTTAHKDPNAIFLSFQHLLRGKVRFLMLVGGSTLCVRRAPPTTAVPSRTSLVLTLNELPNRTSGLLETNFTASARTTGSGLLKWQQGFRAKIPGLLNQTSRSLDQIPGYLNRIHELLNGTRGLFPGPSRRTLGAPDISSGTSDTGSLPPNLQPGYSPSPTHPPTGQYTLFPLPPTLPTPVVQLHPLLPDPSAPTPTPTSPLLNTSYTHSQNLSQEG

SEQ ID NO: 13214 - protein, 353 aa, Homo sapiens; identical to SEQ ID NO: 13213

SEQ ID NO: 13215 - protein, 353 aa, Homo sapiens; identical to SEQ ID NO: 13213

SEQ ID NO: 13216 - protein, 12 aa, Homo sapiens
  SITE 1: note = misc_feature - Xaa can be any naturally occurring amino acid
XQSLLGTQTREA

SEQ ID NO: 13217 - protein, 219 aa, Homo sapiens
MFVSYLILTLLHVQTAVLARPGGESIGCDDYLGSDKVVDKCGVCGGDNTGCQVVSGVFKHALTSLGYHRVVEIPEGATKINITEMYKSNKKKSHLKPATRGSQFSSVKVCSVPAACKLLGTPGRARQPVPAPRELEHDKNSPHCAYLSLYLTSLAQSSWRVFSLFSYVLIYLFSKYLAFNTLFALKRMALQRDRKEKTRAWCIFIKLCGREIQILPGPV

SEQ ID NO: 13218 - protein, 658 aa, Homo sapiens
MFVSYLILTLLHVQTAVLARPGGESIGCDDYLGSDKVVDKCGVCGGDNTGCQVVSGVFKHALTSLGYHRVVEIPEGATKINITEMYKSNNYLALRSRSGRSIINGNWAIDRPGKYEGGGTMFTYKRPNEISSTAGESFLAEGPTNEILDVYMIHQQPNPGVHYEYVIMGTNAISPQVPPHRRPGEPFNGQMVTEGRSQEEGEQKGRNEEKEDLRGEAPEMFTSESAQTFPVRHPDRFSPHRPDNLVPPAPQPPRRSRDHNWKQLGTTECSTTCGKGSQYPIFRCVHRSTHEEAPESYCDSSMKPTPEEEPCNIFPCPAFWDIGEWSECSKTCGLGMQHRQVLCRQVYANRSLTVQPYRCQHLEKPETTSTCQLKICSEWQIRTDWTSCSVPCGVGQRTRDVKCVSNIGDVVDDEECNMKLRPNDIENCDMGPCAKSWFLTEWSERCSAECGAGVRTRSVVCMTNHVSSLPLEGCGNNRPAEATPCDNGPCTGKVEWFAGSWSQCSIECGSGTQQREVICVRKNADTFEVLDPSECSFLEKPPSQQSCHLKPCGAKWFSTEWSMCSKSCQGGFRVREVRCLSDDMTLSNLCDPQLKPEERESCNPQDCVPEVDENCKDKYYNCNVVVQARLCVYNYYKTACCASCTRVANRQTGFLGSR

SEQ ID NO: 13219 - protein, 101 aa, Homo sapiens
MVSHFMGSLSVLCFLLLLGFQFVCPQPSTQHRKVPQRMAAEGAPEDDGGGGAPGVWGAWGPWSACSRSCSGGVMEQTRPCLPRSYRLRGGQRPGAPARAFA

SEQ ID NO: 13220 - protein, 1018 aa, Homo sapiens
MVSHFMGSLSVLCFLLLLGFQFVCPQPSTQHRKVPQRMAAEGAPEDDGGGGAPGVWGAWGPWSACSRSCSGGVMEQTRPCLPRSYRLRGGQRPGAPARAFADHVVSAVRTSVPLHRSRDETPALAGTDASRQGPTVLRGSRHPQPQGLEVTGDRRSRTRGTIGPGKYGYGKAPYILPLQTDTAHTPQRLRRQKLSSRHSRSQGASSARHGYSSPAHQVPQHGPLYQSDSGPRSGLQAAEAPIYQLPLTHDQGYPAASSLFHSPETSNNHGVGTHGATQSFSQPARSTAISCIGAYRQYKLCNTNVCPESSRSIREVQCASYNNKPFMGRFYEWEPFAEVKGNRKCELNCQAMGYRFYVRQAEKVIDGTPCDQNGTAICVSGQCKSIGCDDYLGSDKVVDKCGVCGGDNTGCQVVSGVFKHALTSLGYHRVVEIPEGATKINITEMYKSNNYLALRSRSGRSIINGNWAIDRPGKYEGGGTMFTYKRPNEISSTAGESFLAEGPTNEILDVYMIHQQPNPGVHYEYVIMGTNAISPQVPPHRRPGEPFNGQMVTEGRSQEEGEQKGRNEEKEDLRGEAPEMFTSESAQTFPVRHPDRFSPHRPDNLVPPAPQPPRRSRDHNWKQLGTTECSTTCGKGSQYPIFRCVHRSTHEEAPESYCDSSMKPTPEEEPCNIFPCPAFWDIGEWSECSKTCGLGMQHRQVLCRQVYANRSLTVQPYRCQHLEKPETTSTCQLKICSEWQIRTDWTSCSVPCGVGQRTRDVKCVSNIGDVVDDEECNMKLRPNDIENCDMGPCAKSWFLTEWSERCSAECGAGVRTRSVVCMTNHVSSLPLEGCGNNRPAEATPCDNGPCTGKVEWFAGSWSQCSIECGSGTQQREVICVRKNADTFEVLDPSECSFLEKPPSQQSCHLKPCGAKWFSTEWSMCSKSCQGGFRVREVRCLSDDMTLSNLCDPQLKPEERESCNPQDCVPEVDENCKDKYYNCNVVVQARLCVYNYYKTACCASCTRVANRQTGFLGSR

SEQ ID NO: 13221 - protein, 37 aa, Homo sapiens
MNLAISIALLLTGLPRAEGDQPNGLPSGPEPSSGLPP

SEQ ID NO: 13222 - protein, 144 aa, Homo sapiens
MNLAISIALLLTVDQSLRLDCRHENTSSSPIQYEFSLTRETKKHVLFGTVGVPEHTYRSRTNFTSKYNMKVLYLSAFTSKDEGTYTCALHHSGHSPPISSQNVTVLRDKLVKCEGISLLAQNTSWLLLLLLSLSLLQATDFMSL

SEQ ID NO: 13223 - protein, 153 aa, Homo sapiens
MNLAISIALLLTVLQVSRGQKVTSLTACLVDQSLRLDCRHENTSSSPIQYEFSLTRETKKHVLFGTVGVPEHTYRSRTNFTSKYNMKVLYLSAFTSKDEGTYTCALHHSGHSPPISSQNVTVLRDKLVKCEGISLLAQNTSWLLLLLLSLSLL

SEQ ID NO: 13224 - protein, 161 aa, Homo sapiens
MNLAISIALLLTVLQVSRGQKVTSLTACLVDQSLRLDCRHENTSSSPIQYEFSLTRETKKHVLFGTVGVPEHTYRSRTNFTSKYNMKVLYLSAFTSKDEGTYTCALHHSGHSPPISSQNVTVLRDKLVKCEGISLLAQNTSWLLLLLLSLSLLQATDFMSL

SEQ ID NO: 13225 - protein, 161 aa, Homo sapiens; identical to SEQ ID NO: 13224

SEQ ID NO: 13226 - protein, 165 aa, Homo sapiens
MNLAISIALLLTVLQVSRGQKVTSLTACLVDQSLRLDCRHENTSSSPIQYEFSLTRETKKHVLFGTVGVPEHTYRSRTNFTSKYNMKVLYLSAFTSKDEGTYTCALHHSGHSPPISSQNVTVLRGHGFHVPVTGGAHGGDRKPQVPVQRSYFSESADPLPPIPQT

SEQ ID NO: 13227 - protein, 1138 aa, Homo sapiens
MVWRVPPFLLPILFLASHVGAAVDLTLLANLRLTDPQRFFLTCVSGEAGAGRGSDAWGPPLLLEKDDRIVRTPPGPPLRLARNGSHQVTLRGFSKPSDLVGVFSCVGGAGARRTRVIYVHNSPGAHLLPDKVTHTVNKGDTAVLSARVHKEKQTDVIWKSNGSYFYTLDWHEAQDGRFLLQLPNVQPPSSGIYSATYLEASPLGSAFFRLIVRGCGAGRWGPGCTKECPGCLHGGVCHDHDGECVCPPGFTGTRCEQACREGRFGQSCQEQCPGISGCRGLTFCLPDPYGCSCGSGWRGSQCQEACAPGHFGADCRLQCQCQNGGTCDRFSGCVCPSGWHGVHCEKSDRIPQILNMASELEFNLETMPRINCAAAGNPFPVRGSIELRKPDGTVLLSTKAIVEPEKTTAEFEVPRLVLADSGFWECRVSTSGGQDSRRFKVNVKVPPVPLAAPRLLTKQSRQLVVSPLVSFSGDGPISTVRLHYRPQDSTMDWSTIVVDPSENVTLMNLRPKTGYSVRVQLSRPGEGGEGAWGPPTLMTTDCPEPLLQPWLEGWHVEGTDRLRVSWSLPLVPGPLVGDGFLLRLWDGTRGQERRENVSSPQARTALLTGLTPGTHYQLDVQLYHCTLLGPASPPAHVLLPPSGPPAPRHLHAQALSDSEIQLTWKHPEALPGPISKYVVEVQVAGGAGDPLWIDVDRPEETSTIIRGLNASTRYLFRMRASIQGLGDWSNTVEESTLGNGLQAEGPVQESRAAEEGLDQQLILAVVGSVSATCLTILAALLTLVCIRRSCLHRRRTFTYQSGSGEETILQFSSGTLTLTRRPKLQPEPLSYPVLEWEDITFEDLIGEGNFGQVIRAMIKKDGLKMNAAIKMLKEYASENDHRDFAGELEVLCKLGHHPNIINLLGACKNRGYLYIAIEYAPYGNLLDFLRKSRVLETDPAFAREHGTASTLSSRQLLRFASDAANGMQYLSEKQFIHRDLAARNVLVGENLASKIADFGLSRGEEVYVKKTMGRLPVRWMAIESLNYSVYTTKSDVWSFGVLLWEIVSLGGTPYCGMTCAELYEKLPQGYRMEQPRNCDDEVYELMRQCWRDRPYERPPFAQIALQLGRMLEARKAYVNMSLFENFTYAGIDATAEEA

SEQ ID NO: 13228 - protein, 379 aa, Homo sapiens
MVWRVPPFLLPILFLASHVGAAVDLTLLANLRLTDPQRFFLTCVSGEAGAGRGSDAWGPPLLLEKDDRIVRTPPGPPLRLARNGSHQVTLRGFSKPSDLVGVFSCVGGAGARRTRVIYVHNSPGAHLLPDKVTHTVNKGDTAVLSARVHKEKQTDVIWKSNGSYFYTLDWHEAQDGRFLLQLPNVQPPSSGIYSATYLEASPLGSAFFRLIVRGCGAGRWGPGCTKECPGCLHGGVCHDHDGECVCPPGFTGTRCEQACREGRFGQSCQEQCPGISGCRGLTFCLPDPYGCSCGSGWRGSQCQEACAPGHFGADCRLQCQCQNGGTCDRFSGCVCPSGWHGVHCEKSGWRDWVDTSTEKQNTDEGRFGGHVSAPVGAPG

SEQ ID NO: 13229 - protein, 71 aa, Homo sapiens
MEVPPPAPRSFLCRALCLFPRVFAAEAVTADSEVLEERQKRLPYVPEPYYPESGWDRLRELFGKDCHGKSF

SEQ ID NO: 13230 - protein, 175 aa, Homo sapiens
MEVPPPAPRSFLCRALCLFPRVFAAEAVTADSEVLEERQKRLPYVPEPYYPESGWDRLRELFGKDEQQRISKDLANICKTAATAGIIGWVYGGIPAFIHAKQQYIEQSQAEIYHNRFDAVQSAHRAATRGFIRYGWRWGWRTAVFVTIFNTVNTSLNVYRNKDALSHFVIAGALL

SEQ ID NO: 13231 - protein, 285 aa, Homo sapiens
MEVPPPAPRSFLCRALCLFPRVFAAEAVTADSEVLEERQKRLPYVPEPYYPESGWDRLRELFGKDEQQRISKDLANICKTAATAGIIGWVYGGIPAFIHAKQQYIEQSQAEIYHNRFDAVQSAHRAATRGFIRYGWRWGWRTAVFVTIFNTVNTSLNVYRNKDALSHFVIAGAVTGSLFRINVGLRGLVAGGIIGALLGTPVGGLLMAFQKYSGETVQERKQKDRKALHELKLEEWKGRLQVTEHLPEKIESSLQEDEPENDAKKIEALLNLPRNPSVIDKQDKD

SEQ ID NO: 13232 - protein, 90 aa, Homo sapiens
MEVPPPAPRSFLCRALCLFPRVFAAEAVTADSEVLEERQKRLPYVPEPYYPESGWDRLRELFGKDNLHIVLPHEASFVMAGAGVGELQCL

SEQ ID NO: 13233 - protein, 151 aa, Homo sapiens
MEVPPPAPRSFLCRALCLFPRVFAAEAVTADSEVLEERQKRLPYVPEPYYPESGWDRLRELFGKDTPVGGLLMAFQKYSGETVQERKQKDRKALHELKLEEWKGRLQVTEHLPEKIESSLQEDEPENDAKKIEALLNLPRNPSVIDKQDKD

SEQ ID NO: 13234 - protein, 150 aa, Homo sapiens
MEVPPPAPRSFLCRALCLFPRVFAAEAVTADSEVLEERQKRLPYVPEPYYPESGWDRLRELFGKDTVNTSLNVYRNKDALSHFVIAGAVTGSLFRINVGLRGLVAGGIIGALLGTPVGGLLMAFQKYSGETVQERKQKDRKALHELKLEE

SEQ ID NO: 13235 - protein, 65 aa, Homo sapiens
MEVPPPAPRSFLCRALCLFPRVFAAEAVTADSEVLEERQKRLPYVPEPYYPESGWDRLRELFGKE

SEQ ID NO: 13236 - protein, 38 aa, Homo sapiens
  SITE 1: note = misc_feature - Xaa can be any naturally occurring amino acid
XTADSEVLEERQKRLPYVPEPYYPESGWDRLRELFGKE

SEQ ID NO: 13237 - protein, 136 aa, Homo sapiens
MAPFEPLASGILLLLWLIAPSRACTCVPPHPQTAFCNSDLVIRAKFVGTPEVNQTTLYQRYEIKMTKMYKGFQALGDAADIRFVYTPAMESVCGYFHRSHNRSEEFLIAGEAPSPRPVPHQPVPGARPSNHEGARL

SEQ ID NO: 13238 - protein, 207 aa, Homo sapiens
MAPFEPLASGILLLLWLIAPSRACTCVPPHPQTAFCNSDLVIRAKFVGTPEVNQTTLYQRYEIKMTKMYKGFQALGDAADIRFVYTPAMESVCGYFHRSHNRSEEFLIAGKLQDGLLHITTCSFVAPWNSLSLAQRRGFTKTYTVGCEECTVFPCLSIPCKLQSGTHCLWTDQLLQGSEKGFQSRHLACLPREPGLCTWQSLRSQIA

SEQ ID NO: 13239 - protein, 96 aa, Homo sapiens [sequence omitted]

SEQ ID NO: 13240 - protein, 143 aa, Homo sapiens
MTKMYKGFQALGDAADIRFVYTPAMESVCGYFHRSHNRSEEFLIAGKLQDGLLHITTCSFVAPWNSLSLAQRRGFTKTYTVGCEECTVFPCLSIPCKLQSGTHCLWTDQLLQGSEKGFQSRHLACLPREPGLCTWQSLRSQIA

SEQ ID NO: 13241 - protein, 165 aa, Homo sapiens
  SITE 1: note = misc_feature - Xaa can be any naturally occurring amino acid
XPRALCHTNQSLGRGLATTRGRGSDGNGPTGNGDHPNFSLSEGRAFGSLAAQPITSCLSVPAPPFSLGKLQDGLLHITTCSFVAPWNSLSLAQRRGFTKTYTVGCEECTVFPCLSIPCKLQSGTHCLWTDQLLQGSEKGFQSRHLACLPREPGLCTWQSLRSQIA

SEQ ID NO: 13242 - protein, 143 aa, Homo sapiens
MFKGPEKDIEFIYTAPSSAVCGVSLDVGGKKEYLIAGKAEGDGKMHITLCDFIVPWDTLSTTQKKSLNHRYQMGCECKITRCPMIPCYISSPDECLWMDWVTEKNINGHQAKFFACIKRSDGSCAWYRGAAPPKQEFLDIEDP

SEQ ID NO: 13243 - protein, 143 aa, Homo sapiens; identical to SEQ ID NO: 13242

SEQ ID NO: 13244 - protein, 143 aa, Homo sapiens; identical to SEQ ID NO: 13242

SEQ ID NO: 13245 - protein, 109 aa, Homo sapiens
MFKGPEKDIEFIYTAPSSAVCGVSLDVGGKKEYLIAGKAEGDGKMHITLCDFIVPWDTLSTTQKKSLNHRYQMGCECKVSRSCLCWSIASSQCLQMDGRDFDPWLSRTR

SEQ ID NO: 13246 - protein, 220 aa, Homo sapiens
MGAAARTLRLALGLLLLATLLRPADACSCSPVHPQQAFCNADVVIRAKAVSEKEVDSGNDIYGNPIKRIQYEIKQIKMFKGPEKDIEFIYTAPSSAVCGVSLDVGGKKEYLIAGKAEGDGKMHITLCDFIVPWDTLSTTQKKSLNHRYQMGCECKITRCPMIPCYISSPDECLWMDWVTEKNINGHQAKFFACIKRSDGSCAWYRGAAPPKQEFLDIEDP

SEQ ID NO: 13247 - protein, 211 aa, Homo sapiens
MTPWLGLIVLLGSWSLGDWGAEACTCSPSHPQDAFCNSDIVIRAKVVGKKLVKEGPFGTLVYTIKQMKMYRGFTKMPHVQYIHTEASESLCGLKLEVNKYQYLLTGRVYDGKMYTGLCNFVERWDQLTLSQRKGLNYRYHLGCNCKIKSCYYLPCFVTSKNECLWTDMLSNFGYPGYQSKHYACIRQKGGYCSWYRGWAPPDKSIINATDP

SEQ ID NO: 13248 - protein, 224 aa, Homo sapiens
MPGSPRPAPSWVLLLRLLALLRPPGLGEACSCAPAHPQQHICHSALVIRAKISSEKVVPASADPADTEKMLRYEIKQIKMFKGFEKVKDVQYIYTPFDSSLCGVKLEANSQKQYLLTGQVLSDGKVFIHLCNYIEPWEDLSLVQRESLNHHYHLNCGCQITTCYTVPCTISAPNECLWTDWLLERKLYGYQAQHYVCMKHVDGTCSWYRGHLPLRKEFVDIVQP

SEQ ID NO: 13249 - protein, 362 aa, Homo sapiens
MHGGRIYPVLGTYWDNCNRCTCQENRQWQCDQEPCLVDPDMIKAINQGNYGWQAGNHSAFWGMTLDEGIRYRLGTIRPSSSVMNMHEIYTVLNPGEVLPTAFEASEKWPNLIHEPLDQGNCAGSWAFSTAAVASDRVSIHSLGHMTPVLSPQNLLSCDTHQQQGCRGGRLDGAWWFLRRRGVVSDHCYPFSGRERDEAGPAPPCMMHSRAMGRGKRQATAHCPNSYVNNNDIYQVTPVYRLGSNDKEIMKELMENGPVQALMEVHEDFFLYKGGIYSHTPVSLGRPERYRRHGTHSVKITGWGEETLPDGRTLKYWTAANSWGPAWGERGHFRIVRGVNECDIESFVLGVWGRVGMEDMGHH

SEQ ID NO: 13250 - protein, 467 aa, Homo sapiens
MWRCPLGLLLLLPLAGHLALGAQQGRGRRELAPGLHLRGIRDAGGRYCQEQDLCCRGRADDCALPYLGAICYCDLFCNRTVSDCCPDFWDFCLGVPPPFPPIQGCMHGGRIYPVLGTYWDNCNRCTCQENRQWQCDQEPCLVDPDMIKAINQGNYGWQAGNHSAFWGMTLDEGIRYRLGTIRPSSSVMNMHEIYTVLNPGEVLPTAFEASEKWPNLIHEPLDQGNCAGSWAFSTAAVASDRVSIHSLGHMTPVLSPQNLLSCDTHQQQGCRGGRLDGAWWFLRRRGVVSDHCYPFSGRERDEAGPAPPCMMHSRAMGRGKRQATAHCPNSYVNNNDIYQVTPVYRLGSNDKEIMKELMENGPVQALMEVHEDFFLYKGGIYSHTPVSLGRPERYRRHGTHSVKITGWGEETLPDGRTLKYWTAANSWGPAWGERGHFRIVRGVNECDIESFVLGVWGRVGMEDMGHH

SEQ ID NO: 13251 - protein, 436 aa, Homo sapiens
MWRCPLGLLLLLPLAGHLALGAQQGRGRRELAPGLHLRGIRDAGGRYCQEQDLCCRGRADDCALPYLGAICYCDLFCNRTVSDCCPDFWDFCLGVPPPFPPIQGCMHGGRIYPVLGTYWDNCNRCWQAGNHSAFWGMTLDEGIRYRLGTIRPSSSVMNMHEIYTVLNPGEVLPTAFEASEKWPNLIHEPLDQGNCAGSWAFSTAAVASDRVSIHSLGHMTPVLSPQNLLSCDTHQQQGCRGGRLDGAWWFLRRRGVVSDHCYPFSGRERDEAGPAPPCMMHSRAMGRGKRQATAHCPNSYVNNNDIYQVTPVYRLGSNDKEIMKELMENGPVQALMEVHEDFFLYKGGIYSHTPVSLGRPERYRRHGTHSVKITGWGEETLPDGRTLKYWTAANSWGPAWGERGHFRIVRGVNECDIESFVLGVWGRVGMEDMGHH

SEQ ID NO: 13252 - protein, 85 aa, Homo sapiens
GGRALKENPVDLPATEQKENCLDCYMDPLRLSLLPPRARKPVCPPSLCSSVITIGDLVLDSDEEENGQGEGKVSGKEQKAGKGDG

SEQ ID NO: 13253 - protein, 71 aa, Homo sapiens
MATPLVAGPAALRFAAAASWQVVRGRCVEHFPRVLEFLRSLRAVAPGLVRYRHHERLCMGLKAKSALLLTQ

SEQ ID NO: 13254 - protein, 416 aa, Homo sapiens
MATPLVAGPAALRFAAAASWQVVRGRCVEHFPRVLEFLRSLRAVAPGLVRYRHHERLCMGLKAKTKQDLRKILEAQETFYQQVKQLSEAPVDLASKLQELEQEYGEPFLAAMEKLLFEYLCQLEKALPTPQAQQLQDVLSWMQPGVSITSSLAWRQYGVDMGWLLPECSVTDSVNLAEPMEQNPPQQQRLALHNPLPKAKPGTHLPQGPSSRTHPEPLAGRHFNLAPLGRRRVQSQWASTRGGHKERPTVMLFPFRNLGSPTQVISKPESKEEHAIYTADLAMGTRAASTGKSKSPCQTLGGRALKENPVDLPATEQKENCLDCYMDPLRLSLLPPRARKPVCPPSLCSSVITIGDLVLDSDEEENGQGEGKESLENYQKTKFDTLIPTLCEYLPPSGHGAIPVSSCDCRDSSRPL

SEQ ID NO: 13255 - protein, 451 aa, Homo sapiens
MATPLVAGPAALRFAAAASWQVVRGRCVEHFPRVLEFLRSLRAVAPGLVRYRHHERLCMGLKAKVVVELILQGRPWAQVLKALNHHFPESGPIVRDPKATKQDLRKILEAQETFYQQVKQLSEAPVDLASKLQELEQEYGEPFLAAMEKLLFEYLCQLEKALPTPQAQQLQDVLSWMQPGVSITSSLAWRQYGVDMGWLLPECSVTDSVNLAEPMEQNPPQQQRLALHNPLPKAKPGTHLPQGPSSRTHPEPLAGRHFNLAPLGRRRVQSQWASTRGGHKERPTVMLFPFRNLGSPTQVISKPESKEEHAIYTADLAMGTRAASTGKSKSPCQTLGGRALKENPVDLPATEQKENCLDCYMDPLRLSLLPPRARKPVCPPSLCSSVITIGDLVLDSDEEENGQGEGKESLENYQKTKFDTLIPTLCEYLPPSGHGAIPVSSCDCRDSSRPL

SEQ ID NO: 13256 - protein, 354 aa, Homo sapiens
MATPLVAGPAALRFAAAASWQVVRGRCVEHFPRVLEFLRSLRAVAPGLVRYRHHERLCMGLKAKVVVELILQGRPWAQVLKALNHHFPESGPIVRDPKATKQDLRKILEAQETFYQQVKQLSEAPVDLASKLQELEQEYGEPFLAAMEKLLFEYLCQLEKALPTPQAQQLQDVLSWMQPGVSITSSLAWRQYGVDMGWLLPECSVTDSVNLAEPMEQNPPQQQRLALHNPLPKAKPGTHLPQGPSSRTHPEPLAGRHFNLAPLGRRRVQSQWASTRGGHKERPTVMLFPFRNLGSPTQVISKPESKEEHAIYTADLAMGTRAASTGKSKSPCQTLGGRALKENPVDLPATEQKE

SEQ ID NO: 13257 - protein, 451 aa, Homo sapiens; identical to SEQ ID NO: 13255

SEQ ID NO: 13258 - protein, 290 aa, Homo sapiens
MATPLVAGPAALRFAAAASWQVVRGRCVEHFPRVLEFLRSLRAVAPGLVRYRHHERLCMGLKAKVVVELILQGRPWAQVLKALNHHFPESGPIVRDPKATKQDLRKILEAQETFYQQVKQLSEAPVDLASKLQLQDVLSWMQPGVSITSSLAWRQYGVDMGWLLPECSVTDSVNLAEPMEQNPPQQQRLALHNPLPKAKPGTHLPQGPSSRTHPEPLAGRHFNLAPLGRRRVQSQWASTRGGHKERPTVMLFPFRNLGSPTQVISKPESKEEHAIYTADLAMGTRAASTG

SEQ ID NO: 13259 - protein, 140 aa, Homo sapiens
MATPLVAGPAALRFAAAASWQVVRGRCVEHFPRVLEFLRSLRAVAPGLVRYRHHERLCMGLKAKVVVELILQGRPWAQVLKALNHHFPESGPIVRDPKATKQDLRKILEAQETFYQQVKQLSEAPVDLASKLQSALLLTQ

SEQ ID NO: 13260 - protein, 140 aa, Homo sapiens; identical to SEQ ID NO: 13259

SEQ ID NO: 13261 - protein, 146 aa, Homo sapiens
MEKLLFEYLCQLEKALPTPQAQQLQDVLSWMQPGVSITSSLAWRQYGVDMGWLLPECSVTDSVNLAEPMEQNPPQQQRLALHNPLPKAKPGTHLPQGPSSRTHPEPLAGRHFNLAPLGRRRVQSQWASTRGGHKERPTVMLFPFRN

SEQ ID NO: 13262 - protein, 1015 aa, Homo sapiens
MPRATALGALVSLLLLLPLPRGAGGLGERPDATADYSELDGEEGTEQQLEHYHDPCKAAVFWGDIALDEDDLKLFHIDKARDWTKQTVGATGHSTGGLEEQASESSPDTTAMDTGTKEAGKDGRENTTLLHSPGTLHAAAKTFSPRVRRATTSRTERIWPGGVIPYVIGGNFTGSQRAIFKQAMRHWEKHTCVTFIERTDEESFIVFSYRTCGCCSYVGRRGGGPQAISIGKNCDKFGIVAHELGHVVGFWHEHTRPDRDQHVTIIRENIQPGQEYNFLKMEAGEVSSLGETYDFDSIMHYARNTFSRGVFLDTILPRQDDNGVRPTIGQRVRLSQGDIAQARKLYKCPACGETLQDTTGNFSAPGFPNGYPSYSHCVWRISVTPGEKIVLNFTSMDLFKSRLCWYDYVEVRDGYWRKAPLLGRFCGDKIPEPLVSTDSRLWVEFRSSSNILGKGFFAAYEATCGGDMNKDAGQIQSPNYPDDYRPSKECVWRITVSEGFHVGLTFQAFEIERHDSCAYDYLEVRDGPTEESALIGHFCGYEKPEDVKSSSNRLWMKFVSDGSINKAGFAANFFKEVDECSWPDHGGCEHRCVNTLGSYKCACDPGYELAADKKMCEVACGGFITKLNGTITSPGWPKEYPTNKNCVWQVVAPAQYRISLQFEVFELEGNDVCKYDFVEVRSGLSPDAKLHGRFCGSETPEVITSQSNNMRVEFKSDNTVSKRGFRAHFFSDKDECAKDNGGCQHECVNTFGSYLCRCRNGYWLHENGHDCKEAGCAHKISSVEGTLASPNWPDKYPSRRECTWNISSTAGHRVKLTFNEFEIEQHQECAYDHLEMYDGPDSLAPILGRFCGSKKPDPTVASGSSMFLRFYSDASVQRKGFQAVHSTECGGRLKAEVQTKELYSHAQFGDNNYPSEARCDWVIVAEDGYGVELTFRTFEVEEEADCGYDYMEAYDGYDSSAPRLGRFCGSGPLEEIYSAGDSLMIRFRTDDTINKKGFHARYTSTKFQDALHMKK

SEQ ID NO: 13263 - protein, 23 aa, Homo sapiens
MTSIFHFAIIFMLILQIRIQLSE

SEQ ID NO: 13264 - protein, 48 aa, Homo sapiens
MTSIFHFAIIFMLILQIRIQLSEESEFLVDRSKNGLIHVPKDLSQKTT

SEQ ID NO: 13265 - protein, 90 aa, Homo sapiens
MTSIFHFAIIFMLILQIRIQLSEESEFLVDRSKNGLIHVPKDLSQKTTILNISQNYISELWTSDILSLSKLRILIISHNRIQYLDISVFK

SEQ ID NO: 13266 - protein, 161 aa, Homo sapiens
MTSIFHFAIIFMLILQIRIQLSEESEFLVDRSKNGLIHVPKDLSQKTTILNISQNYISELWTSDILSLSKLRILIISHNRIQYLDISVFKFNQELEYLDLSHNKLVKISCHPTVNLKHLDLSFNAFDALPICKEFGNMSQLKFLGLSTTHLEKSSVLPIAH

SEQ ID NO: 13267 - protein, 786 aa, Homo sapiens
MTSIFHFAIIFMLILQIRIQLSEESEFLVDRSKNGLIHVPKDLSQKTTILNISQNYISELWTSDILSLSKLRILIISHNRIQYLDISVFKFNQELEYLDLSHNKLVKISCHPTVNLKHLDLSFNAFDALPICKEFGNMSQLKFLGLSTTHLEKSSVLPIAHLNISKVLLVLGETYGEKEDPEGLQDFNTESLHIVFPTNKEFHFILDVSVKTVANLELSNIKCVLEDNKCSYFLSILAKLQTNPKLSNLTLNNIETTWNSFIRILQLVWHTTVWYFSISNVKLQGQLDFRDFDYSGTSLKALSIHQVVSDVFGFPQSYIYEIFSNMNIKNFTVSGTRMVHMLCPSKISPFLHLDFSNNLLTDTVFENCGHLTELETLILQMNQLKELSKIAEMTTQMKSLQQLDISQNSVSYDEKKGDCSWTKSLLSLNMSSNILTDTIFRCLPPRIKVLDLHSNKIKSIPKQVVKLEALQELNVAFNSLTDLPGCGSFSSLSVLIIDHNSVSHPSADFFQSCQKMRSIKAGDNPFQCTCELGEFVKNIDQVSSEVLEGWPDSYKCDYPESYRGTLLKDFHMSELSCNITLLIVTIVATMLVLAVTVTSLCSYLDLPWYLRMVCQWTQTRRRARNIPLEELQRNLQFHAFISYSGHDSFWVKNELLPNLEKEGMQICLHERNFVPGKSIVENIITCIEKSYKSIFVLSPNFVQSEWCHYELYFAHHNLFHEGSNSLILILLEPIPQYSIPSSYHKLKSLMARRTYLEWPKEKSKRGLFWANLRAAINIKLTEQAKK

SEQ ID NO: 13268 - protein, 786 aa, Homo sapiens; identical to SEQ ID NO: 13267

SEQ ID NO: 13269 - protein, 627 aa, Homo sapiens
MLDLSYNNLNVVGNDSFAWLPQLEYFFLEYNNIQHLFSHSLHGLFNVRYLNLKRSFTKQSISLASLPKIDDFSFQWLKCLEHLNMEDNDIPGIKSNMFTGLINLKYLSLSNSFTSLRTLTNETFVSLAHSPLHILNLTKNKISKIESDAFSWLGHLEVLDLGLNEIGQELTGQEWRGLENIFEIYLSYNKYLQLTRNSFALVPSLQRLMLRRVALKNVDSSPSPFQPLRNLTILDLSNNNIANINDDMLEGLEKLEILDLQHNNLARLWKHANPGGPIYFLKGLSHLHILNLESNGFDEIPVEVFKDLFELKIIDLGLNNLNTLPASVFNNQVSLKSLNLQKNLITSVEKKVFGPAFRNLTELDMRFNPFDCTCESIAWFVNWINETHTNIPELSSHYLCNTPPHYHGFPVRLFDTSSCKDSAPFELFFMINTSILLIFIFIVLLIHFEGWRISFYWNVSVHRVLGFKEIDRQTEQFEYAAYIIHAYKDKDWVWEHFSSMEKEDQSLKFCLEERDFEAGVFELEAIVNSIKRSRKIIFVITHHLLKDPLCKRFKVHHAVQQAIEQNLDSIILVFLEEIPDYKLNHALCLRRGMFKSHCILNWPVQKERIGAFRHKLQVALGSKNSVH

SEQ ID NO: 13270 - protein, 904 aa, Homo sapiens
MRQTLPCIYFWGGLLPFGMLCASSTTKCTVSHEVADCSHLKLTQVPDDLPTNITVLNLTHNQLRRLPAANFTRYSQLTSLDVGFNTISKLEPELCQKLPMLKVLNLQHNELSQLSDKTFAFCTNLTELHLMSNSIQKIKNNPFVKQKNLITLDLSHNGLSSTKLGTQVQLENLQELLLSNNKIQALKSEELDIFANSSLKKLELSSNQIKEFSPGCFHAIGRLFGLFLNNVQLGPSLTEKLCLELANTSIRNLSLSNSQLSTTSNTTFLGLKWTNLTMLDLSYNNLNVVGNDSFAWLPQLEYFFLEYNNIQHLFSHSLHGLFNVRYLNLKRSFTKQSISLASLPKIDDFSFQWLKCLEHLNMEDNDIPGIKSNMFTGLINLKYLSLSNSFTSLRTLTNETFVSLAHSPLHILNLTKNKISKIESDAFSWLGHLEVLDLGLNEIGQELTGQEWRGLENIFEIYLSYNKYLQLTRNSFALVPSLQRLMLRRVALKNVDSSPSPFQPLRNLTILDLSNNNIANINDDMLEGLEKLEILDLQHNNLARLWKHANPGGPIYFLKGLSHLHILNLESNGFDEIPVEVFKDLFELKIIDLGLNNLNTLPASVFNNQVSLKSLNLQKNLITSVEKKVFGPAFRNLTELDMRFNPFDCTCESIAWFVNWINETHTNIPELSSHYLCNTPPHYHGFPVRLFDTSSCKDSAPFELFFMINTSILLIFIFIVLLIHFEGWRISFYWNVSVHRVLGFKEIDRQTEQFEYAAYIIHAYKDKDWVWEHFSSMEKEDQSLKFCLEERDFEAGVFELEAIVNSIKRSRKIIFVITHHLLKDPLCKRFKVHHAVQQAIEQNLDSIILVFLEEIPDYKLNHALCLRRGMFKSHCILNWPVQKERIGAFRHKLQVALGSKNSVH

SEQ ID NO: 13271 - protein, 351 aa, Homo sapiens
MRQTLPCIYFWGGLLPFGMLCASSTTKCTVSHEVADCSHLKLTQVPDDLPTNITVLNLTHNQLRRLPAANFTRYSQLTSLDVGFNTISKLEPELCQKLPMLKVLNLQHNELSQLSDKTFAFCTNLTELHLMSNSIQKIKNNPFVKQKNLITLDLSHNGLSSTKLGTQVQLENLQELLLSNNKIQALKSEELDIFANSSLKKLELSSNQIKEFSPGCFHAIGRLFGLFLNNVQLGPSLTEKLCLELANTSIRNLSLSNSQLSTTSNTTFLGLKWTNLTMLDLSYNNLNVWLKCLEHLNMEDNDIPGIKSNMFTGLINLKYLSLSNSFTSLRTLTNETFVSLAHSPLHILNLT

SEQ ID NO: 13272 - protein, 45 aa, Homo sapiens
MKKCLLPVLITCMQTAICKDRMMMIMILLVNYRPDEFIECEDPVD

SEQ ID NO: 13273 - protein, 121 aa, Homo sapiens
MKKCLLPVLITCMQTAICKDRMMMIMILLVNYRPDEFIECEDPVDHVGNATASQELGYGCLKFGGQAYSDVEHTSVQCHALDGIECASPRTFLRENKPCIKYTGHYFITTLLYSFFLGCFG

SEQ ID NO: 13274 - protein, 171 aa, Homo sapiens
MKKCLLPVLITCMQTAICKDRMMMIMILLVNYRPDEFIECEDPVDHVGNATASQELGYGCLKFGGQAYSDVEHTSVQCHALDGIECASPRTFLRENKPCIKYTGHYFITTLLYSFFLGCFGVDRFCLGHTGTAVGKLLTLGGLGIWWFVDLILLITGGLMPSDGSNWCTVY

SEQ ID NO: 13275 - protein, 171 aa, Homo sapiens; identical to SEQ ID NO: 13274

SEQ ID NO: 13276 - protein, 63 aa, Homo sapiens
MKKCLLPVLITCMQTAICKDRMMMIMILLVNYRPDEFIECEDPVDHVGNATASQELGYGCLKV

SEQ ID NO: 13277 - protein, 214 aa, Homo sapiens
MVLGGCPVSYLLLCGQAALLLGNLLLLHCVSRSHSQNATAEPELTSAGAAQPEGPGGAASWEYGDPHSPVILCSYLPDEFIECEDPVDHVGNATASQELGYGCLKFGGQAYSDVEHTSVQCHALDGIECASPRTFLRENKPCIKYTGHYFITTLLYSFFLGCFGVDRFCLGHTGTAVGKLLTLGGLGIWWFVDLILLITGGLMPSDGSNWCTVY

SEQ ID NO: 13278 - protein, 247 aa, Homo sapiens
MAGGVLPLRGLRALCRVLLFLSQFCILSGGEQSQALAQSIKDPGPTRTFTVVPRAAESTEIPPYVMKCPSNGLCSRLPADCIDCTTNFSCTYGKPVTFDCAVKPSVTCVDQDFKSQKNFIINMTCRFCWQLPETDYECTNSTSCMTVSCPRQRYPANCTVRDHVHCLGNRTFPKMLYCNWTGGYKWSTALALSITLGGFGADRFYLGQWREGLGKLFSFGGLGIWTLIDVLLIGVGYVGPADGSLYI

SEQ ID NO: 13279 - protein, 209 aa, Homo sapiens
MAGGVLPLRGLRALCRVLLFLSQFCILSGGEQSQALAQSIKDPGPTRTFTVVPRAAESTEIPPYVMKCPSNGLCSRLPADCIDCTTNFSCTYGKPVTFDCAVKPSVTCVDQDFKSQKNFIINMTCRFCWQLPETDYECTNSTSCMTVSCPRQRYPANCTVRDHVHCLGNRTFPKMLYCNWTGGYKWSTALALSLQAQVGLHVQLTVGLH

SEQ ID NO: 13280 - protein, 221 aa, Homo sapiens
MAGGVLPLRGLRALCRVLLFLSQFCILSGGESTEIPPYVMKCPSNGLCSRLPADCIDCTTNFSCTYGKPVTFDCAVKPSVTCVDQDFKSQKNFIINMTCRFCWQLPETDYECTNSTSCMTVSCPRQRYPANCTVRDHVHCLGNRTFPKMLYCNWTGGYKWSTALALSITLGGFGADRFYLGQWREGLGKLFSFGGLGIWTLIDVLLIGVGYVGPADGSLYI

SEQ ID NO: 13281 - protein, 183 aa, Homo sapiens
MAGGVLPLRGLRALCRVLLFLSQFCILSGGESTEIPPYVMKCPSNGLCSRLPADCIDCTTNFSCTYGKPVTFDCAVKPSVTCVDQDFKSQKNFIINMTCRFCWQLPETDYECTNSTSCMTVSCPRQRYPANCTVRDHVHCLGNRTFPKMLYCNWTGGYKWSTALALSLQAQVGLHVQLTVGLH

SEQ ID NO: 13282 - protein, 42 aa, Homo sapiens
MAGGVLPLRGLRALCRVLLFLSQFCILSGGGESKAGFSAGWG

SEQ ID NO: 13283 - protein, 182 aa, Homo sapiens
MKCPSNGLCSRLPADCIDCTTNFSCTYGKPVTFDCAVKPSVTCVDQDFKSQKNFIINMTCRFCWQLPETDYECTNSTSCMTVSCPRQRYPANCTVRDHVHCLGNRTFPKMLYCNWTGGYKWSTALALSITLGGFGADRFYLGQWREGLGKLFSFGGLGIWTLIDVLLIGVGYVGPADGSLYI

SEQ ID NO: 13284 - protein, 21 aa, Homo sapiens
  SITE 1: note = misc_feature - Xaa can be any naturally occurring amino acid
XQFCILSGGGESKAGFSAGWG

SEQ ID NO: 13285 - protein, 161 aa, Homo sapiens
  SITE 1: note = misc_feature - Xaa can be any naturally occurring amino acid
XSTEIPPYVMKCPSNGLCSRLPADCIDCTTNFSCTYGKPVTFDCAVKPSVTCVDQDFKSQKNFIINMTCRFCWQLPETDYECTNSTSCMTVSCPRQRYPANCTVRDHVHCLGNRTFPKMLYCNWTGGYKWSTALALRVGLFIDTVTTPLHSSLSHRARHCL

SEQ ID NO: 13286 - protein, 152 aa, Homo sapiens
ETTIKFAPANLGYARGVDPPPCDAGTDQDSRWRLQYDVYQYFLPENDLTEEMLLKHLQRMVSVPQVKASALKVVTLTANDKTSVSFSSLPGQGVIYNVIVWDPFLNTSAAYIPAHTYACSFEAGEGSCASLAVLYLLLCLSTSSPSFITGLF

SEQ ID NO: 13287 - protein, 81 aa, Homo sapiens
FYILITRLTPIKYDGNLKIFHDDGVFWVTFSCIAILIPVVFMGCLRILNILTCGVIGSYSVVLAIDSYWSTSLSYITLNVL

SEQ ID NO: 13288 - protein, 37 aa, Homo sapiens
MAILLSYSERDPVPGGCNLEFDLDIDPNIYLEYNFFE

SEQ ID NO: 13289 - protein, 66 aa, Homo sapiens
MAILLSYSERDPVPGGCNLEFDLDIDPNIYLEYNFFETTIKFAPANLGYARGVDPPPCDAGTDQDS

SEQ ID NO: 13290 - protein, 86 aa, Homo sapiens
MAILLSYSERDPVPGGCNLEFDLDIDPNIYLEYNFFETTIKFAPANLGYARGVDPPPCDAGTDQDSRWRLQYDVYQYFLPENDLTE

SEQ ID NO: 13291 - protein, 129 aa, Homo sapiens [sequence omitted]

SEQ ID NO: 13292 - protein, 49 aa, Homo sapiens
MGFLQLLVVAVLASEHRVAGAAEVFGNSSEDSPFQFLGNRHCQWTGFHP

SEQ ID NO: 13293 - protein, 570 aa, Homo sapiens
MGFLQLLVVAVLASEHRVAGAAEVFGNSSEGLIEFSVGKFRYFELNRPFPEEAILHDISSNVTFLIFQIHSQYQNTTVSFSPTLLSNSSETGTASGLVFILRPEQSTCTWYLGTSGIQPVQNMAILLSYSERDPVPGGCNLEFDLDIDPNIYLEYNFFETTIKFAPANLGYARGVDPPPCDAGTDQDSRWRLQYDVYQYFLPENDLTEEMLLKHLQRMVSVPQVKASALKVVTLTANDKTSVSFSSLPGQGVIYNVIVWDPFLNTSAAYIPAHTYACSFEAGEGSCASLGRVSSKVFFTLFALLGFFICFFGHRFWKTELFFIGFIIMGFFFYILITRLTPIKYDVNLILTAVTGSVGGMFLVAVWWRFGILSICMLCVGLVLGFLISSVTFFTPLGNLKIFHDDGVFWVTFSCIAILIPVVFMGCLRILNILTCGVIGSYSVVLAIDSYWSTSLSYITLNVLKRALNKDFHRAFTNVPFQTNDFIILAVWGMLAVSGITLQIRRERGRPFFPPHPYKLWKQERERRVTNILDPSYHIPPLRERLYGRLTQIKGLFQKEQPAGERTPLLL

SEQ ID NO: 13294 - protein, 116 aa, Homo sapiens
MGFLQLLVVAVLASEHRVAGAAEVFGNSSEVYLVVGLIEFSVGKFRYFELNRPFPEEAILHDISSNVTFLIFQIHSQYQNTTVSFSPTLLSNSSETGTASGLVFILRPEQSTCTWY

SEQ ID NO: 13295 - protein, 136 aa, Homo sapiens
MLLKHLQRMVSVPQVKASALKVVTLTANDKTSVSFSSLPGQGVIYNVIVWDPFLNTSAAYIPAHTYACSFEAGEGSCASLGRVSSKVFFTLFALLGFFICFFGHRFWKTELFFIGFIIMGFFFYILITRLTPIKYD

SEQ ID NO: 13296 - protein, 136 aa, Homo sapiens; identical to SEQ ID NO: 13295

SEQ ID NO: 13297 - protein, 115 aa, Homo sapiens
MSHRARPISGLIEFSVGKFRYFELNRPFPEEAILHDISSNVTFLIFQIHSQYQNTTVSFSPTLLSNSSETGTASGLVFILRPEQSTCTWYLGTSGIQPVQNMAILLSYSERDPVP

SEQ ID NO: 13298 - protein, 222 aa, Homo sapiens
VWDPFLNTSAAYIPAHTYACSFEAGEGSCASLELFFIGFIIMGFFFYILITRLTPIKYDVNLILTAVTGSVGGMFLVAVWWRFGILSICMLCVGLVLGFLISSVTFFTPLGNLKIFHDDGVFWVTFSCIAILIPVVFMGCLRILNILTCGVIGSYSVVLAIDSYWSTSLSYITLNVLKRALNKDFHRAFTNVPFQTNDFIILAVWGMLAVSGITLQIRRERG

SEQ ID NO: 13299 - protein, 200 aa, Homo sapiens
  SITE 1: note = misc_feature - Xaa can be any naturally occurring amino acid
XLLKHLQRMVSVPQVKASALKVVTLTANDKTSVSFSSLPGQGVIYNVIVWDPFLNTSAAYIPAHTYACSFEAGEGSCASLGRVSSKVFFTLFALLGFFICFFGHRFWKTELFFIGFIIMGFFFYILITRLTPIKYDVNLILTAVTGSVGGMFLVAVWWRFGILSICMLCVGLVLGFLISSVTFFTPLETGSLSVTHAGLQ

SEQ ID NO: 13300 - protein, 144 aa, Homo sapiens
  SITE 1: note = misc_feature - Xaa can be any naturally occurring amino acid
XVPQVKASALKVVTLTANDKTSVSFSSLPGQGVIYNVIVWDPFLNTSAAYIPAHTYACSFEAGEGSCASLGRVSSKVFFTLFALLGFFICFFGHRFWKTELFFIGFIIMGFFFYILITRLTPIKYDAEHTDLWSHWLLFGGFSH

SEQ ID NO: 13301 - protein, 208 aa, Homo sapiens
MAESLYEIRFRENVEKRILCHMQLSSAQVEQLRQAIEELYYFEFVVDDLPIRGFVGYMEESGFLPHSHKIGLWTHLDFHLEFHGDRIIFANVSVRDVKPHSLDGLRPDEFLGLTHTYSVRWSETSVERRSDRRRGDDGGFFPRTLEIHWLSIINSMVLVFLLVGFVAVILMRVLRNDLARYNLDEETTSAGSGDDFDQGDNGWKIIHT

SEQ ID NO: 13302 - protein, 519 aa, Homo sapiens
MAESLYEIRFRENVEKRILCHMQLSSAQVEQLRQAIEELYYFEFVVDDLPIRGFVGYMEESGFLPHSHKIGLWTHLDFHLEFHGDRIIFANVSVRDVKPHSLDGLRPDEFLGLTHTYSVRWSETSVERRSDRRRGDDGGFFPRTLEIHWLSIINSMVLVFLLVGFVAVILMRVLRNDLARYNLDEETTSAGSGDDFDQGDNGWKIIHTDVFRFPPYRGLLCAVLGVGAQFLALGTGIIVMALLGMFNVHRHGAINSAAILLYALTCCISGYVSSHFYRQIGGERWVWNIILTTSLFSVPFFLTWSVVNSVHWANGSTQALPATTILLLLTVWLLVGFPLTVIGGIFGKNNASPFDAPCRTKNIAREIPPQPWYKSTVIHMTVGGFLPFSAISVELYYIFATVWGREQYTLYGILFFVFAILLSVGACISIALTYFQLSGEDYRWWWRSVLSVGSTGLFIFLYSVFYYARRSNMSGAVQTVEFFGYSLLTGYVFFLMLGTISFFSSLKFIRYIYVNLKMD

SEQ ID NO: 13303 - protein, 133 aa, Homo sapiens
MTVVGNPRSWSCQWLPILILLLGTALVQVYCHPHDCWRLPAFQCHLCGAVLHLCHSMGSGAVHFVRHPLLCLRHPAECGGLHLHCTHLLPVVWGGLPLVVAICAECWLHRPLHLPLLSFLLCPALQHVWGSTD

SEQ ID NO: 13304 - protein, 210 aa, Homo sapiens
MTVVGNPRSWSCQWLPILILLLGTGHGPGVEGVTHYKAGDPVILYVNKVGPYHNPQETYHYYQLPVCCPEKIRHKSLSLGEVLDGDRMAESLYEIRFRENVEKRILCHMQLSSAQVEQLRQAIEELYYFEFVVDDLPIRGFVGYMEESGFLPHSHKIGLWTHLDFHLEFHGDRIIFANVSVRDVKPHSLDGLRPDEFLGLTHTYSVRWSE

SEQ ID NO: 13305 - protein, 242 aa, Homo sapiens
MTVVGNPRSWSCQWLPILILLLGTGHGPGVEGVTHYKAGDPVILYVNKVGPYHNPQETYHYYQLPVCCPEKIRHKSLSLGEVLDGDRMAESLYEIRFRENVEKRILCHMQLSSAQVEQLRQAIEELYYFEFVVDDLPIRGFVGYMEESGFLPHSHKIGLWTHLDFHLEFHGDRIIFANVSVRDVKPHSLDGLRPDEFLGLTHTYSVRWSETSVERRSDRRRGDDGGFFPRTLEIHWLSIINS

SEQ ID NO: 13306 - protein, 606 aa, Homo sapiens
MTVVGNPRSWSCQWLPILILLLGTGHGPGVEGVTHYKAGDPVILYVNKVGPYHNPQETYHYYQLPVCCPEKIRHKSLSLGEVLDGDRMAESLYEIRFRENVEKRILCHMQLSSAQVEQLRQAIEELYYFEFVVDDLPIRGFVGYMEESGFLPHSHKIGLWTHLDFHLEFHGDRIIFANVSVRDVKPHSLDGLRPDEFLGLTHTYSVRWSETSVERRSDRRRGDDGGFFPRTLEIHWLSIINSMVLVFLLVGFVAVILMRVLRNDLARYNLDEETTSAGSGDDFDQGDNGWKIIHTDVFRFPPYRGLLCAVLGVGAQFLALGTGIIVMALLGMFNVHRHGAINSAAILLYALTCCISGYVSSHFYRQIGGERWVWNIILTTSLFSVPFFLTWSVVNSVHWANGSTQALPATTILLLLTVWLLVGFPLTVIGGIFGKNNASPFDAPCRTKNIAREIPPQPWYKSTVIHMTVGGFLPFSAISVELYYIFATVWGREQYTLYGILFFVFAILLSVGACISIALTYFQLSGEDYRWWWRSVLSVGSTGLFIFLYSVFYYARRSNMSGAVQTVEFFGYSLLTGYVFFLMLGTISFFSSLKFIRYIYVNLKMD

SEQ ID NO: 13307 - protein, 489 aa, Homo sapiens
MTVVGNPRSWSCQWLPILILLLGTGHGPGVEGVTHYKAGDPVILYVNKVGPYHNPQETYHYYQLPVCCPEKIRHKSLSLGEVLDGDRMAESLYEIRFRENVEKRILCHMQLSSAQVEQLRQAIEELYYFEFVVDDLPIRGFVGYMEESGFLPHSHKIGLWTHLDFHLEFHGDRIIFANVSVRDVKPHSLDGLRPDEFLGLTHTYSVRWSETSVERRSDRRRGDDGGFFPRTLEIHWLSIINSMVLVFLLVGFVAVILMRVLRNDLARYNLDEETTSAGSGDDFDQGDNGWKIIHTDVFRFPPYRGLLCAVLGVGAQFLALGTGIIVMALLGMFNVHRHGAINSAAILLYALTCCISGYVSSHFYRQIGGERWVWNIILTTSLFSVPFFLTWSVVNSVHWANGSTQALPATTILLLLTVWLLVGFPLTVIGGIFGKNNASPFDAPCRTKNIAREIPPQPWYKSTVIHMTVGGFLPFRYPPFIPWLLLSGS

SEQ ID NO: 13308 - protein, 257 aa, Homo sapiens
MTVVGNPRSWSCQWLPILILLLGTGHGPGVEGVTHYKAGDPVILYVNKVGPYHNPQETYHYYQLPVCCPEKIRHKSLSLGEVLDGDRMAESLYEIRFRENVEKRILCHMQLSSAQVEQLRQAIEELYYFEFVVDDLPIRGFVGYMEESGFLPHSHKIGLWTHLDFHLEFHGDRIIFANVSVRDVKPHSLDGLRPDEFLGLTHTYSVRWSETSVERRSDRRRGDDGGFFPRTLEIHWLSIINSMVLVFLLVGFVAVIL

SEQ ID NO: 13309 - protein, 420 aa, Homo sapiens
MTVVGNPRSWSCQWLPILILLLGTGHGPGVEGVTHYKAGDPVILYVNKVGPYHNPQETYHYYQLPVCCPEKIRHKSLSLGEVLDGDRMAESLYEIRFRENVEKRILCHMQLSSAQVEQLRQAIEELYYFEFVVDDLPIRGFVGYMEESGFLPHSHKIGLWTHLDFHLEFHGDRIIFANVSVRDVKPHSLDGLRPDEFLGLTHTYSVRWSETSVERRSDRRRGDDGGFFPRTLEIHWLSIINSMVLVFLLVGFVAVILMRVLRNDLARYNLDEETTSAGSGDDFDQGDNGWKIIHTDVFRFPPYRGLLCAVLGVGAQFLALGTGIIVMALLGMFNVHRHGAINSAAILLYALTCCISGYVSSHFYRQIGGERWVWNIILTTSLFSGSASHNHPAASDGLAAGGLSPHCHWRHLWEEQRQPL

SEQ ID NO: 13310 - protein, 589 aa, Homo sapiens
MTVVGNPRSWSCQWLPILILLLGTGHGPGVEGVTHYKAGDPVILYVNKVGPYHNPQETYHYYQLPVCCPEKIRHKSLSLGEVLDGDRMAESLYEIRFRENVEKRILCHMQLSSAQVEQLRQAIEELYYFEFVVDDLPIRGFVGYMEESGFLPHSHKIGLWTHLDFHLEFHGDRIIFANVSVRDVKPHSLDGLRPDEFLGLTHTYSVRWSETSVERRSDRRRGDDGGFFPRTLEIHWLSIINSMVLVFLLVGFVAVILMRVLRNDLARYNLDEETTSAGSGDDFDQGDNGWKIIHTDVFRFPPYRGLLCAVLGVGAQFLALGTGIIVMALLGMFNVHRHGAINSAAILLYALTCCISGYVSSHFYRQIGGERWVWNIILTTSLFSVPFFLTWSVVNSVHWANGSTQALPATTILLLLTVWLLVGFPLTVIGGIFGKNNASPFDAPCRTKNIAREIPPQPCAISVELYYIFATVWGREQYTLYGILFFVFAILLSVGACISIALTYFQLSGEDYRWWWRSVLSVGSTGLFIFLYSVFYYARRSNMSGAVQTVEFFGYSLLTGYVFFLMLGTISFFSSLKFIRYIYVNLKMD

SEQ ID NO: 13311 - protein, 301 aa, Homo sapiens
MTVVGNPRSWSCQWLPILILLLGTGHGPGVEGVTHYKAGDPVILYVNKVGPYHNPQETYHYYQLPVCCPEKIRHKSLSLGEVLDGDRMAESLYEIRFRENVEKRILCHMQLSSAQVEQLRQAIEELYYFEFVVDDLPIRGFVGYMEESGFLPHSHKIGLWTHLDFHLEFHGDRIIFANVSVRDVKPHSLDGLRPDEFLGLTHTYSVRWSETSVERRSDRRRGDDGGFFPRTLEIHWLSIINSMVLVFLLVGFVAVILMRVLRNDLARYNLDEETTSAGSGDDFDQGDNGWKIIHTDVFRFP

SEQ ID NO: 13312 - protein, 57 aa, Homo sapiens
MRTLVGLLTSNQALLQLEAARCLHELSHSEQSTVAEACLPATSYLLTYLSSHSSDFI

SEQ ID NO: 13313 - protein, 499 aa, Homo sapiens
MWSRRQGRLRPTVCGVEELRRRRREREAALRKARREQQLVSKRLLRNDAPEEAGEGCVAAILGETEVQQFLRQAQRGTEEKEREGALVSLRRGLQHPETQQTFIRLEGSMRTLVGLLTSNQALLQLEAARCLHELSHSEQSTVAEACLPATSYLLTYLSSHSSDFIELCLYTLGNLIVESEAVRRQLLPQGIVPALAACIQSPHVAVLEALGYALSQLLQAEEAPEKIIPPASASSSILASTLPQHMLQMLQPGPKLNPGVAVEFAWCLHYIICSQVSNPLLIGHGALSTLGLLLLDLAGAVQKTEDAGLELLACPVLRCLSNLLTEAAVETVGGQMQLRDERVVAALFILLQFFFQKQPSLLPEGLWLLNNLTANSPSFCTSLLSLDLIEPLLQLLPVSNVVSVMVLTVLCNVAEKGPAYCQRLWPGPLLPALLHTLAFSDTEVVGQSLELLHLLFLYQPEAVQVFLQQSGLQALERHQEEAQLQDRVYALQQTALQG

SEQ ID NO: 13314 - protein, 493 aa, Homo sapiens
MWSRRQGRLRPTVCGVEELRRRRREREAALRKARREQQLVSKRLLRNDAPEEAGEGCVAAILGETEVQQFLRQAQRGTEEKEREGALVSLRRGLQHPETQQTFIRLEGSMRTLVGLLTSNQALLQLEAARCLHELSHSEQSTVAEACLPATSYLLTYLSSHSSDFIELCLYTLGNLIVESEAVRRQLLPQGIVPALAACIQSPHVAVLEALGYALSQLLQAEEAPEKIIPSILASTLPQHMLQMLQPGPKLNPGVAVEFAWCLHYIICSQVSNPLLIGHGALSTLGLLLLDLAGAVQKTEDAGLELLACPVLRCLSNLLTEAAVETVGGQMQLRDERVVAALFILLQFFFQKQPSLLPEGLWLLNNLTANSPSFCTSLLSLDLIEPLLQLLPVSNVVSVMVLTVLCNVAEKGPAYCQRLWPGPLLPALLHTLAFSDTEVVGQSLELLHLLFLYQPEAVQVFLQQSGLQALERHQEEAQLQDRVYALQQTALQG

SEQ ID NO: 13315 - protein, 101 aa, Homo sapiens
MWSRRQGRLRPTVCGVEELRRRRREREAALRKARREQQLVSKRLLRNDAPEEAGEGCVAAILGETEVRGQGAAVPAASPAGDRGKGERGGSGQPSSRLAAP

SEQ ID NO: 13316 - protein, 43 aa, Homo sapiens
MWSRRQGRLRPTVCGVEELRRRRREREHCGRRGGSSSWSARGC

SEQ ID NO: 13317 - protein, 43 aa, Homo sapiens; identical to SEQ ID NO: 13316

SEQ ID NO: 13318 - protein, 43 aa, Homo sapiens; identical to SEQ ID NO: 13316

SEQ ID NO: 13319 - protein, 43 aa, Homo sapiens; identical to SEQ ID NO: 13316

SEQ ID NO: 13320 - protein, 82 aa, Homo sapiens
MLDVKMEDIKESIETMRTRLERSIQMLTLLRAFEARDRNLQEGNLERVNFWSAVNVAVLLLVAVLQVCTLKRFFQDKRPVPT

SEQ ID NO: 13321 - protein, 74 aa, Homo sapiens
MMAAGAALALALWLLMPPVEVGGAGPPPIQDGEFTFLLPAGRKQCFYQSAPANASLETEYQGGANGGRGLQAVL

SEQ ID NO: 13322 - protein, 95 aa, Homo sapiens
MMAAGAALALALWLLMPPVEVGGAGPPPIQDGEFTFLLPAGRKQCFYQSAPANASLETEYQVIGGAGLDVDFTLESPQGVLLGGANGGRGLQAVL

SEQ ID NO: 13323 - protein, 185 aa, Homo sapiens
MMAAGAALALALWLLMPPVEVGGAGPPPIQDGEFTFLLPAGRKQCFYQSAPANASLETEYQVIGGAGLDVDFTLESPQGVLLVSESRKADGVHTSPLRPCGPGWSAASRCSRYCGPSRHVTATCKRATWSGSTSGQLSTWRCCCWWLCCRSARSSASSRTSARCPRSPCHGRKNGTKEGQQGVCI

SEQ ID NO: 13324 - protein, 191 aa, Homo sapiens
MMAAGAALALALWLLMPPVEVGGAGPPPIQDGEFTFLLPAGRKQCFYQSAPANASLETEYQVIGGAGLDVDFTLESPQGVLLVSESRKADGVHTTISEKLVFFELIFDSLQDDEEVEGWAEAVEPEEMLDVKMEDIKESIETMRTRLERSIQMLTLLRAFEARDRNLQEGNLERVNFWSAVNVAVLLLVAV

SEQ ID NO: 13325 - protein, 227 aa, Homo sapiens
MMAAGAALALALWLLMPPVEVGGAGPPPIQDGEFTFLLPAGRKQCFYQSAPANASLETEYQVIGGAGLDVDFTLESPQGVLLVSESRKADGVHTVEPTEAGDYKLCFDNSFSTISEKLVFFELIFDSLQDDEEVEGWAEAVEPEEMLDVKMEDIKESIETMRTRLERSIQMLTLLRAFEARDRNLQEGNLERVNFWSAVNVAVLLLVAVLQVCTLKRFFQDKRPVPT

SEQ ID NO: 13326 - protein, 65 aa, Homo sapiens
  SITE 1: note = misc_feature - Xaa can be any naturally occurring amino acid
XEVEGWAEAVEPEEMLDVKMEDIKVCPGCAGATPSRSLGFTWGAPLGLTQPPLRSCALQLNYRVH

SEQ ID NO: 13327 - protein, 116 aa, Homo sapiens
MDGTYKFCFSNRMSTMTPKIVMFTIDIGEAPKGQDMETEAHQNKLEEMINELAVAMTAVKHEQEYMEVRERIHRAINDNTNSRVVLWSFFEALVLVAMTLGQIYYLKRFFEVRRVV

SEQ ID NO: 13328 - protein, 201 aa, Homo sapiens
MVTLAELLVLLAALLATVSGYFVSIDAHAEECFFERVTSGTKMGLIFEVAEGGFLDIDVEITGPDNKGIYKGDRESSGKYTFAAHMDGTYKFCFSNRMSTMTPKIVMFTIDIGEAPKGQDMETEAHQNKLEEMINELAVAMTAVKHEQEYMEVRERIHRAINDNTNSRVVLWSFFEALVLVAMTLGQIYYLKRFFEVRRVV

SEQ ID NO: 13329 - protein, 166 aa, Homo sapiens
MVTLAELLVLLAALLATVSGYFVSIDAHAEECFFERVTSGTKMGLIFEVAEGGFLDIDVEITGPDNKGIYKGDRESSGKYTFAAHMDGTYKFCFSNRMSTMTPKIVMFTIDIGEAPKGQDMETEGGGDTWDAHQNKLEEMINELAVAMTAVKHEQEYMEVRERIHR

SEQ ID NO: 13330 - protein, 146 aa, Homo sapiens
MGSTVPRSASVLLLLLLLRRAEQPCGAELTFELPDNAKQCFHEEVEQGVKFSLDYQVITGGHYDVDCYVEDPQGNTIYRETKKQYDSFTYRAEVKGVYQFCFSNEFSTFSHKTVYFDFQVGDEPPILPDMGNRVTALTQGFRVFCL

SEQ ID NO: 13331 - protein, 155 aa, Homo sapiens
MGSTVPRSASVLLLLLLLRRAEQPCGAELTFELPDNAKQCFHEEVEQGVKFSLDYQVITGGHYDVDCYVEDPQGNTIYRETKKQYDSFTYRAEVKGVYQFCFSNEFSTFSHKTVYFDFQVGDEPPILPDMGNRVTALTQGPSASPTPTPPLRVPV

SEQ ID NO: 13332 - protein, 217 aa, Homo sapiens
MGSTVPRSASVLLLLLLLRRAEQPCGAELTFELPDNAKQCFHEEVEQGVKFSLDYQVITGGHYDVDCYVEDPQGNTIYRETKKQYDSFTYRAEVKGVYQFCFSNEFSTFSHKTVYFDFQVGDEPPILPDMGNRVTALTQMESACVTIHEALKTVIDSQTHYRLREAQDRARAEDLNSRVSYWSVGETIALFVVSFSQVLLLKSFFTEKRPISRAVHS

SEQ ID NO: 13333 - protein, 173 aa, Homo sapiens
MGSTVPRSASVLLLLLLLRRAEQPCGAELTFELPDNAKQCFHEEVEQGVKFSLDYQVITGGHYDVDCYVEDPQGNTIYRETKKQYDSFTYRAEVKGVYQFCFSNEFSTFSHKTVYFDFQVGDEPPILPDMGNRVTALTQRFRGAYWKEVDKMVDYMQPGGTPATEGLGRLAPS

SEQ ID NO: 13334 - protein, 186 aa, Homo sapiens
MAGVGAGPLRAMGRQALLLLALCATGAQGLYFHIGETEKRCFIEEIPDETMVIGNYRTQMWDKQKEVFLPSTPGLGMHVEVKDPDGKVVLSRQYGSEGRFTFTSHTPGDHQICLHSNSTRMALFAGGKLRVHLDIQVGEHANNYPEIAAKDKLTELQLRARQLLDQVEQIQKEQDYQRASAYLLVI

SEQ ID NO: 13335 - protein, 227 aa, Homo sapiens
MAGVGAGPLRAMGRQALLLLALCATGAQGLYFHIGETEKRCFIEEIPDETMVIGNYRTQMWDKQKEVFLPSTPGLGMHVEVKDPDGKVVLSRQYGSEGRFTFTSHTPGDHQICLHSNSTRMALFAGGKLRVHLDIQVGEHANNYPEIAAKDKLTELQLRARQLLDQVEQIQKEQDYQRYREERFRLTSESTNQRVLWWSIAQTVILILTGIWQMRHLKSFFEAKKLV

SEQ ID NO: 13336 - protein, 178 aa, Homo sapiens
MAGVGAGPLRAMGRQALLLLALCATGAQGLYFHIGETEKRCFIEEIPDETMVIGNYRTQMWDKQKEVFLPSTPGLGMHVEVKDPDGKVVLSRQYGSEGRFTFTSHTPGDHQICLHSNSTRMALFAGGKLYREERFRLTSESTNQRVLWWSIAQTVILILTGIWQMRHLKSFFEAKKLV

SEQ ID NO: 13337 - protein, 120 aa, Homo sapiens
MGDKIWLPFPVLLLAALPPVLLPGAAGFTPSLDSDFTFTLPAGQKECFYQPMPLKASLEIEYQVLDGAGLDIDFHLASPEGKTLVFEQRKSDGVHTCIRSKNGPGTAVHAYNPSTFRGQV

SEQ ID NO: 13338 - protein, 193 aa, Homo sapiens
MGDKIWLPFPVLLLAALPPVLLPGAAGFTPSLDSDFTFTLPAGQKECFYQPMPLKASLEIEYQVLDGAGLDIDFHLASPEGKTLVFEQRKSDGVHTVETEVGDYMFCFDNTFSTISEKVIFFELILDNMGEQAQEQEDWKKYITGTDILDMKLEDILDPIIKIASDVQIRLHLGIHQQHQVQTKQKWAHTNSA

SEQ ID NO: 13339 - protein, 229 aa, Homo sapiens
MGDKIWLPFPVLLLAALPPVLLPGAAGFTPSLDSDFTFTLPAGQKECFYQPMPLKASLEIEYQVLDGAGLDIDFHLASPEGKTLVFEQRKSDGVHTVETEVGDYMFCFDNTFSTISEKVIFFELILDNMGEQAQEQEDWKKYITGTDILDMKLEDILESINSIKSRLSKSGHIQTLLRAFEARDRNIQESNFDRVNFWSMVNLVVMVVVSAIQVYMLKSLFEDKRKSRT

SEQ ID NO: 13340 - protein, 162 aa, Homo sapiens
MGDKIWLPFPVLLLAALPPVLLPGAAGFTPSLDSDFTFTLPAGQKECFYQPMPLKASLEIEYQVLDGAGLDIDFHLASPEGKTLVFEQRKSDGVHTVETEVGDYMFCFDNTFSTISEKVIFFELILDNMGEQAQEQEDWKKYITGTDILDMKLEDILVSMVF

SEQ ID NO: 13341 - protein, 82 aa, Homo sapiens
MPRPGSAQRWAAVAGRWGCRLLALLLLVPGPGGASEITFELPDNAKQCFYEDIAQGTKCTLEFQVITGGHYDVDCRLEDPDG

SEQ ID NO: 13342 - protein, 224 aa, Homo sapiens
MPRPGSAQRWAAVAGRWGCRLLALLLLVPGPGGASEITFELPDNAKQCFYEDIAQGTKCTLEFQVITGGHYDVDCRLEDPDGKVLYKEMKKQYDSFTFTASKNGTYKFCFSNEFSTFTHKTVYFDFQVGEDPPLFPSENRVSALTQMESACVSIHEALKSVIDYQTHFRLREAQGRSRAEDLNTRVAYWSVGEALILLVVSIGQVFLLKSFFSDKRTTTTRVGS

SEQ ID NO: 13343 - protein, 188 aa, Homo sapiens
MPRPGSAQRWAAVAGRWGCRLLALLLLVPGPGGASEITFELPDNAKQCFYEDIAQGTKCTLEFQVITGGHYDVDCRLEDPDGKVLYKEMKKQYDSFTFTASKNGTYKFCFSNEFSTFTHKTVYFDFQVGEDPPLFPSENRVSALTQMESACVSIHEALKSVIDYQTHFRLREAQGRSRAEDLNTRVAY

SEQ ID NO: 13344 - protein, 404 aa, Homo sapiens
MPRPGSAQRWAAVAGRWGCRLLALLLLVPGPGGASEITFELPDNAKQCFYEDIAQGTKCTLEFQVITGGHYDVDCRLEDPDGKVLYKEMKKQYDSFTFTASKNGTYKFCFSNEFSTFTHKTVYFDFQVGEDPPLFPSENRVSALTQMESACVSIHEALKSVIDYQTHFRLREAQGRSRAEDLNTRVAYWHSVDTSPGYHESDSKKSEDLSLCNVAEHSNTTEGPTGKQEGAQSVEEMFEEEAEEEVFLKFVILHAEDDTDEALRVQNLLQDDFGIKPGIIFAEMPCGRQHLQNLDDAVNGSAWTILLLTENFLRDTWCNFQFYTSLMNSVNRQHKYNSVIPMRPLNNPLPRERTPFALQTINALEEESRGFPTQVERIFQESVYKTQQTIWKETRNMVQRQFIA

SEQ ID NO: 13345 - protein, 72 aa, Homo sapiens
MKRSLQALYCQLLSFLLILALTEALAFAIQEPSPRESLQVLPSGTPPGTMVTAPHSSTRHTSVVMLTPNPDG

SEQ ID NO: 13346 - protein, 149 aa, Homo sapiens
MKRSLQALYCQLLSFLLILALTEALAFAIQEPSPRESLQVLPSGTPPGTMVTAPHSSTRHTSVVMLTPNPDGPPSQAAAPMATPTPRAEGHPPTHTISTIAATVTAPHSESSLSTGPAPAAMATTSSKPEGRPRGQAAPTILLTKPPGA

SEQ ID NO: 13347 - protein, 153 aa, Homo sapiens
MKRSLQALYCQLLSFLLILALTEALAFAIQEPSPRESLQVLPSGTPPGTMVTAPHSSTRHTSVVMLTPNPDGPPSQAAAPMATPTPRAEGHPPTHTISTIAATVTAPHSESSLSTGPAPAAMATTSSKPEGRPRGQAAPTILLTKPPGATSRP

SEQ ID NO: 13348 - protein, 575 aa, Homo sapiens
MKRSLQALYCQLLSFLLILALTEALAFAIQEPSPRESLQVLPSGTPPGTMVTAPHSSTRHTSVVMLTPNPDGPPSQAAAPMATPTPRAEGHPPTHTISTIAATVTAPHSESSLSTGPAPAAMATTSSKPEGRPRGQAAPTILLTKPPGATSRPTTAPPRTTTRRPPRPPGSSRKGAGNSSRPVPPAPGGHSRSKEGQRGRNPSSTPLGQKRPLGKIFQIYKGNFTGSVEPEPSTLTPRTPLWGYSSSPQPQTVAATTVPSNTSWAPTTTSLGPAKDKPGLRRAAQGGGSTFTSQGGTPDATAASGAPVSPQAAPVPSQRPHHGDPQDGPSHSDSWLTVTPGTSRPLSTSSGVFTAATGPTPAAFDTSVSAPSQGIPQGASTTPQAPTHPSRVSESTISGAKEETVATLTMTDRVPSPLSTVVSTATGNFLNRLVPAGTWKPGTAGNISHVAEGDKPQHRATICLSKMDIAWVILAISVPISSCSVLLTVCCMKRKKKTANPENNLSYWNNTITMDYFNRHAVELPREIQSLETSEDQLSEPRSPANGDYRDTGMVLVNPFCQETLFVGNDQVSEI

SEQ ID NO: 13349 - protein, 575 aa, Homo sapiens; identical to SEQ ID NO: 13348

SEQ ID NO: 13350 - protein, 488 aa, Homo sapiens
MKRSLQALYCQLLSFLLILALTEALAFAIQEPSPRESLQVLPSGTPPGTMVTAPHSSTRHTSVVMLTPNPDGPPSQAAAPMATPTPRAEGHPPTHTISTIAATVTAPHSESSLSTGPAPAAMATTSSKPEGRPRGQAAPTILLTKPPGATSRPTTAPPRTTTRRPPRPPGSSRKGAGNSSRPVPPAPGGHSRSKEGQRGRNPSSTPLGQKRPLGKIFQIYKGNFTGSVEPEPSTLTPRTPLWGYSSSPQPQTVAATTVPSNTSWAPTTTSLGPAKDKPGLRRAAQGGGSTFTSQGGTPDATAASGAPVSPQAAPVPSQRPHHGDPQDGPSHSDSWLTVTPGTSRPLSTSSGVFTAATGPTPAAFDTSVSAPSQGIPQGASTTPQAPTHPSRVSESTISGAKEETVATLTMTDRVPSPLSTVVSTATGNFLNRLVPAGTWKPGTAGNISHVAEGDKPQHRATICLSKMDIAWVILAISVPISSCSDPIT

SEQ ID NO: 13351 - protein, 105 aa, Homo sapiens
MKRSLQALYCQLLTVLLTVCCMKRKKKTANPENNLSYWNNTITMDYFNRHAVELPREIQSLETSEDQLSEPRSPANGDYRDTGMVLVNPFCQETLFVGNDQVSEI

SEQ ID NO: 13352 - protein, 89 aa, Homo sapiens
MVTAPHSSTRHTSVVMLTPNPDGPPSQAAAPMATPTPRAEGHPPTHTISTIAATVTAPHSESSLSTGPAPAAMATTSSKPEGRPRGQAA

SEQ ID NO: 13353 - protein, 122 aa, Homo sapiens
MVTAPHSSTRHTSVVMLTPNPDGPPSQAAAPMATPTPRAEGHPPTHTISTIAATVTAPHSESSLSTGPAPAAMATTSSKPEGRPRGQAAPTILLTKPPGATSRPTTAPPRTTTRRPPRPPGS

SEQ ID NO: 13354 - protein, 51 aa, Homo sapiens
MATLSVIGSSSLIAYAVFHNIQKSPEIRPLFYLSFCDLLLGLCWLTETLLY

SEQ ID NO: 13355 - protein, 80 aa, Homo sapiens
MATLSVIGSSSLIAYAVFHNIQKSPEIRPLFYLSFCDLLLGLCWLTETLLYGASVANKDIICYNLQAVGQFWRLEGPRLR

SEQ ID NO: 13356 - protein, 80 aa, Homo sapiens; identical to SEQ ID NO: 13355

SEQ ID NO: 13357 - protein, 85 aa, Homo sapiens
MATLSVIGSSSLIAYAVFHNIQKSPEIRPLFYLSFCDLLLGLCWLTETLLYGASVANKDIICYNLQAVGQGRRGFAMFARLVLNA

SEQ ID NO: 13358 - protein, 106 aa, Homo sapiens
MATLSVIGSSSLIAYAVFHNIQKSPEIRPLFYLSFCDLLLGLCWLTETLLYGASVANKDIICYNLQAVGQIFYISSFLYTVNYIWYLYTELRMKHTQSGQSTSPLV

SEQ ID NO: 13359 - protein, 175 aa, Homo sapiens
MATLSVIGSSSLIAYAVFHNIQKSPEIRPLFYLSFCDLLLGLCWLTETLLYGASVANKDIICYNLQAVGQIFYISSFLYTVNYIWYLYTELRMKHTQSGQSTSPLVIDYTCRVCQMAFVFSSLIPLLLMTPVFCLGNTSECFQNFSQSHKCILMHSPPSAMAELPPSANTSVCST

SEQ ID NO: 13360 - protein, 337 aa, Homo sapiens
MATLSVIGSSSLIAYAVFHNIQKSPEIRPLFYLSFCDLLLGLCWLTETLLYGASVANKDIICYNLQAVGQIFYISSFLYTVNYIWYLYTELRMKHTQSGQSTSPLVIDYTCRVCQMAFVFSSLIPLLLMTPVFCLGNTSECFQNFSQSHKCILMHSPPSAMAELPPSANTSVCSTLYFYGIAIFLGSFVLSLLTIMVLLIRAQTLYKKFVKSTGFLGSEQWAVIHIVDQRVRFYPVAFFCCWGPAVILMIIKLTKPQDTKLHMALYVLQALTATSQGLLNCGVYGWTQHKFHQLKQEARRDADTQTPLLCSQKRFYSRGLNSLESTLTFPASTSTIF

SEQ ID NO: 13361 - protein, 302 aa, Homo sapiens
MATLSVIGSSSLIAYAVFHNIQKSPEIRPLFYLSFCDLLLGLCWLTETLLYGASVANKDIICYNLQAVGQVIDYTCRVCQMAFVFSSLIPLLLMTPVFCLGNTSECFQNFSQSHKCILMHSPPSAMAELPPSANTSVCSTLYFYGIAIFLGSFVLSLLTIMVLLIRAQTLYKKFVKSTGFLGSEQWAVIHIVDQRVRFYPVAFFCCWGPAVILMIIKLTKPQDTKLHMALYVLQALTATSQGLLNCGVYGWTQHKFHQLKQEARRDADTQTPLLCSQKRFYSRGLNSLESTLTFPASTSTIF

SEQ ID NO: 13362 - protein, 74 aa, Homo sapiens
MATLSVIGSSSLIAYAVFHNIQKSPEIRPLFYLSFCDLLLGLCWLTETLLYGASVANKDIICYNLQAVGQVSAT

SEQ ID NO: 13363 - protein, 151 aa, Homo sapiens
MFPKLQSEPQVLLIRAQTLYKKFVKSTGFLGSEQWAVIHIVDQRVRFYPVAFFCCWGPAVILMIIKLTKPQDTKLHMALYVLQALTATSQGLLNCGVYGWTQHKFHQLKQEARRDADTQTPLLCSQKRFYSRGLNSLESTLTFPASTSTIF

SEQ ID NO: 13364 - protein, 104 aa, Homo sapiens
MKHTQSGQSTSPLVIDYTCRVCQMAFVFSSLIPLLLMTPVFCLGNTSECFQNFSQSHKCILMHSPPSAMAELPPSANTSVCSTLYFYGIAIFLGSFVLSLLTIM

SEQ ID NO: 13365 - protein, 245 aa, Homo sapiens
MKHTQSGQSTSPLVIDYTCRVCQMAFVFSSLIPLLLMTPVFCLGNTSECFQNFSQSHKCILMHSPPSAMAELPPSANTSVCSTLYFYGIAIFLGSFVLSLLTIMVLLIRAQTLYKKFVKSTGFLGSEQWAVIHIVDQRVRFYPVAFFCCWGPAVILMIIKLTKPQDTKLHMALYVLQALTATSQGLLNCGVYGWTQHKFHQLKQEARRDADTQTPLLCSQKRFYSRGLNSLESTLTFPASTSTIF

SEQ ID NO: 13366 - protein, 28 aa, Homo sapiens
MVSAAAPSLLILLLLLLGSVPATDARSV

SEQ ID NO: 13367 - protein, 44 aa, Homo sapiens
MVSAAAPSLLILLLLLLGSVPATDARSVPLKATFLEDVAGSGEA

SEQ ID NO: 13368 - protein, 140 aa, Homo sapiens
MVSAAAPSLLILLLLLLGSVPATDARSVPLKATFLEDVAGSGEAEGSSASSPSLPPPWTPALSPTSMGPQPITLGGPSPPTNFLDGIVDFFRQYVMLIAVVGSLAFLLMFIVCAAVITRQKQKASAYYPSSFPKKKYVDQ

SEQ ID NO: 13369 - protein, 283 aa, Homo sapiens
MVSAAAPSLLILLLLLLGSVPATDARSVPLKATFLEDVAGSGEAEGSSASSPSLPPPWTPALSPTSMGPQPITLGGPSPPTNFLDGIVDFFRQYVMLIAVVGSLAFLLMFIVCAAVITRQKQKASAYYPSSFPKKKYVDQSDRAGGPRAFSEVPDRAPDSRPEEALDSSRQLQADILAATQNLKSPTRAALGGGDGARMVEGRGAEEEEKGSQEGDQEVQGHGVPVETPEAQEEPCSGVLEGAVVAGEGQGELEGSLLLAQEAQGPVGPPESPCACSSVHPSV

SEQ ID NO: 13370 - protein, 70 aa, Homo sapiens
MASDLIRTILAVALISKLGTAVDAELMPSGAILQNKRENLPRVCHALAFLGMARCQDLFLVRLQGWKLGT

SEQ ID NO: 13371 - protein, 130 aa, Homo sapiens
MASDLIRTILAVALISKLGTAVDAELMPSGAILQNKRENLPRVCHALAFLGMARCQDLFLVRLQGWKLGTRFQDGPRSTPQEEGGSPQRKRGMPVQIHFLLKSFLSSPITFAFISLARTVSLATAICKIV

SEQ ID NO: 13372 - protein, 130 aa, Homo sapiens; identical to SEQ ID NO: 13371

SEQ ID NO: 13373 - protein, 130 aa, Homo sapiens; identical to SEQ ID NO: 13371

SEQ ID NO: 13374 - protein, 258 aa, Homo sapiens
FFSLLATAILGAVSWQPTNGIFLSMFLIVLPLESMAHGLFHELGNCLGGTSVGYAIVIPTNFCSGHTHGTGEWALAGGDTLRLDTLIEWWREKNGSFCSRLIIVLDSENSTPWVKEVRKINDQYIAVQGAELIKTVDIEEADPPQLGDFTKDWVEYNCNSSNNICWTEKGRTVKAVYGVSKRWSDYTLHLPTGSDVAKHWMLHFPRITYPLVHLANWLCGLNLFWICKTCFRCLKRLKMSWFLPTVLDTGQGFKLVKS

SEQ ID NO: 13375 - protein, 697 aa, Homo sapiens
MCKSLRYCFSHCLYLAMTRLEEVNREVNMHSSVRYLGYLARINLLVAICLGLYVRWEKTANSLILVIFILGLFVLGIASILYYYFSMEAASLSLSNLWFGFLLGLLCFLDNSSFKNDVKEESTKYLLLTSIVLRILCSLVERISGYVRHRPTLLTTVEFLELVGFAIASTTMLVEKSLSVILLVVALAMLIIDLRMKSFLAIPNLVIFAVLLFFSSLETPKNPIAFACFFICLITDPFLDIYFSGLSVTERWKPFLYRGRICRRLSVVFAGMIELTFFILSAFKLRDTHLWYFVIPGFSIFGIFWMICHIIFLLTLWGFHTKLNDCHKVYFTHRTDYNSLDRIMASKGMRHFCLISEQLVFFSLLATAILGAVSWQPTNGIFLSMFLIVLPLESMAHGLFHELGNCLGGTSVGYAIVIPTNFCSPDGQPTLLPPEHVQELNLRSTGMLNAIQRFFAYHMIETYGCDYSTSGLSFDTLHSKLKAFLELRTVDGPRHDTYILYYSGHTHGTGEWALAGGDTLRLDTLIEWWREKNGSFCSRLIIVLDSENSTPWVKEVRKINDQYIAVQGAELIKTVDIEEADPPQLGDFTKDWVEYNCNSSNNICWTEKGRTVKAVYGVSKRWSDYTLHLPTGSDVAKHWMLHFPRITYPLVHLANWLCGLNLFWICKTCFRCLKRLKMSWFLPTVLDTGQGFKLVKS

SEQ ID NO: 13376 - protein, 697 aa, Homo sapiens; identical to SEQ ID NO: 13375

SEQ ID NO: 13377 - protein, 124 aa, Homo sapiens
MFLIVLPLESMAHGLFHELGNCLGGTSVGYAIVIPTNFCSPDGQPTLLPPEHVQELNLRSTGMLNAIQRFFAYHMIETYGCDYSTSGLSFDTLHSKLKAFLELRTVDGPRHDTYILYYSGHTHG

SEQ ID NO: 13378 - protein, 313 aa, Homo sapiens
MFLIVLPLESMAHGLFHELGNCLGGTSVGYAIVIPTNFCSPDGQPTLLPPEHVQELNLRSTGMLNAIQRFFAYHMIETYGCDYSTSGLSFDTLHSKLKAFLELRTVDGPRHDTYILYYSGHTHGTGEWALAGGDTLRLDTLIEWWREKNGSFCSRLIIVLDSENSTPWVKEVRKINDQYIAVQGAELIKTVDIEEADPPQLGDFTKDWVEYNCNSSNNICWTEKGRTVKAVYGVSKRWSDYTLHLPTGSDVAKHWMLHFPRITYPLVHLANWLCGLNLFWICKTCFRCLKRLKMSWFLPTVLDTGQGFKLVKS

SEQ ID NO: 13379 - protein, 112 aa, Homo sapiens
MRHFCLISEQLVFFSLLATAILGAVSWQPTNGIFLSMFLIVLPLESMAHGLFHELGNCLGGTSVGYAIVIPTNFCSPDGQPTLLPPEHVQELNLRSTGMLNAIQRFFAYHMI

SEQ ID NO: 13380 - protein, 111 aa, Homo sapiens
MEPRALVTALSLGLSLCSLGLLVTAIFTDHWYETDPRRHKESCERSRAGADPPDQKNRLMPLSHLLGPLEEVLLPGHRPGHRHPHPERYCAAMHGHQVPLFSAHPLAKHSF

SEQ ID NO: 13381 - protein, 297 aa, Homo sapiens
MEPRALVTALSLGLSLCSLGLLVTAIFTDHWYETDPRRHKESCERSRAGADPPDQKNRLMPLSHLPLRDSPPLGRRLLPGGPGRADPESWRSLLGLGGLDAECGRPLFATYSGLWRKCYFLGIDRDIDTLILKGIAQRCTAIKYHFSQPIRLRNIPFNLTKTIQQDEWHLLHLRRITAGFLGMAVAVLLCGCIVATVSFFWEESLTQHVAGLLFLMTGIFCTISLCTYAASISYDLNRLPKLIYSLPADVEHGYSWSIFCAWCSLGFIVAAGGLCIAYPFISRTKIAQLKSGRDSTV

SEQ ID NO: 13382 - protein, 233 aa, Homo sapiens
MALNNFLFAQCACYFLAFLFSFVVVVPLSENGHDFRGRCLLFTEGMWLSANLTVQERERFTVQEWGPPAACRFSLLASLLSLLLAAAHAWRTLFFLCKGHEGSFFSAFLNLLVSAFVVFLVFIASTIVSVGFTMWCDTITEKGTVPHSCEELQDIDLELGVDNSAFYDQFAIAQFGLWASWLAWLAITTLAFLKVYHNYRQEDLLDSLIHEKELLLARPSPRTSFQEEKSAVI

SEQ ID NO: 13383 - protein, 190 aa, Homo sapiens
MALNNFLFAQCACYFLAFLFSFVVVVPLSENGHDFRGRCLLFTEGMWLSANLTVQERERFTVQEWGPPAACRFSLLASLLSLLLAAAHAWRTLFFLCKGHEGSFFSAFLNLLVSAFVVFLVFIASTIVSVGFTMWCDTITEKGTVPHSCEELQDIDLELGVDNSAFYDQFAIAQGSLIDSHGVETPPGQS

SEQ ID NO: 13384 - protein, 197 aa, Homo sapiens
MALNNFLFAQCACYFLAFLFSFVVVVPLSENGHDFRGRCLLFTEGMWLSANLTVQERERFTVQEWGPPAACRFSLLASLLSLLLAAAHAWRTLFFLCKGHEGSFFSAFLNLLVSAFVVFLVFIASTIVSVGFTMWCDTITEKGTVPHSCEELQDIDLELGVDNSAFYDQFAIAQVGGSGQEGRLAMLGGGHLLLDIC

SEQ ID NO: 13385 - protein, 211 aa, Homo sapiens
MALNNFLFAQCACYFLAFLFSFVVVVPLSENGHDFRGRCLLFTEGMWLSANLTVQERERFTVQEWGPPAACRFSLLASLLSLLLAAAHAWRTLFFLCKGHEGSFFSAFLNLLVSAFVVFLVFIASTIVSVGFTMWCDTITEKGTVPHSCEELQDIDLELGVDNSAFYDQFAIAQVQFRTPGWPLKALAGRGWPEDASPGQEPSKGAGHGWA

SEQ ID NO: 13386 - protein, 182 aa, Homo sapiens
MCTPVRVSIVCVMGAVGAVWTAPLPLPWAPTPSIHLREEGAAFPFCRVCVLRPRRSKWRSWDVNLGPRRRGLLGCGPCPSGKPRVHLQRTRSGAGAEAGGLPTRGSMRGCPFLGSSAAKCSLLLRPPSRGEASPWLPEFMTHPVHHQQLACVSGWLGTSLLEATCLGPHGGSWWGHHPGSRE

SEQ ID NO: 13387 - protein, 78 aa, Homo sapiens
  SITE 1: note = misc_feature - Xaa can be any naturally occurring amino acid
XPDPREGAAAGPAVPTHLLPRGEERCHLGTVQAGGAGPDLPAALGGTGLPGEAAGGLCLGPGHMQPCVCPLDATCSEP

SEQ ID NO: 13388 - protein, 172 aa, Homo sapiens
MCTSGQIIGSLLVLSVLEIGLGVSSVAVGAVSFSLALREHKPQLGDSSPFLLCGICGILCAKKKSGLVMILFSACCICGLIGGILNFQFLRAVTKKTSSLYPLHLASMSLACIGIGGCTLSSWLTCRLASYEQRRMFSEREHSLHHSHEMAEKEITDNMSNGGPQLIFNGRV

SEQ ID NO: 13389 - protein, 179 aa, Homo sapiens
MCTSGQIIGSLLVLSVLEIGLGVSSVAVGAVSFSLALREHKPQLGDSSPFLLCGICGILCAKKKSGLVMILFSACCICGLIGGILNFQFLRAVTKKTSSLYPLHLASMSLACIGIGGCTLSSWLTCRLASYEQRRMFSEREHSLHHSHEMAEKRLRAIEITDLPSCPVVPPTPELPTRK

SEQ ID NO: 13390 - protein, 104 aa, Homo sapiens
MILFSACCICGLIGGILNFQFLRAVTKKTSSLYPLHLASMSLACIGIGGCTLSSWLTCRLASYEQRRMFSEREHSLHHSHEMAEKEITDNMSNGGPQLIFNGRV

SEQ ID NO: 13391 - protein, 89 aa, Homo sapiens
MILFSACCICGLIGGILNFQFLRAVTKKTSSLYPLHLASMSLACIGIGGCTLSSWLTCRLASYEQRRMFSEREHSLHHSHEMAEKIEGY

SEQ ID NO: 13392 - protein, 111 aa, Homo sapiens
MILFSACCICGLIGGILNFQFLRAVTKKTSSLYPLHLASMSLACIGIGGCTLSSWLTCRLASYEQRRMFSEREHSLHHSHEMAEKRLRAIEITDLPSCPVVPPTPELPTRK

SEQ ID NO: 13393 - protein, 34 aa, Homo sapiens
MASRVLAALIVASVVGLAELYVMVRAMEGELGEL

SEQ ID NO: 13394 - protein, 125 aa, Homo sapiens
MASSLLAGERLVRALGPGGELEPERLPRKLRAELEAALGKKHKGGDSSSGPQRLVSFRLIRDLHQHLRERDSKLYLHELLEGSEIYLPEVVKPPRNPELVARLEKIKIQLANEEYKRITRNVTCQ

SEQ ID NO: 13395 - protein, 208 aa, Homo sapiens
MASSLLAGERLVRALGPGGELEPERLPRKLRAELEAALGKKHKGGDSSSGPQRLVSFRLIRDLHQHLRERDSKLYLHELLEGSEIYLPEVVKPPRNPELVARLEKIKIQLANEEYKRITRNVTCQDTRHGGTLSDLGKQVRSLKALVITIFNFIVTVVAAFVCTYLGSQYIFTEMASRVLAALIVASVVGLAELYVMVRAMEGELGEL

SEQ ID NO: 13396 - protein, 89 aa, Homo sapiens
MASSLLAGERLVRALGPGGELEPERLPRKLRAELEAALGKKHKGGDSSSGPQRLVSFRLIRDLHQHLRERGEPQSPVREPRTSCPAGED

SEQ ID NO: 13397 - protein, 124 aa, Homo sapiens [sequence omitted]

SEQ ID NO: 13398 - protein, 88 aa, Homo sapiens
MEEGGNLGGLIKMVHLLVLSGAWGMQMWVTFVSGFLLFRSLPRHTFGLVQSKLFPFYFHISMGCAFINLCILASQHAWAQLTFWEASQ

SEQ ID NO: 13399 - protein, 107 aa, Homo sapiens
MEEGGNLGGLIKMVHLLVLSGAWGMQMWVTFVSGFLLFRSLPRHTFGLVQSKLFPFYFHISMGCAFINLCILASQHAWAQLTFWEASQLYLLFLSLTLATVNARWLE

SEQ ID NO: 13400 - protein, 170 aa, Homo sapiens
MEEGGNLGGLIKMVHLLVLSGAWGMQMWVTFVSGFLLFRSLPRHTFGLVQSKLFPFYFHISMGCAFINLCILASQHAWAQLTFWEASQLYLLFLSLTLATVNARWLEPRTTAAMWALQTVEKERGLGGEVPGSHQGPDPYRQLREKDPKYSALRQNFFRYHGLSSLCNLG

SEQ ID NO: 13401 - protein, 189 aa, Homo sapiens
MEEGGNLGGLIKMVHLLVLSGAWGMQMWVTFVSGFLLFRSLPRHTFGLVQSKLFPFYFHISMGCAFINLCILASQHAWAQLTFWEASQLYLLFLSLTLATVNARWLEPRTTAAMWALQTVEKERGLGGEVPGSHQGPDPYRQLREKDPKYSALRQNFFRYHGLSSLCNLGCVLSNGLCLAGLALEIRSL

SEQ ID NO: 13402 - protein, 189 aa, Homo sapiens; identical to SEQ ID NO: 13401

SEQ ID NO: 13403 - protein, 189 aa, Homo sapiens; identical to SEQ ID NO: 13401

SEQ ID NO: 13404 - protein, 189 aa, Homo sapiens; identical to SEQ ID NO: 13401

SEQ ID NO: 13405 - protein, 189 aa, Homo sapiens; identical to SEQ ID NO: 13401

SEQ ID NO: 13406 - protein, 189 aa, Homo sapiens; identical to SEQ ID NO: 13401

SEQ ID NO: 13407 - protein, 189 aa, Homo sapiens; identical to SEQ ID NO: 13401

SEQ ID NO: 13408 - protein, 189 aa, Homo sapiens; identical to SEQ ID NO: 13401

SEQ ID NO: 13409 - protein, 120 aa, Homo sapiens
MGCAFINLCILASQHAWAQLTFWEASQLYLLFLSLTLATVNARWLEPRTTAAMWALQTVEKERGLGGEVPGSHQGPDPYRQLREKDPKYSALRQNFFRYHGLSSLCNLGCVLSNGLCLAG

SEQ ID NO: 13410 - protein, 128 aa, Homo sapiens
MGCAFINLCILASQHAWAQLTFWEASQLYLLFLSLTLATVNARWLEPRTTAAMWALQTVEKERGLGGEVPGSHQGPDPYRQLREKDPKYSALRQNFFRYHGLSSLCNLGCVLSNGLCLAGLALEIRSL

SEQ ID NO: 13411 - protein, 106 aa, Homo sapiens
MQRLPAATRATLILSLAFASLHSACSAASSSNSSSLTAHHPDPGTLEQCLNVDFCPQAARCCRTGVDEYGWIAAAVGWSLWFLTLILLCVDKLMKLTPDEPKDLQA

SEQ ID NO: 13412 - protein, 83 aa, Homo sapiens
MQRLPAATRATLILSLAFASLHSACSADVDFCPQAARCCRTGVDEYGWIAAAVGWSLWFLTLILLCVDKLMKLTPDEPKDLQA

SEQ ID NO: 13413 - protein, 107 aa, Homo sapiens
MQRLPAATRATLILSLAFASLHSACSAEASSSNSSSLTAHHPDPGTLEQCLNVDFCPQAARCCRTGVDEYGWIAAAVGWSLWFLTLILLCVDKLMKLTPDEPKDLQA

SEQ ID NO: 13414 - protein, 105 aa, Homo sapiens
MQRLPAATRATLILSLAFASLHSACSAEASSSNSSSLTAHHPDPGTLEQCLRSGYLANLRGEADQLWKFCTVLCFWESRRSSSRIALMREAEEWPGWRSSVELVG

SEQ ID NO: 13415 - protein, 49 aa, Homo sapiens
MALPPGPAALRHTLLLLPALLSSAQYQPCLSPSQRPPAVFQVGGSWSHK

SEQ ID NO: 13416 - protein, 40 aa, Homo sapiens
MALPPGPAALRHTLLLLPALLSSGGPGTPRLAWYLDGQLQ

SEQ ID NO: 13417 - protein, 170 aa, Homo sapiens
MALPPGPAALRHTLLLLPALLSSGGPGTPRLAWYLDGQLQEASTSRLLSVGGEAFSGGTSTFTVTAHRAQHELNCSLQDPRSGRSANASVILNVQFKPEIAQVGAKYQEAQGPGLLVVLFALVRANPPANVTWIDQDGPVTVNTSDFLVLDAQNYPWLTNHTVQLQLRSL

SEQ ID NO: 13418 - protein, 37 aa, Homo sapiens
MALPPGPAALRHTLLLLPALLSSGPQKWPISQRLCHP

SEQ ID NO: 13419 - protein, 168 aa, Homo sapiens
MALPPGPAALRHTLLLLPALLSSGWGELEPQIDGQTWAERALRENERHAFTCRVAGGPGTPRLAWYLDGQLQEASTSRLLSVGGEAFSGGTSTFTVTAHRAQHELNCSLQDPRSGRSANASVILNVQCPSRHPSLISSDSNNLKLNNVRLPRENMSLPSNLQLNDLTP

SEQ ID NO: 13420 - protein, 138 aa, Homo sapiens
MALPPGPAALRHTLLLLPALLSSGWGELEPQIDGQTWAERALRENERHAFTCRVAGGPGTPRLAWYLDGQLQEASTSRLLSVGGEAFSGGTSTFTVTAHRAQHELNCSLQDPRSGRSANASVILNVQFKPEIAQVGAK

SEQ ID NO: 13421 - protein, 366 aa, Homo sapiens
MALPPGPAALRHTLLLLPALLSSGWGELEPQIDGQTWAERALRENERHAFTCRVAGGPGTPRLAWYLDGQLQEASTSRLLSVGGEAFSGGTSTFTVTAHRAQHELNCSLQDPRSGRSANASVILNVQFKPEIAQVGAKYQEAQGPGLLVVLFALVRANPPANVTWIDQDGPVTVNTSDFLVLDAQNYPWLTNHTVQLQLRSLAHNLSVVATNDVGVTSASLPAPGLLATRVEVPLLGIVVAAGLALGTLVGFSTLVACLVCRKEKKTKGPSRHPSLISSDSNNLKLNNVRLPRENMSLPSNLQLNDLTPDSRAVKPADRQMAQNNSRPELLDPEPGGLLTSQGFIRLPVLGYIYRVSSVSSDEIWL

SEQ ID NO: 13422 - protein, 351 aa, Homo sapiens
MALPPGPAALRHTLLLLPALLSSGWGELEPQIDGQTWAERALRENERHAFTCRVAGGPGTPRLAWYLDGQLQEASTSRLLSVGGEAFSGGTSTFTVTAHRAQHELNCSLQDPRSGRSANASVILNVQFKPEIAQVGAKYQEAQGPGLLVVLFALVRANPPANVTWIDQDGPVTVNTSDFLVLDAQNYPWLTNHTVQLQLRSLAHNLSVVATNDVGVTSASLPAPGLLATRVEVPLLGIVVAAGLALGTLVGFSTLVACLVCRKEKKTKGPSRHPSLISSDSNNLKLNNVRLPRENMSLPSNLQLNDLTPDSRAVKPADRQMAQNNSRPELLDPEPGGLLTSQGRRNQDKDA

SEQ ID NO: 13423 - protein, 381 aa, Homo sapiens
MALPPGPAALRHTLLLLPALLSSGWGELEPQIDGQTWAERALRENERHAFTCRVAGGPGTPRLAWYLDGQLQEASTSRLLSVGGEAFSGGTSTFTVTAHRAQHELNCSLQDPRSGRSANASVILNVQFKPEIAQVGAKYQEAQGPGLLVVLFALVRANPPANVTWIDQDGPVTVNTSDFLVLDAQNYPWLTNHTVQLQLRSLAHNLSVVATNDVGVTSASLPAPGLLATRVEVPLLGIVVAAGLALGTLVGFSTLVACLVCRKEKKTKGPSRHPSLISSDSNNLKLNNVRLPRENMSLPSNLQLNDLTPDSRVKPADRQMAQNNSRPELLDPEPGGLLTSQACLLHHGTPALTNPWLPHQQEGALPGGWSPQAHNSTVWKL

SEQ ID NO: 13424 - protein, 322 aa, Homo sapiens
MALPPGPAALRHTLLLLPALLSSGWGELEPQIDGQTWAERALRENERHAFTCRVAGGPGTPRLAWYLDGQLQEASTSRLLSVGGEAFSGGTSTFTVTAHRAQHELNCSLQDPRSGRSANASVILNVQFKPEIAQVGAKYQEAQGPGLLVVLFALVRANPPANVTWIDQDGPVTVNTSDFLVLDAQNYPWLTNHTVQLQLRSLAHNLSVVATNDVGVTSASLPAPGPSRHPSLISSDSNNLKLNNVRLPRENMSLPSNLQLNDLTPDSRAVKPADRQMAQNNSRPELLDPEPGGLLTSQGFIRLPVLGYIYRVSSVSSDEIWL

SEQ ID NO: 13425 - protein, 306 aa, Homo sapiens
MALPPGPAALRHTLLLLPALLSSGWGELEPQIDGQTWAERALRENERHAFTCRVAGGPGTPRLAWYLDGQLQEASTSRLLSVGGEAFSGGTSTFTVTAHRAQHELNCSLQDPRSGRSANASVILNVQFKPEIAQVGAKYQEAQGPGLLVVLFALVRANPPANVTWIDQDGPVTVNTSDFLVLDAQNYPWLTNHTVQLQLRSLAHNLSVVATNDVGVTSASLPAPGPSRHPSLISSDSNNLKLNNVRLPRENMSLPSNLQLNDLTPDSRVKPADRQMAQNNSRPELLDPEPGGLLTSQGRRNQDKDA

SEQ ID NO: 13426 - protein, 322 aa, Homo sapiens; identical to SEQ ID NO: 13424

SEQ ID NO: 13427 - protein, 322 aa, Homo sapiens; identical to SEQ ID NO: 13424

SEQ ID NO: 13428 - protein, 167 aa, Homo sapiens
MALPPGPAALRHTLLLLPALLSSGWGELEPQIDGQTWAERALRENERHAFTCRVAGGPGTPRLAWYLDGQLQEASTSRLLSVGGEAFSGGTSTFTVTAHRAQHELNCSLQDPRSGRSANASVILNVQWLLATRVEVPLLGIVVAAGLALGTLVGFSTLVACLVCRKE

SEQ ID NO: 13429 - protein, 218 aa, Homo sapiens
MALPPGPAALRHTLLLLPALLSSVKPEIAQVGAKYQEAQGPGLLVVLFALVRANPPANVTWIDQDGPVTVNTSDFLVLDAQNYPWLTNHTVQLQLRSLAHNLSVVATNDVGVTSASLPAPGPSRHPSLISSDSNNLKLNNVRLPRENMSLPSNLQLNDLTPDSRAVKPADRQMAQNNSRPELLDPEPGGLLTSQGFIRLPVLGYIYRVSSVSSDEIWL

SEQ ID NO: 13430 - protein, 200 aa, Homo sapiens
  SITE 1: note = misc_feature - Xaa can be any naturally occurring amino acid
XDQDGPVTVNTSDFLVLDAQNYPWLTNHTVQLQLRSLAHNLSVVATNDVGVTSASLPAPGLLATRVEVPLLGIVVAAGLALGTLVGFSTLVACLVCRKEKKTKGPSRHPSLISSDSNNLKLNNVRLPRENMSLPSNLQLNDLTPDSRVKPADRQMAQNNSRPELLDPEPGGLLTSQGFIRLPVLGYIYRVSSVSSDEIWL

SEQ ID NO: 13431 - protein, 195 aa, Homo sapiens
  SITE 1: note = misc_feature - Xaa can be any naturally occurring amino acid
XLLRRRSGREPVKPEIAQVGAKYQEAQGPGLLVVLFALVRANPPANVTWIDQDGPVTVNTSDFLVLDAQNYPWLTNHTVQLQLRSLAHNLSVVATNDVGVTSASLPAPGPSRHPSLISSDSNNLKLNNVRLPRENMSLPSNLQLNDLTPDSRAVKPADRQMAQNNSRPELLDPEPGGLLTSQGFIRLPVLGYIYR

SEQ ID NO: 13432 - protein, 113 aa, Homo sapiens
MEERAQHCLSRLLDNSALKQQELPIHRLYFTARRVLFVFFATGIFCLCMGIILILSARSTQEIEINYTRICANCAKLRENASNFDKECTCSIPFYLSGKMMVGEIQETRLTLH

SEQ ID NO: 13433 - protein, 291 aa, Homo sapiens
MDSPWDELALAFSRTSMFPFFDIAHYLVSVMAVKRQPGAAALAWKNPISSWFTAMLHCFGGGILSCLLLAEPPLKFLANHTNILLASSIWYITFFCPHDLVSQGYSYLPVQLLASGMKEVTRTWKIVGGVTHANSYYKNGWIVMIAIGWARGAGGTIITNFERLVKGDWKPEGDEWLKMSYPAKVTLLGSVIFTFQHTQHLAISKHNLMFLYTIFIVATKITMMTTQTSTMTFAPFEDTLSWMLFGWQQPFSSCEKKSEAKSPSNGVGSLASKPVDVASDNVKKKHTKKNE

SEQ ID NO: 13434 - protein, 35 aa, Homo sapiens
MLHCFGGGILSCLLLAEPPLKFLANHTNILLASSI

SEQ ID NO: 13435 - protein, 237 aa, Homo sapiens
MLHCFGGGILSCLLLAEPPLKFLANHTNILLASSIWYITFFCPHDLVSQGYSYLPVQLLASGMKEVTRTWKIVGGVTHANSYYKNGWIVMIAIGWARGAGGTIITNFERLVKGDWKPEGDEWLKMSYPAKVTLLGSVIFTFQHTQHLAISKHNLMFLYTIFIVATKITMMTTQTSTMTFAPFEDTLSWMLFGWQQPFSSCEKKSEAKSPSNGVGSLASKPVDVASDNVKKKHTKKNE

SEQ ID NO: 13436 - protein, 162 aa, Homo sapiens
  SITE 1: note = misc_feature - Xaa can be any naturally occurring amino acid
XSCLLLAEPPLKFLANHTNILLASSIWYITFFCPHDLVSQGYSYLPVQLLASGMKEVTRTWKIVGGVTHANSYYKNGWIVMIAIGWARGAGGTIITNFERLVKGDWKPEGDEWLKMSYPAKVTLLGSVIFTFQHTQHLAISKHNLMFLYTIFIVATKSLNWR

SEQ ID NO: 13437 - protein, 81 aa, Homo sapiens
  SITE 1: note = misc_feature - Xaa can be any naturally occurring amino acid
XWIVMIAIGWARGAGGTIITNFERLVKGDWKPEGDEWLKMSYPAKVTLLGSVIFTFQHTQHLAISKHNLMFLYTIFIVATK

SEQ ID NO: 13438 - protein, 197 aa, Homo sapiens
LRATPWFLTSLGRAALDLAIIFLSCVMKSKMRQALGFAKEARESPDTQALLTCAEKEEENQENLDWVPLTTLSHCKSLRTMTAISRYMELTIEPVQQAGCSATRLPGDGQTSAGDASLQDPPSYPPVQVIRARVSSGSSSEVSSINSDLEQKYWEALNSEQWDPEDVNLEGSKENVELLGSQVHQDSVRTAHLSDDD

SEQ ID NO: 13439 - protein, 150 aa, Homo sapiens
MFILFPVCGSKFKSNSDREARERKRRRQLRASVFALALPLSLGPCWALWVAVPKASATIRGPQRRLLASLLQENTEILGYLLGSVAAFGSWASRIPPLSRIMESRCVAQAGVQWRDLGSLQPSPPNFKQFSCLSLPSSWDYSCQWSCRSC

SEQ ID NO: 13440 - protein, 113 aa, Homo sapiens
MFILFPVCGSKFKSNSDREARERKRRRQLRASVFALALPLSLGPCWALWVAVPKASATIRGPQRRLLASLLQENTEILGYLLGSVAAFGSWASRIPPLSRIVRPGVGMGLWVT

SEQ ID NO: 13441 - protein, 121 aa, Homo sapiens
MGEAPSPAPALWDWDYLDRCFARHRVCISFGLWICASSCWIAAHALLLYLRCAQKPRQDQSALCAACCLLTSLCDTVGALLARQLTIQSVDPNSSLIQIGKPERGRGGGSSGPVCLPWPCR

SEQ ID NO: 13442 - protein, 475 aa, Homo sapiens
MGEAPSPAPALWDWDYLDRCFARHRVCISFGLWICASSCWIAAHALLLYLRCAQKPRQDQSALCAACCLLTSLCDTVGALLARQLTIQVFTGAYLAAIDLVNFMFILFPVCGSKFKSNSDREARERKRRRQLRASVFALALPLSLGPCWALWVAVPKASATIRGPQRRLLASLLQENTEILGYLLGSVAAFGSWASRIPPLSRIAPPPTLGITTQHEIWRGQMSKPSQSPSRSPSGHWRAAAQRQVLGTEMCRGKTFPSIHLWTRLLSALAGLLYASAIVAHDQHPEYLLRATPWFLTSLGRAALDLAIIFLSCVMKSKMRQALGFAKEARESPDTQALLTCAEKEEENQENLDWVPLTTLSHCKSLRTMTAISRYMELTIEPVQQAGCSATRLPGDGQTSAGDASLQDPPSYPPVQVIRARVSSGSSSEVSSINSDLEWDPEDVNLEGSKENVELLGSQVHQDSVRTAHLSDDD

SEQ ID NO: 13443 - protein, 428 aa, Homo sapiens
MGEAPSPAPALWDWDYLDRCFARHRVCISFGLWICASSCWIAAHALLLYLRCAQKPRQDQSALCAACCLLTSLCDTVGALLARQLTIQVFTGAYLAAIDLVNFMFILFPVCGSKFKSNSDREARERKRRRQLRASVFALALPLSLGPCWALWVAVPKASATIRGPQRRLLASLLQENTEILGYLLGSVAAFGSWASRIPPLSRICRGKTFPSIHLWTRLLSALAGLLYASAIVAHDQHPEYLLRATPWFLTSLGRAALDLAIIFLSCVMKSKMRQALGFAKEARESPDTQALLTCAEKEEENQENLDWVPLTTLSHCKSLRTMTAISRYMELTIEPVQQAGCSATRLPGDGQTSAGDASLQDPPSYPPVQVIRARVSSGSSSEVSSINSDLEWDPEDVNLEGSKENVELLGSQVHQDSVRTAHLSDDD

SEQ ID NO: 13444 - protein, 396 aa, Homo sapiens
MGEAPSPAPALWDWDYLDRCFARHRVCISFGLWICASSCWIAAHALLLYLRCAQKPRQDQSALCAACCLLTSLCDTVGALLARQLTIQVFTGAYLAAIDLVNFMFILFPVCGSKFKSNSDREARERKRRRQLRASVFALALPLSLGPCWALWVAVPKASATIRGPQRRLLASLLQENTEILGYLLGSVAAFGSWASRIPPLSRICRGKTFPSIHLWTRLLSALAGLLYASAIVAHDQHPEYLLRATPWFLTSLGRAALDLAIIFLSCVMKSKMRQALGFAKEARESPDTQALLTCAEKEEENQENLDWVPLTTLSHCKSLRTMTAISRYMELTIEPVQQAAVPPGCQVTGRRAPEMRPCRTPRRTLPFRSSGPGCLPAAPLRSPPSTPTWSGTLKM

SEQ ID NO: 13445 - protein, 438 aa, Homo sapiens
MGEAPSPAPALWDWDYLDRCFARHRVCISFGLWICASSCWIAAHALLLYLRCAQKPRQDQSALCAACCLLTSLCDTVGALLARQLTIQVFTGAYLAAIDLVNFMFILFPVCGSKFKSNSDREARERKRRRQLRASVFALALPLSLGPCWALWVAVPKASATIRGPQRRLLASLLQENTEILGYLLGSVAAFGSWASRIPPLSRICRGKTFPSIHLWTRLLSALAGLLYASAIVAHDQHPEYLLRATPWFLTSLGRAALDLAIIFLSCVMKSKMRQALGFAKEARESPDTQALLTCAEKEEENQENLDWVPLTTLSHCKSLRTMTAISRYMELTIEPVQQAGCSATRLPGDGQTSAGDASLQDPPSYPPVQVIRARVSSGSSSEVSSINSDLEKYWEALNSEQWDPEDVNLEGSKENVELLGSQVHQDSVRTAHLSDDD

SEQ ID NO: 13446 - protein, 119 aa, Homo sapiens
MKSKMRQALGFAKEARESPDTQALLTCAEKEEENQENLDWVPLTTLSHCKSLRTMTAISRYMELTIEPVQQAAVPPGCQVTGRRAPEMRPCRTPRRTLPFRSSGPGCLPAAPLSGTLKM

SEQ ID NO: 13447 - protein, 261 aa, Homo sapiens
NFMFILFPVCGSKFKSNSDREARERKRRRQLRASVFALALPLSLGPCWALWVAVPKASATIRGPQRRLLASLLQENTEILGYLLGSVAAFGSWASRIPPLSRISKMRQALGFAKEARESPDTQALLTCAEKEEENQENLDWVPLTTLSHCKSLRTMTAISRYMELTIEPVQQAGCSATRLPGDGQTSAGDASLQDPPSYPPVQVIRARVSSGSSSEVSSINSDLEWDPEDVNLEGSKENVELLGSQVHQDSVRTAHLSDDD

SEQ ID NO: 13448 - protein, 124 aa, Homo sapiens
GGRWPPADCGCCCRSCRSCRSCRCRRWVGRRSLSVRPPRGGSLLGPRPSRAHPCPHRWRWASRTAAATPRTSARPRPAGAACGTWACTPRSLHPPTMKLSRWPSPERKDQHSPRNPALSLGPRA

SEQ ID NO: 13449 - protein, 43 aa, Homo sapiens
MARGPLAARGLRLLLPLLPLLPLLPLPQVALGFADGSCDPSDQ

SEQ ID NO: 13450 - protein, 209 aa, Homo sapiens
MARGPLAARGLRLLLPLLPLLPLLPLPQVALGFADGSCDPSDQCPPQARWSSLWHVGLILLAVLLLLLCGVTAGCVRFCCLRKQAQAQPHLPPARQPCDVAVIPMDSDSPVHSTVTSYSSVQYPLGMRLPLPFGELDLDSMAPPAYSLYTPEPPPSYDEAVKMAKPREEGPALSQKPSPLLGASGLETTPVPQESGPNTQLPPCSPGAP

SEQ ID NO: 13451 - protein, 103 aa, Homo sapiens
MARGPLAARGLRLLLPLLPLLPLLPLPQVGRAAFSLGSATAGRVPARTTPLPGSPLSPQVALGFADGSCDPSDQCPPQARWSSLWHVGLILLAVLLLLLCGVT

SEQ ID NO: 13452 - protein, 194 aa, Homo sapiens
MERHCLLFILLTCLRWLCHDIPQGAGARWPRVSPVVEPCSPRLILLAVLLLLLCGVTAGCVRFCCLRKQAQAQPHLPPARQPCDVAVIPMDSDSPVHSTVTSYSSVQYPLGMRLPLPFGELDLDSMAPPAYSLYTPEPPPSYDEAVKMAKPREEGPALSQKPSPLLGASGLETTPVPQESGPNTQLPPCSPGAP

SEQ ID NO: 13453 - protein, 90 aa, Homo sapiens
MGVRVHVVAASALLYFILLSGTRCEENCGNPEHCLTTDWVHLWYIWLLVVIGALLLLCGLTSLCFRCCCLSRQQNGEDGGPPPCEVTVIA

SEQ ID NO: 13454 - protein, 183 aa, Homo sapiens
MGVRVHVVAASALLYFILLSGTRCEENCGNPEHCLTTDWVHLWYIWLLVVIGALLLLCGLTSLCFRCCCLSRQQNGEDGGPPPCEVTVIAFDHDSTLQSTITSLQSVFGPAARRILAVAHSHSSLGQLPSSLDTLPGYEEALHMSRFTVAMCGQKAPDLPPVPEEKQLPPTEKESTRIVDSWN

SEQ ID NO: 13455 - protein, 163 aa, Homo sapiens
MSWRPQPCCISSCCLTTDWVHLWYIWLLVVIGALLLLCGLTSLCFRCCCLSRQQNGEDGGPPPCEVTVIAFDHDSTLQSTITSLQSVFGPAARRILAVAHSHSSLGQLPSSLDTLPGYEEALHMSRFTVAMCGQKAPDLPPVPEEKQLPPTEKESTRIVDSWN

SEQ ID NO: 13456 - protein, 323 aa, Homo sapiens
MAAPKGSLWVRTQLGLPPLLLLTMALAGGSGTASAEAFDSVLGDTASCHRACQLTYPLHTYPKEEELYACQRGCRLFSICQFVDDGIDLNRTKLECESACTEAYSQSDEQYACHLGCQNQLPFAELRQEQLMSLMPKMHLLFPLTLVRSFWSDMMDSAQSFITSSWTFYLQADDGKIVIFQSKPEIQYAPHLEQEPTNLRESSLSKMSYLQMRNSQAHRNFLEDGESDGFLRCLSLNSGWILTTTLVLSVMVLLWICCATVATAVEQYVPSEKLSIYGDLEFMNEQKLNRYPASSLVVVRSKTEDHEEAGPLPTKVNLAHSEI

SEQ ID NO: 13457 - protein, 145 aa, Homo sapiens
MAAPKGSLWVRTQLGLPPLLLLTMALAGGSGTASAEAFDSVLGDTASCHRACQLTYPLHTYPKEEELYACQRGCRLFSICQFVDDGIDLNRTKLECESACTEAYSQSDEQYACHLGCQNQLPFAELRQEQVRNNTAFQTSLLRWH

SEQ ID NO: 13458 - protein, 285 aa, Homo sapiens
MAAPKGSLWVRTQLGLPPLLLLTMALAGGSGTASAEAFDSVLGDTASCHRACQLTYPLHTYPKVSASLYTVDHIEEELYACQRGCRLFSICQFVDDGIDLNRTKLECESACTEAYSQSDEQYACHLGCQNQLPFAELRQEQLMSLMPKMHLLFPLTLVRSFWSDMMDSAQSFITSSWTFYLQADDGKIVIFQSKPEIQYAPHLEQEPTNLRESSLSKMSYLQMRNSQAHRNFLEDGESDGFLRCLSLNSGWILTTTLVLSVMVLLWICCATVATAVEQYVPSEVN

SEQ ID NO: 13459 - protein, 192 aa, Homo sapiens
MSLMPKMHLLFPLTLVRSFWSDMMDSAQSFITSSWTFYLQADDGKIVIFQSKPEIQYAPHLEQEPTNLRESSLSKMSYLQMRNSQAHRNFLEDGESDGFLRCLSLNSGWILTTTLVLSVMVLLWICCATVATAVEQYVPSEKLSIYGDLEFMNEQKLNRYPASSLVVVRSKTEDHEEAGPLPTKVNLAHSEI

SEQ ID NO: 13460 - protein, 192 aa, Homo sapiens; identical to SEQ ID NO: 13459

SEQ ID NO: 13461 - protein, 192 aa, Homo sapiens; identical to SEQ ID NO: 13459

SEQ ID NO: 13462 - protein, 144 aa, Homo sapiens
MSLMPKMHLLFPLTLVRSFWSDMMDSAQSFITSSWTFYLQADDGKIVIFQSKPEIQYAPHLEQEPTNLRESSLSKMSYLQMRNSQAHRNFLEDGESDGFLRCLSLNSGWILTTTLVLSVMVLLWICCATVATAVEQYVPSEVNL

SEQ ID NO: 13463 - protein, 144 aa, Homo sapiens; identical to SEQ ID NO: 13462

SEQ ID NO: 13464 - protein, 180 aa, Homo sapiens
MATRGGAGVAMAVWSLLSARAVTAFLLLFLPRFLQAQTFSFPFQQPEKCDNNQYFDISALSCVPCGANQRQDARGTSCVCLPGFQMISNNGGPAIICKKCPENMKGVTEDGWNCISCPSDLTAEGKCHCPIGHILDSNSGKWLLTRRIFLVDAVSGRENDLGTQPRVIRVATQISLSVHL

SEQ ID NO: 13465 - protein, 147 aa, Homo sapiens
MATRGGAGVAMAVWSLLSARAVTAFLLLFLPRFLQAQTFSFPFQQPEKCDNNQYFDISALSCVPCGANQRQDARGTSCVCLPGFQMISNNGGPAIICKKCPENMKGVTEDGWNCISCPSDLTAEGKCHCPIGHILGSHSCPGWSVVV

SEQ ID NO: 13466 - protein, 995 aa, Homo sapiens
MATRGGAGVAMAVWSLLSARAVTAFLLLFLPRFLQAQTFSFPFQQPEKCDNNQYFDISALSCVPCGANQRQDARGTSCVCLPGFQMISNNGGPAIICKKCPENMKGVTEDGWNCISCPSDLTAEGKCHCPIGHILVERDINGTLLSQATCELCDGNENSFMVVNALGDRCVRCEPTFVNTSRSCACSEPNILTGGLCFSSTGNFPLRRISAARYGEVGMSLTSEWFAKYLQSSAAACWVYANLTSCQALGNMCVMNMNSYDFATFDACGLFQFIFENTAGLSTVHSISFWRQNLPWLFYGDQLGLAPQVLSSTSLPTNFSFKGENQNTKLKFVAASYDIRGNFLKWQTLEGGVLQLCPDTETRLNAAYSFGTTYQQNCEIPISKILIDFPTPIFYDVYLEYTDENQHQYILAVPVLNLNLQHNKIFVNQDSNSGKWLLTRRIFLVDAVSGRENDLGTQPRVIRVATQISLSVHLVPNTINGNIYPPLITIAYSDIDIKDANSQSVKVSFSVTYEMDHGEAHVQTDIALGVLGGLAVLASLLKTAGWKRRIGSPMIDLQTVVKFLVYYAGDLANVFFIITVGTGLYWLIFFKAQKSVSVLLPMPIQEERFVTYVGCAFALKALQFLHKLISQITIDVFFIDWERPKGKVLKAVEGEGGVRSATVPVSIWRTYFVANEWNEIQTVRKINSLFQVLTVLFFLEVVGFKNLALMDSSSSLSRNPPSYIAPYSCILRYAVSAALWLAIGIIQVVFFAVFYERFIEDKIRQFVDLCSMSNISVFLLSHKCFGYYIHGRSVHGHADTNMEEMNMNLKREAENLCSQRGLVPNTDGQTFEIAISNQMRQHYDRIHETLIRKNGPARLLSSSASTFEQSIKAYHMMNKFLGSFIDHVHKEMDYFIKDKLLLERILGMEFMEPMEKSIFYNDEGYSFSSVLYYGNEATLLIFDLLFFCVVDLACQNFILASFLTYLQQEIFRYIRNTVGQKNLASKTLVDQRFLI

SEQ ID NO: 13467 - protein, 119 aa, Homo sapiens
MATRGGAGVAMAVWSLLSARAVTAFLLLFLPRFLQAQTFSFPFQQPEKCDNNQYFDISALSCVPCGANQRQDARGTSCVCLPGFQMISNNGGPAIICKKCPENMVLQKMAGTAFLALVT

SEQ ID NO: 13468 - protein, 985 aa, Homo sapiens
MAVWSLLSARAVTAFLLLFLPRFLQAQTFSFPFQQPEKCDNNQYFDISALSCVPCGANQRQDARGTSCVCLPGFQMISNNGGPAIICKKCPENMKGVTEDGWNCISCPSDLTAEGKCHCPIGHILVERDINGTLLSQATCELCDGNENSFMVVNALGDRCVRCEPTFVNTSRSCACSEPNILTGGLCFSSTGNFPLRRISAARYGEVGMSLTSEWFAKYLQSSAAACWVYANLTSCQALGNMCVMNMNSYDFATFDACGLFQFIFENTAGLSTVHSISFWRQNLPWLFYGDQLGLAPQVLSSTSLPTNFSFKGENQNTKLKFVAASYDIRGNFLKWQTLEGGVLQLCPDTETRLNAAYSFGTTYQQNCEIPISKILIDFPTPIFYDVYLEYTDENQHQYILAVPVLNLNLQHNKIFVNQDSNSGKWLLTRRIFLVDAVSGRENDLGTQPRVIRVATQISLSVHLVPNTINGNIYPPLITIAYSDIDIKDANSQSVKVSFSVTYEMDHGEAHVQTDIALGVLGGLAVLASLLKTAGWKRRIGSPMIDLQTVVKFLVYYAGDLANVFFIITVGTGLYWLIFFKAQKSVSVLLPMPIQEERFVTYVGCAFALKALQFLHKLISQITIDVFFIDWERPKGKVLKAVEGEGGVRSATVPVSIWRTYFVANEWNEIQTVRKINSLFQVLTVLFFLEVVGFKNLALMDSSSSLSRNPPSYIAPYSCILRYAVSAALWLAIGIIQVVFFAVFYERFIEDKIRQFVDLCSMSNISVFLLSHKCFGYYIHGRSVHGHADTNMEEMNMNLKREAENLCSQRGLVPNTDGQTFEIAISNQMRQHYDRIHETLIRKNGPARLLSSSASTFEQSIKAYHMMNKFLGSFIDHVHKEMDYFIKDKLLLERILGMEFMEPMEKSIFYNDEGYSFSSVLYYGNEATLLIFDLLFFCVVDLACQNFILASFLTYLQQEIFRYIRNTVGQKNLASKTLVDQRFLI

SEQ ID NO: 13469 - protein, 397 aa, Homo sapiens
MKGVTEDGWNCISCPSDLTAEGKCHCPIGHILVERDINGTLLSQATCELCDGNENSFMVVNALGDRCVRCEPTFVNTSRSCACSEPNILTGGLCFSSTGNFPLRRISAARYGEVGMSLTSEWFAKYLQSSAAACWVYANLTSCQALGNMCVMNMNSYDFATFDACGLFQFIFENTAGLSTVHSISFWRQNLPWLFYGDQLGLAPQVLSSTSLPTNFSFKGENQNTKLKFVAASYDIRGNFLKWQTLEGGVLQLCPDTETRLNAAYSFGTTYQQNCEIPISKILIDFPTPIFYDVYLEYTDENQHQYILAVPVLNLNLQHNKIFVNQDSNSGKWLLTRRIFLVDAVSGRENDLGTQPRVIRVATQISLSVHLVPNTINGNIYPPLITIAYSDIDIKDA

SEQ ID NO: 13470 - protein, 914 aa, Homo sapiens
MSLSHWPYFRLVLNFRPQVICLPQPPKVLGYRLEPPHLTLACTLEGMYNIIEEILERDINGTLLSQATCELCDGNENSFMVVNALGDRCVRCEPTFVNTSRSCACSEPNILTGGLCFSSTGNFPLRRISAARYGEVGMSLTSEWFAKYLQSSAAACWVYANLTSCQALGNMCVMNMNSYDFATFDACGLFQFIFENTAGLSTVHSISFWRQNLPWLFYGDQLGLAPQVLSSTSLPTNFSFKGENQNTKLKFVAASYDIRGNFLKWQTLEGGVLQLCPDTETRLNAAYSFGTTYQQNCEIPISKILIDFPTPIFYDVYLEYTDENQHQYILAVPVLNLNLQHNKIFVNQDSNSGKWLLTRRIFLVDAVSGRENDLGTQPRVIRVATQISLSVHLVPNTINGNIYPPLITIAYSDIDIKDANSQSVKVSFSVTYEMDHGEAHVQTDIALGVLGGLAVLASLLKTAGWKRRIGSPMIDLQTVVKFLVYYAGDLANVFFIITVGTGLYWLIFFKAQKSVSVLLPMPIQEERFVTYVGCAFALKALQFLHKLISQITIDVFFIDWERPKGKVLKAVEGEGGVRSATVPVSIWRTYFVANEWNEIQTVRKINSLFQVLTVLFFLEVVGFKNLALMDSSSSLSRNPPSYIAPYSCILRYAVSAALWLAIGIIQVVFFAVFYERFIEDKIRQFVDLCSMSNISVFLLSHKCFGYYIHGRSVHGHADTNMEEMNMNLKREAENLCSQRGLVPNTDGQTFEIAISNQMRQHYDRIHETLIRKNGPARLLSSSASTFEQSIKAYHMMNKFLGSFIDHVHKEMDYFIKDKLLLERILGMEFMEPMEKSIFYNDEGYSFSSVLYYGNEATLLIFDLLFFCVVDLACQNFILASFLTYLQQEIFRYIRNTVGQKNLASKTLVDQRFLI

SEQ ID NO: 13471 - protein, 6 aa, Homo sapiens
MVVNAL

SEQ ID NO: 13472 - protein, 38 aa, Homo sapiens
MVVNALGDRCVRCEPTFVNTSRSCACSEPNILTGGLCF

SEQ ID NO: 13473 - protein, 239 aa, Homo sapiens
  SITE 1: note = misc_feature - Xaa can be any naturally occurring amino acid
XFYDVYLEYTDENQHQYILAVPVLNLNLQHNKIFVNQDSNSGKWLLTRRIFLVDAVSGRENDLGTQPRVIRVATQISLSVHLVPNTINGNIYPPLITIAYSDIDIKDANSQSVKVSFSVTYEMDHGEAHVQTDTEFCTCCPGWSAMARSWLTATSASRVQAILLSQPPEYLGLQIALGVLGGLAVLASLLKTAGWKRRIGSPMIDLQTVVKFLVYYAGDLANVFFIITVGTGLYWLIFF

SEQ ID NO: 13474 - protein, 173 aa, Homo sapiens
  SITE 1: note = misc_feature - Xaa can be any naturally occurring amino acid
XRGGAGVAMAVWSLLSARAVTAFLLLFLPRFLQAQTFSFPFQQPEKCDNNQYFDISALSCVPCGANQRQDARGTSCVCLPGFQMISNNGGPAIICKKCPENMKGVTEDGWNCISCPSDLTAEGKCHCPIGHILVERDINGTLLSQATCELCDGNENSFMVVNALGDRQGDYVS

SEQ ID NO: 13475 - protein, 87 aa, Homo sapiens
  SITE 1: note = misc_feature - Xaa can be any naturally occurring amino acid
XTRGGAGVAMAVWSLLSARAVTAFLLLFLPRFLQAQTFSFPFQQPEKCDNNQYFDISALSCVPCGANQRQDARERCYRRWLELHFLP

SEQ ID NO: 13476 - protein, 107 aa, Homo sapiens
MLFLALGSPWAVELPLCGRRTALCAAAALRGPRASVSRASSSSGPSGPVAGWSTGPSGAARLLRRPGRAQIPVYWEGYVRFLNTPSDKSEDGRLIYTGNMARAVFGK

SEQ ID NO: 13477 - protein, 260 aa, Homo sapiens
MLFLALGSPWAVELPLCGRRTALCAAAALRGPRASVSRASSSSGPSGPVAGWSTGPSGAARLLRRPGRAQIPVYWEGYVRFLNTPSDKSEDGRLIYTGNMARAVFGVKCFSYSTSLIGLTFLPYIFTQNNAISESVPLPIQIIFYGIMGSFTVITPVLLHFITKGYVIRLYHEATTDTYKAITYNAMLAETSTVFHQNDVKIPDAKHVFTTFYAKTKSLLVNPVLFPNREDYIHLMGYDKEEFILYMEETSEEKRHKDDK

SEQ ID NO: 13478 - protein, 111 aa, Homo sapiens
MLFLALGSPWAVELPLCGRRTALCAAAALRGPRASVSRASSSSGPSGPVAGWSTGPSGAARLLRRPGRAQIPVYWEGYVRFLNTPSDKSEDGRLIYTGNMARAVFGWSAVA

SEQ ID NO: 13479 - protein, 555 aa, Homo sapiens
MAAAAWLQVLPVILLLLGAHPSPLSFFSAGPATVAAADRSKWHIPIPSGKNYFSFGKILFRNTTIFLKFDGEPCDLSLNITWYLKSADCYNEIYNFKAEEVELYLEKLKEKRGLSGKYQTSSKLFQNCSELFKTQTFSGDFMHRLPLLGEKQEAKENGTNLTFIGDKTAMHEPLQTWQDAPYIFIVHIGISSSKESSKENSLSNLFTMTVEVKGPYEYLTLEDYPLMIFFMVMCIVYVLFGVLWLAWSACYWRDLLRIQFWIGAVIFLGMLEKAVFYAEFQNIRYKGESVQGALILAELLSAVKRSLARTLVIIVSLGYGIVKPRLGVTLHKVVVAGALYLLFSGMEGVLRVTGAQTDLASLAFIPLAFLDTALCWWIFISLTQTMKLLKLRRNIVKLSLYRHFTNTLILAVAASIVFIIWTTMKFRIVTCQSDWRELWVDDAIWRLLFSMILFVIMVLWRPSANNQRFAFSPLSEEEEEDEQKEPMLKESFEGMKMRSTKQEPNGNSKVNKAQEDDLKWVEENVPSSVTDVALPALLDSDEERMITHFERSKME

SEQ ID NO: 13480 - protein, 181 aa, Homo sapiens
MAAAAWLQVLPVILLLLGAHPSPLSFFSAGPATVAAADRSKWHIPIPSGKNYFSFGKILFRNTTIFLKFDGEPCDLSLNITWYLKSADCYNEIYNFKAEEVELYLEKLKEKRGLSGKYQTSSKLFQNCSELFKTQTFSGDFMHRLPLLGEKQEAKENGTNLTFIGDKTIQMPFLKKHFLDC

SEQ ID NO: 13481 - protein, 57 aa, Homo sapiens
MAAAAWLQVLPVILLLLGAHPSPLSFFSAGPATVAAADRSKWHIPIPSLMENLVTCL

SEQ ID NO: 13482 - protein, 494 aa, Homo sapiens
MAHSDTVVDGEPCDLSLNITWYLKSADCYNEIYNFKAEEVELYLEKLKEKRGLSGKYQTSSKLFQNCSELFKTQTFSGDFMHRLPLLGEKQEAKENGTNLTFIGDKTAMHEPLQTWQDAPYIFIVHIGISSSKESSKENSLSNLFTMTVEVKGPYEYLTLEDYPLMIFFMVMCIVYVLFGVLWLAWSACYWRDLLRIQFWIGAVIFLGMLEKAVFYAEFQNIRYKGESVQGALILAELLSAVKRSLARTLVIIVSLGYGIVKPRLGVTLHKVVVAGALYLLFSGMEGVLRVTGAQTDLASLAFIPLAFLDTALCWWIFISLTQTMKLLKLRRNIVKLSLYRHFTNTLILAVAASIVFIIWTTMKFRIVTCQSDWRELWVDDAIWRLLFSMILFVIMVLWRPSANNQRFAFSPLSEEEEEDEQKEPMLKESFEGMKMRSTKQEPNGNSKVNKAQEDDLKWVEENVPSSVTDVALPALLDSDEERMITHFERSKME

SEQ ID NO: 13483 - protein, 39 aa, Homo sapiens
MHRLPLLGEKQEAKENGTNLTFIGDKTAMHEPLQTWQDA

SEQ ID NO: 13484 - protein, 110 aa, Homo sapiens
MHRLPLLGEKQEAKENGTNLTFIGDKTAMHEPLQTWQDAPYIFIVHIGISSSKESSKENSLSNLFTMTVEVKGPYEYLTLEDYPLMIFFMVMCIVYVLFGVLWLAWSACY

SEQ ID NO: 13485 - protein, 170 aa, Homo sapiens
MHRLPLLGEKQEAKENGTNLTFIGDKTAMHEPLQTWQDAPYIFIVHIGISSSKESSKENSLSNLFTMTVEVKGPYEYLTLEDYPLMIFFMVMCIVYVLFGVLWLAWSACYWRDLLRIQFWIGAVIFLGMLEKAVFYAEFQNIRYKGESVQGALILAELLSAVKRSLARTL

SEQ ID NO: 13486 - protein, 88 aa, Homo sapiens [sequence omitted]

SEQ ID NO: 13487 - protein, 40 aa, Homo sapiens
MHRLPLLGEKQEAKENGTNLTFIGDKTIQMPFLKKHFLDC

SEQ ID NO: 13488 - protein, 195 aa, Homo sapiens
  SITE 1: note = misc_feature - Xaa can be any naturally occurring amino acid
XFYAEFQNIRYKGESVQGALILAELLSAVKRSLARTLVIIVSLGYGIVKPRLGVTLHKVVVAGALYLLFSGMEGVLRVTGYFSYPLTLIVNLALSAIDACVILWIFISLTQTMKLLKLRRNIVKLSLYRHFTNTLILAVAASIVFIIWTTMKFRIVTCQSDWRELWVDDAIWRLLFSMILFVIMVLWRPSANNQR

SEQ ID NO: 13489 - protein, 256 aa, Homo sapiens
EMLRCIWGHFLRVLGGTSPTLSHSSSLLHSLGSVTVLCCVDKQGILSWPNPSPETVLFFSGKVEPPHSSHEDLTDGLSTRSFCHPEVEEEPHERDALLAGSLNNTLHLSNEQERGDWPGEAPKPPEPYSHHKAHGRSKHPSGSNVSFSRDTEGGEEEPSKTQPGMESDPYEAEDFVCDYHLEMLSLSQDQQNPSCIQFDDSNWQLHLTSLKPLGLNVLLNLCDASVTERLCRFSDHLCNIALQESHSAVLPVHVPW

SEQ ID NO: 13490 - protein, 57 aa, Homo sapiens
MDLKEKHLGEPPSALGLSTRKALSVLKEQLEAVLEGHLRERKKCLTWKEVWRSSFLH

SEQ ID NO: 13491 - protein, 121 aa, Homo sapiens
MDLKEKHLGEPPSALGLSTRKALSVLKEQLEAVLEGHLRERKKCLTWKEVWRSSFLHHSNRCSCFHWPGASLMLLAVLLLLGCCGGQPAGSRGVGLVNASALFLLLLLNLVLIGRQDRLKR

SEQ ID NO: 13492 - protein, 125 aa, Homo sapiens
MDLKEKHLGEPPSALGLSTRKALSVLKEQLEAVLEGHLRERKKCLTWKEVWRSSFLHHSNRCSCFHWPGASLMLLAVLLLLGCCGGQPAGSRGVGLVNASALFLLLLLNLVLIGRQDRLKRREVE

SEQ ID NO: 13493 - protein, 1356 aa, Homo sapiens
MDLKEKHLGEPPSALGLSTRKALSVLKEQLEAVLEGHLRERKKCLTWKEVWRSSFLHHSNRCSCFHWPGASLMLLAVLLLLGCCGGQPAGSRGVGLVNASALFLLLLLNLVLIGRQDRLKRREVERRLRGIIDQIQDALRDGREIQWPSAMYPDLHMPFAPSWSLHWAYRDGHLVNLPVSLLVEGDIIALRPGQESFASLRGIKDDEHIVLEPGDLFPPFSPPPSPRGEVERGPQSPQQHRLFRVLETPVIDNIRWCLDMALSRPVTALDNERFTVQSVMLHYAVPVVLAGFLITNALRFIFSAPGVTSWQYTLLQLQVNGVLPILPLLFPVLWVLATACGEARVLAQMSKASPSSLLAKFSEDTLSSYTEAVSSQEMLRCIWGHFLRVLGGTSPTLSHSSSLLHSLGSVTVLCCVDKQGILSWPNPSPETVLFFSGKVEPPHSSHEDLTDGLSTRSFCHPEPHERDALLAGSLNNTLHLSNEQERGDWPGEAPKPPEPYSHHKAHGRSKHPSGSNVSFSRDTEGGEEEPSKTQPGMESDPYEAEDFVCDYHLEMLSLSQDQQNPSCIQFDDSNWQLHLTSLKPLGLNVLLNLCDASVTERLCRFSDHLCNIALQESHSAVLPVHVPWGLCELARLIGFTPGAKELFKQENHLALYRLPSAETMKETSLGRLSCVTKRRPPLSHMISLFIKDTTTSTEQMLSHGTADVVLEACTDFWDGADIYPLSGSDRKKVLDFYQRACLSGYCSAFAYKPMNCALSSQLNGKCIELVQVPGQSSIFTMCELPSTIPIKQNARRSSWSSDEGIGEVLEKEDCMQALSGQIFMGMVSSQYQARLDIVRLIDGLVNACIRFVYFSLEDELKSKVFAEKMGLETGWNCHISLTPNGDMPGSEIPPSSPSHAGSLHDDLNQVSRDDAEGLLLMEEEGHSDLISFQPTDSDIPSFLEDSNRAKLPRGIHQVRPHLQNIDNVPLLVPLFTDCTPETMCEMIKIMQEYGEVTCCLGSSANLRNSCLFLQSDISIALDPLYPSRCSWETFGYATSISMAQASDGLSPLQLSGQLNSLPCSLTFRQEETISIIRLIEQARHATYGIRKCFLFLLQCQLTLVVIQFLSCLVQLPPLLSTTDILWLSCFCYPLLSISLLGKPPHSSIMSMATGKNLQSIPKKTQHYFLLCFLLKFSLTISSCLICFGFTLQSFCDSSRDRNLTNCSSVMLPSNDDRAPAWFEDFANGLLSAQKLTAALIVLHTVFISITHVHRTKPLWRKSPLTNLWWAVTVPVVLLGQVVQTAVDLQLWTHRDSHVHFGLEDVPLLTWLLGCLSLVLVVVTNEIVKLHEIRVRVRYQKRQKLQFETKLGMNSPF

SEQ ID NO: 13494 - protein, 1007 aa, Homo sapiens [sequence omitted]

SEQ ID NO: 13495 - protein, 162 aa, Homo sapiens
MLFKQAELWMPHQGKGNKGEPPSALGLSTRKALSVLKEQLEAVLEGHLRERKKCLTWKEVWRSSFLHHSNRCSCFHWPGASLMLLAVLLLLGCCGGQPAGSRGVGLVNASALFLLLLLNLVLIGRQDRLKRREVERRLRGIIDQIQASSLPPHSDAETTHQS

SEQ ID NO: 13496 - protein, 1366 aa, Homo sapiens
MLFKQAELWMPHQGKGNKGEPPSALGLSTRKALSVLKEQLEAVLEGHLRERKKCLTWKEVWRSSFLHHSNRCSCFHWPGASLMLLAVLLLLGCCGGQPAGSRGVGLVNASALFLLLLLNLVLIGRQDRLKRREVERRLRGIIDQIQDALRDGREIQWPSAMYPDLHMPFAPSWSLHWAYRDGHLVNLPVSLLVEGDIIALRPGQESFASLRGIKDDEHIVLEPGDLFPPFSPPPSPRGEVERGPQSPQQHRLFRVLETPVIDNIRWCLDMALSRPVTALDNERFTVQSVMLHYAVPVVLAGFLITNALRFIFSAPGVTSWQYTLLQLQVNGVLPILPLLFPVLWVLATACGEARVLAQMSKASPSSLLAKFSEDTLSSYTEAVSSQEMLRCIWGHFLRVLGGTSPTLSHSSSLLHSLGSVTVLCCVDKQGILSWPNPSPETVLFFSGKVEPPHSSHEDLTDGLSTRSFCHPEPHERDALLAGSLNNTLHLSNEQERGDWPGEAPKPPEPYSHHKAHGRSKHPSGSNVSFSRDTEGGEEEPSKTQPGMESDPYEAEDFVCDYHLEMLSLSQDQQNPSCIQFDDSNWQLHLTSLKPLGLNVLLNLCDASVTERLCRFSDHLCNIALQESHSAVLPVHVPWGLCELARLIGFTPGAKELFKQENHLALYRLPSAETMKETSLGRLSCVTKRRPPLSHMISLFIKDTTTSTEQMLSHGTADVVLEACTDFWDGADIYPLSGSDRKKVLDFYQRACLSGYCSAFAYKPMNCALSSQLNGKCIELVQVPGQSSIFTMCELPSTIPIKQNARRSSWSSDEGIGEVLEKEDCMQALSGQIFMGMVSSQYQARLDIVRLIDGLVNACIRFVYFSLEDELKSKVFAEKMGLETGWNCHISLTPNGDMPGSEIPPSSPSHAGSLHDDLNQVSRDDAEGLLLMEEEGHSDLISFQPTDSDIPSFLEDSNRAKLPRGIHQVRPHLQNIDNVPLLVPLFTDCTPETMCEMIKIMQEYGEVTCCLGSSANLRNSCLFLQSDISIALDPLYPSRCSWETFGYATSISMAQASDGLSPLQLSGQLNSLPCSLTFRQEETISIIRLIEQARHATYGIRKCFLFLLQCQLTLVVIQFLSCLVQLPPLLSTTDILWLSCFCYPLLSISLLGKPPHSSIMSMATGKNLQSIPKKTQHYFLLCFLLKFSLTISSCLICFGFTLQSFCDSSRDRNLTNCSSVMLPSNDDRAPAWFEDFANGLLSAQKLTAALIVLHTVFISITHVHRTKPLWRKSPLTNLWWAVTVPVVLLGQVVQTAVDLQLWTHRDSHVHFGLEDVPLLTWLLGCLSLVLVVVTNEIVKLHEIRVRVRYQKRQKLQFETKLGMNSPF

SEQ ID NO: 13497 - protein, 35 aa, Homo sapiens
MLLAVLLLLGCCGGQPAGSRGVGLVNASALFLLLL

SEQ ID NO: 13498 - protein, 89 aa, Homo sapiens
MSKASPSSLLAKFSEDTLSSYTEAVSSQEMLRCIWGHFLRVLGGTSPTLSHSSSLLHSLGSVTVLCCVDKQGILSWPNPSPETVLFFSG

SEQ ID NO: 13499 - protein, 128 aa, Homo sapiens
PHSSIMSMATGKNLQSIPKKTQHYFLLCFLLKFSLTISSCLICFGFTLQSFCDSSRDRNLTNCSSVMLPRAPAWFEDFANGLLSAQKLTAALIVLHTVFISITHVHRTKPLWRKSPLTNLWWAVTVPV

SEQ ID NO: 13500 - protein, 302 aa, Homo sapiens
  SITE 1: note = misc_feature - Xaa can be any naturally occurring amino acid
XGKVEPPHSSHEDLTDGLSTRSFCHPEPHERDALLAGSLNNTLHLSNEQERGDWPGEAPKPPEPYSHHKAHGRSKHPSGSNTQPGMESDPYEAEDFVCDYHLEMLSLSQDQQNPSCIQFDDSNWQLHLTSLKPLGLNVLLNLCDASVTERLCRFSDHLCNIALQESHSAVLPVHVPWGLCELARLIGFTPGAKELFKQENHLALYRLPSAETMKETSLGRLSCVTKRRPPLSHMISLFIKDTTTSTEQMLSHGTADVVLEACTDFWDGADIYPLSGSDRKKVLDFYQRACLSGYCSAFAYKP

SEQ ID NO: 13501 - protein, 56 aa, Homo sapiens
  SITE 1: note = misc_feature - Xaa can be any naturally occurring amino acid
XLLLNLVLIGRQDRLKRREVERRLRGIIDQIQDGAWTWPCPDQSLPWTMSGSQCSR

SEQ ID NO: 13502 - protein, 73 aa, Homo sapiens
  SITE 1: note = misc_feature - Xaa can be any naturally occurring amino acid
XRDALLAGSLNNTLHLSNEQERGDWPGEAPKPPEPYSHHKAHGRSKHPSGSNVSFSRDTEGGEEEPSKLLPVS

SEQ ID NO: 13503 - protein, 176 aa, Homo sapiens
  SITE 1: note = misc_feature - Xaa can be any naturally occurring amino acid
XWLSCFCYPLLSISLLGKPPHSSIMSMATGKNLQSIPKKSFCDSSRDRNLTNCSSVMLPSNDDRAPAWFEDFANGLLSAQKLTAALIVLHTVFISITHVHRTKPLWRKSPLTNLWWAVTVPVVLLGQVVQTAVDLQLWTHRDSHVHFGLEDVPLLTWLLGCLSLVLVVVTNEIVKL

SEQ ID NO: 13504 - protein, 295 aa, Homo sapiens
YATSISMAQASDGLSPLQLSGQLNSLPCSLTFRQEETISIIRLIEQFLSCLVQLPPLLSTTDILWLSCFCYPLLSISLLGKPPHSSIMSMATGKNLQSIPKKTQHYFLLCFLLKFSLTISSCLICFGFTLQSFCDSSRDRNLTNCSSVMLPSNDDRAPAWFEDFANGLLSAQKLTAALIVLHTVFISITHVHRTKPLWRKSPLTNLWWAVTVPVVLLGQVVQTAVDLQLWTHRDSHVHFGLEDVPLLTWLLGCLSLVLVVVTNEIVKLHEIRVRVRYQKRQKLQFETKLGMNSPF

SEQ ID NO: 13505 - protein, 184 aa, Homo sapiens
MWRLALGGVFLAAAQACVFCRLPAHDLSGRLARLCSQMEARQKECGASPDFSAFALDEVSMNKVTEKTHRVLRVMEIKEAVSSLPSYWSWLRKTKLPEYTREALCPPACPLPLLSPAGGSTTLYNCSTCKGTEVSCWPRKRCFPGSQDLWEAKILLLSIFGAFLLLGVLSLLVESHHLQAKSGL

SEQ ID NO: 13506 - protein, 203 aa, Homo sapiens
MWRLALGGVFLAAAQACVFCRLPAHDLSGRLARLCSQMEARQKECGASPDFSAFALDEVSMNKVTEKTHRVLRVMEIKEAVSSLPSYWSWLRKTKLPEYTREALCPPACRGSTTLYNCSTCKGTEVSCWPRKRCFPGSLGSQDSAPLHLRSFPASGCSEPPGGVPPPPSKKWLVKTLKTSQPPALRGMHSQLPHPLEGNQSAP

SEQ ID NO: 13507 - protein, 176 aa, Homo sapiens
MWRLALGGVFLAAAQACVFCRLPAHDLSGRLARLCSQMEARQKECGASPDFSAFALDEVSMNKVTEKTHRVLRVMEIKEAVSSLPSYWSWLRKTKLPEYTREALCPPACRGSTTLYNCSTCKGTEVSCWPRKRCFPGSQDLWEAKILLLSIFGAFLLLGVLSLLVESHHLQAKSGL

SEQ ID NO: 13508 - protein, 218 aa, Homo sapiens
MAWKSSVIMQMGRFLLLVILFLPREMTSSVLTVNGKTENYILDTTPGSQASLICAVQNHTREEELLWYREEGRVDLKSGNKINSSSVCVSSISENDNGISFTCRLGRDQSVSVSVVLNVTFPPLLSGNDFQTVEEGSNVKLVCNVKANPQAQMMWYKNSSLLDLEKSRHQIQQTSESFQLSITKVEKPDNGTYSCIAKSSLKTESLDFHLIVKALHEG

SEQ ID NO: 13509 - protein, 262 aa, Homo sapiens
MAWKSSVIMQMGRFLLLVILFLPREMTSSVLTVNGKTENYILDTTPGSQASLICAVQNHTREEELLWYREEGRVDLKSGNKINSSSVCVSSISENDNGISFTCRLGRDQSVSVSVVLNVTFPPLLSGNDFQTVEEGSNVKLVCNVKANPQAQMMWYKNSSLLDLEKSRHQIQQTSESFQLSITKVEKPDNGTYSCIAKSSLKTESLDFHLIVKDKTVGVPIEPIIAACVVIFLTLCFGLIARRKKIMKLCMKDKDPHSETAL

SEQ ID NO: 13510 - protein, 348 aa, Homo sapiens
MRLGLLSVALLFVGSSHLYSDHYSPSGRHRLGPSPEPAASSQQAEAVRKRLRRRREGGAHAEDCGTAPLKDVLQGSRIIGGTEAQAGAWPWVVSLQIKYGRVLVHVCGGTLVRERWVLTAAHCTKDASDPLMWTAVIGTNNIHGRYPHTKKIKIKAIIIHPNFILESYVNDIALFHLKKAVRYNDYIQPICLPFDVFQILDGNTKCFISGWGRTKEEGNATNILQDAEVHYISREMCNSERSYGGIIPNTSFCAGDEDGAFDTCRGDSGGPLMCYLPEYKRFFVMGITSYGHGCGRRGFPGVYIGPSFYQKWLTEHFFHASTQGILTINILRGQILIALCFVILLATT

SEQ ID NO: 13511 - protein, 320 aa, Homo sapiens
MRLGLLSVALLFVGSSHLYSDHYSPSGRHRLGPSPEPAASSQQAEAVRKRLRRRREGGAHAEDCGTAPLKDVLQGSRIIGGTEAQAGAWPWVVSLQIKYGRVLVHVCGGTLVRERWVLTAAHCTKDASDPLMWTAVIGTNNIHGRYPHTKKIKIKAIIIHPNFILESYVNDIALFHLKKAVRYNDYIQPICLPFDVFQILDGNTKCFISGWGRTKEEGNATNILQDAEVHYISREMCNSERSYGGIIPNTSFCAGDEDGAFDTCRVRPSNFPLKYFLKPEGNLSNKAFDNFLVVLIIRPKNNKSFFLLFNYFNNPNLLGS

SEQ ID NO: 13512 - protein, 10 aa, Homo sapiens
MHSFRLARLS

SEQ ID NO: 13513 - protein, 17 aa, Homo sapiens
MHSFRLARLSSWRVHAG

SEQ ID NO: 13514 - protein, 147 aa, Homo sapiens
MHSFRLARLSSWRVHAGLVSHSAVRPHQGALVERIIPHPLYSAQNHDYDVALLRLQTALNFSDTVGAVCLPAKEQHFPKGSRCWVSGWGHTHPSHTYSSDMLQDTVVPLFSTQLCNSSCVYSGALTPRMLCAGYLDGRADACQDSLL

SEQ ID NO: 13515 - protein, 198 aa, Homo sapiens
MHSFRLARLSSWRVHAGLVSHSAVRPHQGALVERIIPHPLYSAQNHDYDVALLRLQTALNFSDTVGAVCLPAKEQHFPKGSRCWVSGWGHTHPSHTYSSDMLQDTVVPLFSTQLCNSSCVYSGALTPRMLCAGYLDGRADACQGDSGGPLVCPDGDTWRLVGVVSWGRGCAEPNHPGVYAKVAEFLDWIHDTAQDSLL

SEQ ID NO: 13516 - protein, 413 aa, Homo sapiens
MRRGCAVLGALGLLAGAGVGSWLLVLYLCPAASQPISGTLQDEEITLSCSEASAEEALLPALPKTVSFRINSEDFLLEAQVRDQPRWLLVCHEGWSPALGLQICWSLGHLRLTHHKGVNLTDIKLNSSQEFAQLSPRLGGFLEEAWQPRNNCTSGQVVSLRCSECGARPLASRIVGGQSVAPGRWPWQASVALGFRHTCGGSVLAPRWVVTAAHCMHSFRLARLSSWRVHAGLVSHSAVRPHQGALVERIIPHPLYSAQNHDYDVALLRLQTALNFSDTVGAVCLPAKEQHFPKGSRCWVSGWGHTHPSHTYSSDMLQDTVVPLFSTQLCNSSCVYSGALTPRMLCAGYLDGRADACQGDSGGPLVCPDGDTWRLVGVVSWGRGCAEPNHPGVYAKVAEFLDWIHDTAQDSLL

SEQ ID NO: 13517 - protein, 344 aa, Homo sapiens
MRRGCAVLGALGLLAGAGVGSWLLVLYLCPAASQPISGTLQDEEITLSCSEASAEEALLPALPKTVSFRINSEDFLLEAQVRDQPRWLLVCHEGWSPALGLQICWSLGHLRLTHHKGVNLTDIKLNSSQEFAQLSPRLGGFLEEAWQPSFRLARLSSWRVHAGLVSHSAVRPHQGALVERIIPHPLYSAQNHDYDVALLRLQTALNFSDTVGAVCLPAKEQHFPKGSRCWVSGWGHTHPSHTYSSDMLQDTVVPLFSTQLCNSSCVYSGALTPRMLCAGYLDGRADACQGDSGGPLVCPDGDTWRLVGVVSWGRGCAEPNHPGVYAKVAEFLDWIHDTAQDSLL

SEQ ID NO: 13518 - protein, 457 aa, Homo sapiens
MSLMLDDQPPMEAQYAEEGPGPGIFRAEPGDQQHPISQAVCWRSMRRGCAVLGALGLLAGAGVGSWLLVLYLCPAASQPISGTLQDEEITLSCSEASAEEALLPALPKTVSFRINSEDFLLEAQVRDQPRWLLVCHEGWSPALGLQICWSLGHLRLTHHKGVNLTDIKLNSSQEFAQLSPRLGGFLEEAWQPRNNCTSGQVVSLRCSECGARPLASRIVGGQSVAPGRWPWQASVALGFRHTCGGSVLAPRWVVTAAHCMHSFRLARLSSWRVHAGLVSHSAVRPHQGALVERIIPHPLYSAQNHDYDVALLRLQTALNFSDTVGAVCLPAKEQHFPKGSRCWVSGWGHTHPSHTYSSDMLQDTVVPLFSTQLCNSSCVYSGALTPRMLCAGYLDGRADACQGDSGGPLVCPDGDTWRLVGVVSWGRGCAEPNHPGVYAKVAEFLDWIHDTAQDSLL

SEQ ID NO: 13519 - protein, 457 aa, Homo sapiens; identical to SEQ ID NO: 13518

SEQ ID NO: 13520 - protein, 388 aa, Homo sapiens
MSLMLDDQPPMEAQYAEEGPGPGIFRAEPGDQQHPISQAVCWRSMRRGCAVLGALGLLAGAGVGSWLLVLYLCPAASQPISGTLQDEEITLSCSEASAEEALLPALPKTVSFRINSEDFLLEAQVRDQPRWLLVCHEGWSPALGLQICWSLGHLRLTHHKGVNLTDIKLNSSQEFAQLSPRLGGFLEEAWQPSFRLARLSSWRVHAGLVSHSAVRPHQGALVERIIPHPLYSAQNHDYDVALLRLQTALNFSDTVGAVCLPAKEQHFPKGSRCWVSGWGHTHPSHTYSSDMLQDTVVPLFSTQLCNSSCVYSGALTPRMLCAGYLDGRADACQGDSGGPLVCPDGDTWRLVGVVSWGRGCAEPNHPGVYAKVAEFLDWIHDTAQDSLL

SEQ ID NO: 13521 - protein, 44 aa, Homo sapiens
MSLMLDDQPPMEAQYAEEGPGPGIFRAEPGDQQHPSRPDWAIGE

SEQ ID NO: 13522 - protein, 44 aa, Homo sapiens; identical to SEQ ID NO: 13521

SEQ ID NO: 13523 - protein, 448 aa, Homo sapiens
MTGWGQWRAIILHSPDPPWGQPHMIDVSQAVCWRSMRRGCAVLGALGLLAGAGVGSWLLVLYLCPAASQPISGTLQDEEITLSCSEASAEEALLPALPKTVSFRINSEDFLLEAQVRDQPRWLLVCHEGWSPALGLQICWSLGHLRLTHHKGVNLTDIKLNSSQEFAQLSPRLGGFLEEAWQPRNNCTSGQVVSLRCSECGARPLASRIVGGQSVAPGRWPWQASVALGFRHTCGGSVLAPRWVVTAAHCMHSFRLARLSSWRVHAGLVSHSAVRPHQGALVERIIPHPLYSAQNHDYDVALLRLQTALNFSDTVGAVCLPAKEQHFPKGSRCWVSGWGHTHPSHTYSSDMLQDTVVPLFSTQLCNSSCVYSGALTPRMLCAGYLDGRADACQGDSGGPLVCPDGDTWRLVGVVSWGRGCAEPNHPGVYAKVAEFLDWIHDTAQDSLL

SEQ ID NO: 13524 - protein, 152 aa, Homo sapiens
MTLIEGVGDEVTVLFSVLACLLVLALAWVSTHTAEGGDPLPQPSGTPTPSQPSAAMAATDSMRGEAPGAETPSLRHRGQAAQPEPSTGFTATPPAPDSPQEPLVLRLKFLNDSEQVARAWPHDTIGSLKRTQFPGREQQVRLIYQGQLLGDD

SEQ ID NO: 13525 - protein, 171 aa, Homo sapiens
MTLIEGVGDEVTVLFSVLACLLVLALAWVSTHTAEGGDPLPQPSGTPTPSQPSAAMAATDSMRGEAPGAETPSLRHRGQAAQPEPSTGFTATPPAPDSPQEPLVLRLKFLNDSEQVARAWPHDTIGSLKRTQFPGREQQVRLIYQGQLLGDDTQTLGSLHLPPNCVLHCHV

SEQ ID NO: 13526 - protein, 246 aa, Homo sapiens
MTLIEGVGDEVTVLFSVLACLLVLALAWVSTHTAEGGDPLPQPSGTPTPSQPSAAMAATDSMRGEAPGAETPSLRHRGQAAQPEPSTGFTATPPAPDSPQEPLVLRLKFLNDSEQVARAWPHDTIGSLKRTQFPGREQQVRLIYQGQLLGDDTQTLGSLHLPPNCVLHCHVSTRVGPPNPPCPPGSEPGPSGLEIGSLLLPLLLLLLLLLWYCQIQYRPFFPLTATLGLAGFTLLLSLLAFAMYRP

SEQ ID NO: 13527 - protein, 246 aa, Homo sapiens; identical to SEQ ID NO: 13526

SEQ ID NO: 13528 - protein, 246 aa, Homo sapiens; identical to SEQ ID NO: 13526

SEQ ID NO: 13529 - protein, 246 aa, Homo sapiens; identical to SEQ ID NO: 13526

SEQ ID NO: 13530 - protein, 246 aa, Homo sapiens; identical to SEQ ID NO: 13526

SEQ ID NO: 13531 - protein, 296 aa, Homo sapiens
MAVLAPLIALVYSVPRLSRWLAQPYYLLSALLSAAFLLVRKLPPLCHGLPTQREDGNPCDFDWREVEILMFLSAIVMMKNRRSITVEQHIGNIFMFSKVANTILFFRLDIRMGLLYITLCIVFLMTCKPPLYMGPEYIKYFNDKTIDEELERDKRVTWIVEFFANWSNDCQSFAPIYADLSLKYNCTGLNFGKVDVGRYTDVSTRYKVSTSPLTKQLPTLILFQGGKEAMRRPQIDKKGRAVSWTFSEENVIREFNLNELYQRAKKLSKAGDNIPEEQPVASTPTTVSDGENKKDK

SEQ ID NO: 13532 - protein, 258 aa, Homo sapiens
MAVLAPLIALVYSVPRLSRWLAQPYYLLSALLSAAFLLVRKLPPLCHGLPTQREDGNPCDFDWREVEILMFLSAIVMMKNRRSMFLMTCKPPLYMGPEYIKYFNDKTIDEELERDKRVTWIVEFFANWSNDCQSFAPIYADLSLKYNCTGLNFGKVDVGRYTDVSTRYKVSTSPLTKQLPTLILFQGGKEAMRRPQIDKKGRAVSWTFSEENVIREFNLNELYQRAKKLSKAGDNIPEEQPVASTPTTVSDGENKKDK

SEQ ID NO: 13533 - protein, 115 aa, Homo sapiens
MAVLAPLIALVYSVPRLSRWLAQPYYLLSALLSAAFLLVRKLPPLCHGLPTQREDGNPCDFDWREVEILMFLSAIVMMKNRRSMPHEEGQRMGYRSAQPSLTCDISVFQSLWSNI

SEQ ID NO: 13534 - protein, 115 aa, Homo sapiens; identical to SEQ ID NO: 13533

SEQ ID NO: 13535 - protein, 103 aa, Homo sapiens
MAVLAPLIALVYSVPRLSRWLAQPYYLLSALLSAAFLLVRKLPPLCHGLPTQREDGNPCDFDWREVEILMFLSAIVMMKNRRSRGTRTGQEGHLDCGVLCQLV

SEQ ID NO: 13536 - protein, 103 aa, Homo sapiens; identical to SEQ ID NO: 13535

SEQ ID NO: 13537 - protein, 84 aa, Homo sapiens
MAVLAPLIALVYSVPRLSRWLAQPYYLLSALLSAAFLLVRKLPPLCHGLPTQREDGNPCDFDWREVEILMFLSAIVMMKNRRSS

SEQ ID NO: 13538 - protein, 86 aa, Homo sapiens
MAVLAPLIALVYSVPRLSRWLAQPYYLLSALLSAAFLLVRKLPPLCHGLPTQREDGNPCDFDWREVEILMFLSAIVMMKNRRSSTK

SEQ ID NO: 13539 - protein, 63 aa, Homo sapiens
MAAWKSWTALRLCATVVVLDMVVCKGFVEDLDESFKENRNDDIWLVDALLQSLEFEVIQQLSY

SEQ ID NO: 13540 - protein, 89 aa, Homo sapiens
MAAWKSWTALRLCATVVVLDMVVCKGFVEDLDESFKENRNDDIWLVDFYAPWCGHCKKLEPIWNEVGLEMKSIGSPVKVGKMDATSYSN

SEQ ID NO: 13541 - protein, 89 aa, Homo sapiens; identical to SEQ ID NO: 13540

SEQ ID NO: 13542 - protein, 197 aa, Homo sapiens
MAAWKSWTALRLCATVVVLDMVVCKGFVEDLDESFKENRNDDIWLVDFYAPWCGHCKKLEPIWNEVGLEMKSIGSPVKVGKMDATSYSSIASEFGVRGYPTIKLALIRPLPSQQMFEHMQKRHRVFFVYVGGESPLKEKYIDAASELIVYTYFFSASEEVVPEYVTLKEMPAVLVFKDETYFVYDGKFQIFNSCKTF

SEQ ID NO: 13543 - protein, 195 aa, Homo sapiens
MAAWKSWTALRLCATVVVLDMVVCKGFVEDLDESFKENRNDDIWLVDFYAPWCGHCKKLEPIWNEVGLEMKSIGSPVKVGKMDATSYSSIASEFGVRGYPTIKLLKGDLAYNYRGPRTKDDIIEFAHRVSGALIRPLPSQQMFEHMQKRHRVFFVYVGGESPLKEKYIDAASELIVYTYFFSASEEVVPEVIFKI

SEQ ID NO: 13544 - protein, 454 aa, Homo sapiens
MAAWKSWTALRLCATVVVLDMVVCKGFVEDLDESFKENRNDDIWLVDFYAPWCGHCKKLEPIWNEVGLEMKSIGSPVKVGKMDATSYSSIASEFGVRGYPTIKLLKGDLAYNYRGPRTKDDIIEFAHRVSGALIRPLPSQQMFEHMQKRHRVFFVYVGGESPLKEKYIDAASELIVYTYFFSASEEVVPEYVTLKEMPAVLVFKDETYFVYDEYEDGDLSSWINRERFQNYLAMDGFLLYELGDTGKLVALAVIDEKNTSVEHTRLKSIIQEVARDYRDLFHRDFQFGHMDGNDYINTLLMDELTVPTVVVLNTSNQQYFLLDRQIKNVEDMVQFINNILDGTVEAQGGDSILQRLKRIVFDAKSTIVSIFKSSPLMGCFLFGLPLGVISIMCYGIYTADTDGGYIEERYEVSKSENENQEQIEESKEQQEPSSGGSVVPTVQEPKDVLEKKKD

SEQ ID NO: 13545 - protein, 128 aa, Homo sapiens
MAAWKSWTALRLCATVVVLDMVVCKGFVEDLDESFKENRNDDIWLVDFYAPWCGHCKKLEPIWNEVGLEMKSIGSPVKVGKMDATSYSSIASEFGVRGYPTIKLRFPGGLKIGVWPFFIGEIKRGLGI

SEQ ID NO: 13546 - protein, 69 aa, Homo sapiens
MVVCKGFVEDLDESFKENRNDDIWLVDFYAPWCGHCKKLEPIWNEVGLEMKSIGSPVKVGKMDATSYSN

SEQ ID NO: 13547 - protein, 23 aa, Homo sapiens
ASTEAEPEVDNLLVSDATPDGFR

SEQ ID NO: 13548 - protein, 92 aa, Homo sapiens
MGAMTQLLAGVFLAFLALATEGGVLKKVIRHKRQSGVNATLPEENQPVVFNHVYNIKLPVGSQCSVDLESASGEKDLAPPSEPSESFQEHTV

SEQ ID NO: 13549 - protein, 2019 aa, Homo sapiens
MGAMTQLLAGVFLAFLALATEGGVLKKVIRHKRQSGVNATLPEENQPVVFNHVYNIKLPVGSQCSVDLESASGEKDLAPPSEPSESFQEHTVDGENQIVFTHRINIPRRACGCAAAPDVKELLSRLEELENLVSSLREQCTAGAGCCLQPATGRLDTRPFCSGRGNFSTEGCGCVCEPGWKGPNCSEPECPGNCHLRGRCIDGQCICDDGFTGEDCSQLACPSDCNDQGKCVNGVCICFEGYAGADCSREICPVPCSEEHGTCVDGLCVCHDGFAGDDCNKPLCLNNCYNRGRCVENECVCDEGFTGEDCSELICPNDCFDRGRCINGTCYCEEGFTGEDCGKPTCPHACHTQGRCEEGQCVCDEGFAGVDCSEKRCPADCHNRGRCVDGRCECDDGFTGADCGELKCPNGCSGHGRCVNGQCVCDEGYTGEDCSQLRCPNDCHSRGRCVEGKCVCEQGFKGYDCSDMSCPNDCHQHGRCVNGMCVCDDGYTGEDCRDRQCPRDCSNRGLCVDGQCVCEDGFTGPDCAELSCPNDCHGQGRCVNGQCVCHEGFMGKDCKEQRCPSDCHGQGRCVDGQCICHEGFTGLDCGQHSCPSDCNNLGQCVSGRCICNEGYSGEDCSEVSPPKDLVVTEVTEETVNLAWDNEMRVTEYLVVYTPTHEGGLEMQFRVPGDQTSTIIQELEPGVEYFIRVFAILENKKSIPVSARVATYLPAPEGLKFKSIKETSVEVEWDPLDIAFETWEIIFRNMNKEDEGEITKSLRRPETSYRQTGLAPGQEYEISLHIVKNNTRGPGLKRVTTTRLDAPSQIEVKDVTDTTALITWFKPLAEIDGIELTYGIKDVPGDRTTIDLTEDENQYSIGNLKPDTEYEVSLISRRGDMSSNPAKETFTTGLDAPRNLRRVSQTDNSITLEWRNGKAAIDSYRIKYAPISGGDHAEVDVPKSQQATTKTTLTGLRPGTEYGIGVSAVKEDKESNPATINAATELDTPKDLQVSETAETSLTLLWKTPLAKFDRYRLNYSLPTGQWVGVQLPRNTTSYVLRGLEPGQEYNVLLTAEKGRHKSKPARVKASTEQAPELENLTVTEVGWDGLRLNWTAADQAYEHFIIQVQEANKVEAARNLTVPGSLRAVDIPGLKAATPYTVSIYGVIQGYRTPVLSAEASTGETPNLGEVVVAEVGWDALKLNWTAPEGAYEYFFIQVQEADTVEAAQNLTVPGGLRSTDLPGLKAATHYTITIRGVTQDFSTTPLSVEVLTEDLPQLGDLAVSEVGWDGLRLNWTAADNAYEHFVIQVQEVNKVEAAQNLTLPGSLRAVDIPGLEAATPYRVSIYGVIRGYRTPVLSAEASTAKEPEIGNLNVSDITPESFNLSWMATDGIFETFTIEIIDSNRLLETVEYNISGAERTAHISGLPPSTDFIVYLSGLAPSIRTKTISATATTEAEPEVDNLLVSDATPDGFRLSWTADEGVFDNFVLKIRDTKKQSEPLEITLLAPERTRDITGLREATEYEIELYGISKGRRSQTVSAIATTAMGSPKEVIFSDITENSATVSWRAPTAQVESFRITYVPITGGTPSMVTVDGTKTQTRLVKLIPGVEYLVSIIAMKGFEESEPVSGSFTTALDGPSGLVTANITDSEALARWQPAIATVDSYVISYTGEKVPEITRTVSGNTVEYALTDLEPATEYTLRIFAEKGPQKSSTITAKFTTDLDSPRDLTATEVQSETALLTWRPPRASVTGYLLVYESVDGTVKEVIVGPDTTSYSLADLSPSTHYTAKIQALNGPLRSNMIQTIFTTIGLLYPFPKDCSQAMLNGDTTSGLYTIYLNGDKAEALEVFCDMTSDGGGWIVFLRRKNGRENFYQNWKAYAAGFGDRREEFWLGLDNLNKITAQGQYELRVDLRDHGETAFAVYDKFSVGDAKTRYKLKVEGYSGTAGDSMAYHNGRSFSTFDKDTDSAITNCALSYKGAFWYRNCHRVNLMGRYGDNNHSQGVNWFHWKGHEHSIQFAEMKLRPSNFRNLEGRRKRA

SEQ ID NO: 13550 - protein, 2201 aa, Homo sapiens
MGAMTQLLAGVFLAFLALATEGGVLKKVIRHKRQSGVNATLPEENQPVVFNHVYNIKLPVGSQCSVDLESASGEKDLAPPSEPSESFQEHTVDGENQIVFTHRINIPRRACGCAAAPDVKELLSRLEELENLVSSLREQCTAGAGCCLQPATGRLDTRPFCSGRGNFSTEGCGCVCEPGWKGPNCSEPECPGNCHLRGRCIDGQCICDDGFTGEDCSQLACPSDCNDQGKCVNGVCICFEGYAGADCSREICPVPCSEEHGTCVDGLCVCHDGFAGDDCNKPLCLNNCYNRGRCVENECVCDEGFTGEDCSELICPNDCFDRGRCINGTCYCEEGFTGEDCGKPTCPHACHTQGRCEEGQCVCDEGFAGVDCSEKRCPADCHNRGRCVDGRCECDDGFTGADCGELKCPNGCSGHGRCVNGQCVCDEGYTGEDCSQLRCPNDCHSRGRCVEGKCVCEQGFKGYDCSDMSCPNDCHQHGRCVNGMCVCDDGYTGEDCRDRQCPRDCSNRGLCVDGQCVCEDGFTGPDCAELSCPNDCHGQGRCVNGQCVCHEGFMGKDCKEQRCPSDCHGQGRCVDGQCICHEGFTGLDCGQHSCPSDCNNLGQCVSGRCICNEGYSGEDCSEVSPPKDLVVTEVTEETVNLAWDNEMRVTEYLVVYTPTHEGGLEMQFRVPGDQTSTIIQELEPGVEYFIRVFAILENKKSIPVSARVATYLPAPEGLKFKSIKETSVEVEWDPLDIAFETWEIIFRNMNKEDEGEITKSLRRPETSYRQTGLAPGQEYEISLHIVKNNTRGPGLKRVTTTRLDAPSQIEVKDVTDTTALITWFKPLAEIDGIELTYGIKDVPGDRTTIDLTEDENQYSIGNLKPDTEYEVSLISRRGDMSSNPAKETFTTGLDAPRNLRRVSQTDNSITLEWRNGKAAIDSYRIKYAPISGGDHAEVDVPKSQQATTKTTLTGLRPGTEYGIGVSAVKEDKESNPATINAATELDTPKDLQVSETAETSLTLLWKTPLAKFDRYRLNYSLPTGQWVGVQLPRNTTSYVLRGLEPGQEYNVLLTAEKGRHKSKPARVKASTEQAPELENLTVTEVGWDGLRLNWTAADQAYEHFIIQVQEANKVEAARNLTVPGSLRAVDIPGLKAATPYTVSIYGVIQGYRTPVLSAEASTGETPNLGEVVVAEVGWDALKLNWTAPEGAYEYFFIQVQEADTVEAAQNLTVPGGLRSTDLPGLKAATHYTITIRGVTQDFSTTPLSVEVLTEEVPDMGNLTVTEVSWDALRLNWTTPDGTYDQFTIQVQEADQVEEAHNLTVPGSLRSMEIPGLRAGTPYTVTLHGEVRGHSTRPLAVEVVTEDLPQLGDLAVSEVGWDGLRLNWTAADNAYEHFVIQVQEVNKVEAAQNLTLPGSLRAVDIPGLEAATPYRVSIYGVIRGYRTPVLSAEASTAKEPEIGNLNVSDITPESFNLSWMATDGIFETFTIEIIDSNRLLETVEYNISGAERTAHISGLPPSTDFIVYLSGLAPSIRTKTISATATTEALPLLENLTISDINPYGFTVSWMASENAFDSFLVTVVDSGKLLDPQEFTLSGTQRKLELRGLITGIGYEVMVSGFTQGHQTKPLRAEIVTEAEPEVDNLLVSDATPDGFRLSWTADEGVFDNFVLKIRDTKKQSEPLEITLLAPERTRDITGLREATEYEIELYGISKGRRSQTVSAIATTAMGSPKEVIFSDITENSATVSWRAPTAQVESFRITYVPITGGTPSMVTVDGTKTQTRLVKLIPGVEYLVSIIAMKGFEESEPVSGSFTTALDGPSGLVTANITDSEALARWQPAIATVDSYVISYTGEKVPEITRTVSGNTVEYALTDLEPATEYTLRIFAEKGPQKSSTITAKFTTDLDSPRDLTATEVQSETALLTWRPPRASVTGYLLVYESVDGTVKEVIVGPDTTSYSLADLSPSTHYTAKIQALNGPLRSNMIQTIFTTIGLLYPFPKDCSQAMLNGDTTSGLYTIYLNGDKAEALEVFCDMTSDGGGWIVFLRRKNGRENFYQNWKAYAAGFGDRREEFWLGLDNLNKITAQGQYELRVDLRDHGETAFAVYDKFSVGDAKTRYKLKVEGYSGTAGDSMAYHNGRSFSTFDKDTDSAITNCALSYKGAFWYRNCHRVNLMGRYGDNNHSQGVNWFHWKGHEHSIQFAEMKLRPSNFRNLEGRRKRA

SEQ ID NO: 13551 - protein, 1928 aa, Homo sapiens
MGAMTQLLAGVFLAFLALATEGGVLKKVIRHKRQSGVNATLPEENQPVVFNHVYNIKLPVGSQCSVDLESASGEKDLAPPSEPSESFQEHTVDGENQIVFTHRINIPRRACGCAAAPDVKELLSRLEELENLVSSLREQCTAGAGCCLQPATGRLDTRPFCSGRGNFSTEGCGCVCEPGWKGPNCSEPECPGNCHLRGRCIDGQCICDDGFTGEDCSQLACPSDCNDQGKCVNGVCICFEGYAGADCSREICPVPCSEEHGTCVDGLCVCHDGFAGDDCNKPLCLNNCYNRGRCVENECVCDEGFTGEDCSELICPNDCFDRGRCINGTCYCEEGFTGEDCGKPTCPHACHTQGRCEEGQCVCDEGFAGVDCSEKRCPADCHNRGRCVDGRCECDDGFTGADCGELKCPNGCSGHGRCVNGQCVCDEGYTGEDCSQLRCPNDCHSRGRCVEGKCVCEQGFKGYDCSDMSCPNDCHQHGRCVNGMCVCDDGYTGEDCRDRQCPRDCSNRGLCVDGQCVCEDGFTGPDCAELSCPNDCHGQGRCVNGQCVCHEGFMGKDCKEQRCPSDCHGQGRCVDGQCICHEGFTGLDCGQHSCPSDCNNLGQCVSGRCICNEGYSGEDCSEVSPPKDLVVTEVTEETVNLAWDNEMRVTEYLVVYTPTHEGGLEMQFRVPGDQTSTIIQELEPGVEYFIRVFAILENKKSIPVSARVATYLPAPEGLKFKSIKETSVEVEWDPLDIAFETWEIIFRNMNKEDEGEITKSLRRPETSYRQTGLAPGQEYEISLHIVKNNTRGPGLKRVTTTRLDAPSQIEVKDVTDTTALITWFKPLAEIDGIELTYGIKDVPGDRTTIDLTEDENQYSIGNLKPDTEYEVSLISRRGDMSSNPAKETFTTGLDAPRNLRRVSQTDNSITLEWRNGKAAIDSYRIKYAPISGGDHAEVDVPKSQQATTKTTLTGLRPGTEYGIGVSAVKEDKESNPATINAATELDTPKDLQVSETAETSLTLLWKTPLAKFDRYRLNYSLPTGQWVGVQLPRNTTSYVLRGLEPGQEYNVLLTAEKGRHKSKPARVKASTEQAPELENLTVTEVGWDGLRLNWTAADQAYEHFIIQVQEANKVEAARNLTVPGSLRAVDIPGLKAATPYTVSIYGVIQGYRTPVLSAEASTGETPNLGEVVVAEVGWDALKLNWTAPEGAYEYFFIQVQEADTVEAAQNLTVPGGLRSTDLPGLKAATHYTITIRGVTQDFSTTPLSVEVLTEEVPDMGNLTVTEVSWDALRLNWTTPDGTYDQFTIQVQEADQVEEAHNLTVPGSLRSMEIPGLRAGTPYTVTLHGEVRGHSTRPLAVEVVTEDLPQLGDLAVSEVGWDGLRLNWTAADNAYEHFVIQVQEVNKVEAAQNLTLPGSLRAVDIPGLEAATPYRVSIYGVIRGYRTPVLSAEASTAMGSPKEVIFSDITENSATVSWRAPTAQVESFRITYVPITGGTPSMVTVDGTKTQTRLVKLIPGVEYLVSIIAMKGFEESEPVSGSFTTALDGPSGLVTANITDSEALARWQPAIATVDSYVISYTGEKVPEITRTVSGNTVEYALTDLEPATEYTLRIFAEKGPQKSSTITAKFTTDLDSPRDLTATEVQSETALLTWRPPRASVTGYLLVYESVDGTVKEVIVGPDTTSYSLADLSPSTHYTAKIQALNGPLRSNMIQTIFTTIGLLYPFPKDCSQAMLNGDTTSGLYTIYLNGDKAEALEVFCDMTSDGGGWIVFLRRKNGRENFYQNWKAYAAGFGDRREEFWLGLDNLNKITAQGQYELRVDLRDHGETAFAVYDKFSVGDAKTRYKLKVEGYSGTAGDSMAYHNGRSFSTFDKDTDSAITNCALSYKGAFWYRNCHRVNLMGRYGDNNHSQGVNWFHWKGHEHSIQFAEMKLRPSNFRNLEGRRKRA

SEQ ID NO: 13552 - protein, 1564 aa, Homo sapiens
MGAMTQLLAGVFLAFLALATEGGVLKKVIRHKRQSGVNATLPEENQPVVFNHVYNIKLPVGSQCSVDLESASGEKDLAPPSEPSESFQEHTVDGENQIVFTHRINIPRRACGCAAAPDVKELLSRLEELENLVSSLREQCTAGAGCCLQPATGRLDTRPFCSGRGNFSTEGCGCVCEPGWKGPNCSEPECPGNCHLRGRCIDGQCICDDGFTGEDCSQLACPSDCNDQGKCVNGVCICFEGYAGADCSREICPVPCSEEHGTCVDGLCVCHDGFAGDDCNKPLCLNNCYNRGRCVENECVCDEGFTGEDCSELICPNDCFDRGRCINGTCYCEEGFTGEDCGKPTCPHACHTQGRCEEGQCVCDEGFAGVDCSEKRCPADCHNRGRCVDGRCECDDGFTGADCGELKCPNGCSGHGRCVNGQCVCDEGYTGEDCSQLRCPNDCHSRGRCVEGKCVCEQGFKGYDCSDMSCPNDCHQHGRCVNGMCVCDDGYTGEDCRDRQCPRDCSNRGLCVDGQCVCEDGFTGPDCAELSCPNDCHGQGRCVNGQCVCHEGFMGKDCKEQRCPSDCHGQGRCVDGQCICHEGFTGLDCGQHSCPSDCNNLGQCVSGRCICNEGYSGEDCSEVSPPKDLVVTEVTEETVNLAWDNEMRVTEYLVVYTPTHEGGLEMQFRVPGDQTSTIIQELEPGVEYFIRVFAILENKKSIPVSARVATYLPAPEGLKFKSIKETSVEVEWDPLDIAFETWEIIFRNMNKEDEGEITKSLRRPETSYRQTGLAPGQEYEISLHIVKNNTRGPGLKRVTTTRLDAPSQIEVKDVTDTTALITWFKPLAEIDGIELTYGIKDVPGDRTTIDLTEDENQYSIGNLKPDTEYEVSLISRRGDMSSNPAKETFTTGLDAPRNLRRVSQTDNSITLEWRNGKAAIDSYRIKYAPISGGDHAEVDVPKSQQATTKTTLTGLRPGTEYGIGVSAVKEDKESNPATINAATELDTPKDLQVSETAETSLTLLWKTPLAKFDRYRLNYSLPTGQWVGVQLPRNTTSYVLRGLEPGQEYNVLLTAEKGRHKSKPARVKASTAMGSPKEVIFSDITENSATVSWRAPTAQVESFRITYVPITGGTPSMVTVDGTKTQTRLVKLIPGVEYLVSIIAMKGFEESEPVSGSFTTALDGPSGLVTANITDSEALARWQPAIATVDSYVISYTGEKVPEITRTVSGNTVEYALTDLEPATEYTLRIFAEKGPQKSSTITAKFTTDLDSPRDLTATEVQSETALLTWRPPRASVTGYLLVYESVDGTVKEVIVGPDTTSYSLADLSPSTHYTAKIQALNGPLRSNMIQTIFTTIGLLYPFPKDCSQAMLNGDTTSGLYTIYLNGDKAEALEVFCDMTSDGGGWIVFLRRKNGRENFYQNWKAYAAGFGDRREEFWLGLDNLNKITAQGQYELRVDLRDHGETAFAVYDKFSVGDAKTRYKLKVEGYSGTAGDSMAYHNGRSFSTFDKDTDSAITNCALSYKGAFWYRNCHRVNLMGRYGDNNHSQGVNWFHWKGHEHSIQFAEMKLRPSNFRNLEGRRKRA

SEQ ID NO: 13553 - protein, 1838 aa, Homo sapiens
MGAMTQLLAGVFLAFLALATEGGVLKKVIRHKRQSGVNATLPEENQPVVFNHVYNIKLPVGSQCSVDLESASGEKDLAPPSEPSESFQEHTVDGENQIVFTHRINIPRRACGCAAAPDVKELLSRLEELENLVSSLREQCTAGAGCCLQPATGRLDTRPFCSGRGNFSTEGCGCVCEPGWKGPNCSEPECPGNCHLRGRCIDGQCICDDGFTGEDCSQLACPSDCNDQGKCVNGVCICFEGYAGADCSREICPVPCSEEHGTCVDGLCVCHDGFAGDDCNKPLCLNNCYNRGRCVENECVCDEGFTGEDCSELICPNDCFDRGRCINGTCYCEEGFTGEDCGKPTCPHACHTQGRCEEGQCVCDEGFAGVDCSEKRCPADCHNRGRCVDGRCECDDGFTGADCGELKCPNGCSGHGRCVNGQCVCDEGYTGEDCSQLRCPNDCHSRGRCVEGKCVCEQGFKGYDCSDMSCPNDCHQHGRCVNGMCVCDDGYTGEDCRDRQCPRDCSNRGLCVDGQCVCEDGFTGPDCAELSCPNDCHGQGRCVNGQCVCHEGFMGKDCKEQRCPSDCHGQGRCVDGQCICHEGFTGLDCGQHSCPSDCNNLGQCVSGRCICNEGYSGEDCSEVSPPKDLVVTEVTEETVNLAWDNEMRVTEYLVVYTPTHEGGLEMQFRVPGDQTSTIIQELEPGVEYFIRVFAILENKKSIPVSARVATYLPAPEGLKFKSIKETSVEVEWDPLDIAFETWEIIFRNMNKEDEGEITKSLRRPETSYRQTGLAPGQEYEISLHIVKNNTRGPGLKRVTTTRLDAPSQIEVKDVTDTTALITWFKPLAEIDGIELTYGIKDVPGDRTTIDLTEDENQYSIGNLKPDTEYEVSLISRRGDMSSNPAKETFTTGLDAPRNLRRVSQTDNSITLEWRNGKAAIDSYRIKYAPISGGDHAEVDVPKSQQATTKTTLTGLRPGTEYGIGVSAVKEDKESNPATINAATELDTPKDLQVSETAETSLTLLWKTPLAKFDRYRLNYSLPTGQWVGVQLPRNTTSYVLRGLEPGQEYNVLLTAEKGRHKSKPARVKASTAKEPEIGNLNVSDITPESFNLSWMATDGIFETFTIEIIDSNRLLETVEYNISGAERTAHISGLPPSTDFIVYLSGLAPSIRTKTISATATTEPKPQLGTLIFSNITPKSFNMSWTTQAGLFAKIVINVSDAHSLHESQQFTVSGDAKQAHITGLVENTGYDVSVAGTTLAGDPTRPLTAFVITEAEPEVDNLLVSDATPDGFRLSWTADEGVFDNFVLKIRDTKKQSEPLEITLLAPERTRDITGLREATEYEIELYGISKGRRSQTVSAIATTAMGSPKEVIFSDITENSATVSWRAPTAQVESFRITYVPITGGTPSMVTVDGTKTQTRLVKLIPGVEYLVSIIAMKGFEESEPVSGSFTTALDGPSGLVTANITDSEALARWQPAIATVDSYVISYTGEKVPEITRTVSGNTVEYALTDLEPATEYTLRIFAEKGPQKSSTITAKFTTDLDSPRDLTATEVQSETALLTWRPPRASVTGYLLVYESVDGTVKEVIVGPDTTSYSLADLSPSTHYTAKIQALNGPLRSNMIQTIFTTIGLLYPFPKDCSQAMLNGDTTSGLYTIYLNGDKAEALEVFCDMTSDGGGWIVFLRRKNGRENFYQNWKAYAAGFGDRREEFWLGLDNLNKITAQGQYELRVDLRDHGETAFAVYDKFSVGDAKTRYKLKVEGYSGTAGDSMAYHNGRSFSTFDKDTDSAITNCALSYKGAFWYRNCHRVNLMGRYGDNNHSQGVNWFHWKGHEHSIQFAEMKLRPSNFRNLEGRRKRA

SEQ ID NO: 13554 - protein, 1838 aa, Homo sapiens; identical to SEQ ID NO: 13553

SEQ ID NO: 13555 - protein, 615 aa, Homo sapiens
  SITE 1: note = misc_feature - Xaa can be any naturally occurring amino acid
XPELENLTVTEVGWDGLRLNWTAADQAYEHFIIQVQEANKVEAARNLTVPGSLRAVDIPGLKAATPYTVSIYGVIQGYRTPVLSAEASTAKEPEIGNLNVSDITPESFNLSWMATDGIFETFTIEIIDSNRLLETVEYNISGAERTAHISGLPPSTDFIVYLSGLAPSIRTKTISATATTEAEPEVDNLLVSDATPDGFRLSWTADEGVFDNFVLKIRDTKKQSEPLEITLLAPERTRDITGLREATEYEIELYGISKGRRSQTVSAIATTAMGSPKEVIFSDITENSATVSWRAPTAQVESFRITYVPITGGTPSMVTVDGTKTQTRLVKLIPGVEYLVSIIAMKGFEESEPVSGSFTTALDGPSGLVTANITDSEALARWQPAIATVDSYVISYTGEKVPEITRTVSGNTVEYALTDLEPATEYTLRIFAEKGPQKSSTITAKFTTDLDSPRDLTATEVQSETALLTWRPPRASVTGYLLVYESVDGTVKEVIVGPDTTSYSLADLSPSTHYTAKIQALNGPLRSNMIQTIFTTIGLLYPFPKDCSQAMLNGDTTSGLYTIYLNGDKAEALEVFCDMTSDGGGWIVFLRRKNGRENFYQNWKAYAAGFGDRRE

SEQ ID NO: 13556 - protein, 277 aa, Homo sapiens
MIILIYLFLLLWEDTQGWGFKDGIFHNSIWLERAAGVYHREARSGKYKLTYAEAKAVCEFEGGHLATYKQLEAARKIGFHVCAAGWMAKGRVGYPIVKPGPNCGFGKTGIIDYGIRLNRSERWDAYCYNPHAKECGGVFTDPKQIFKSPGFPNEYEDNQICYWHIRLKYGQRIHLSFLDFDLEDDPGCLADYVEIYDSYDDVHGFVGRYCGDELPDDIISTGNVMTLKFLSDASVTAGGFQIKYVAMDPVSKSSQGKNTSTTSTGNKNFLAGRFSHL

SEQ ID NO: 13557 - protein, 616 aa, Homo sapiens
MAPRARRRRPLFALLLLCALLARLQVALQIAPPCTSEKHYEHLGRCCNKCEPGKYMSSKCTTTSDSVCLPCGPDEYLDSWNEEDKCLLHKVCDTGKALVAVVAGNSTTPRRCACTAGYHWSQDCECCRRNTECAPGLGAQHPLQLNKDTVCKPCLAGYFSDAFSSTDKCRPWTNCTFLGKRVEHHGTEKSDAVCSSSLPARKPPNEPHVYLPGLIILLLFASVALVAAIIFGVCYRKKGKALTANLWHWINEACGRLSGDKESSGDSCVSTHTANFGQQGACEGVLLLTLEEKTFPEDMCYPDQGGVCQGTCVGGGPYAQGEDARMLSLVSKTEIEEDSFRQMPTEDEYMDRPSQPTDQLLFLTEPGSKSTPPFSEPLEVGENDSLSQCFTGTQSTVGSESCNCTEPLCRTDWTPMSSENYLQKEVDSGHCPHWAASPSPNWADVCTGCRNPPGEDCEPLVGSPKRGPLPQCAYGMGLPPEEEASRTEARDQPEDGADGRLPSSARAGAGSGSSPGGQSPASGNVTGNSNSTFISSGQVMNFKGDIIVVYVSQTSQEGAAAAAEPMGRPVQEETLARRDSFAGNGPRFPDPCGGPEGLREPEKASRPVQEQGGAKA

SEQ ID NO: 13558 - protein, 263 aa, Homo sapiens
MAPRARRRRPLFALLLLCALLARLQVALQIAPPCTSEKHYEHLGRCCNKCEPGKYMSSKCTTTSDSVCLPCGPDEYLDSWNEEDKCLLHKVCDTGKALVAVVAGNSTTPRRCACTAGYHWSQDCECCRRNTECAPGLGAQHPLQLNKDTVCKPCLAGYFSDAFSSTDKCRPWTNCTFLGKRVEHHGTEKSDAVCSSSLPARKPPNEPHVYLPGLIILLLFASVALVAAIIFGVCYRKKGKALTANLWHWINEACGRLSGDKEM

SEQ ID NO: 13559 - protein, 263 aa, Homo sapiens
MAPRARRRRPLFALLLLCALLARLQVALQIAPPCTSEKHYEHLGRCCNKCEPGKYMSSKCTTTSDSVCLPCGPDEYLDSWNEEDKCLLHKVCDTGKALVAVVAGNSTTPRRCACTAGYHWSQDCECCRRNTECAPGLGAQHPLQLNKDTVCKPCLAGYFSDAFSSTDKCRPWTNCTFLGKRVEHHGTEKSDAVCSSSLPARKPPNEPHVYLPGLIILLLFASVALVAAIIFGVCYRKKGKALTANLWHWINEACGRLSGDKES

SEQ ID NO: 13560 - protein, 337 aa, Homo sapiens
MAPRARRRRPLFALLLLCALLARLQVALQIAPPCTSEKHYEHLGRCCNKCEPGKYMSSKCTTTSDSVCLPCGPDEYLDSWNEEDKCLLHKVCDTGKALVAVVAGNSTTPRRCACTAGYHWSQDCECCRRNTECAPGLGAQHPLQLNKDTVCKPCLAGYFSDAFSSTDKCRPWTNCTFLGKRVEHHGTEKSDAVCSSSLPARKPPNEPHVYLPGLIILLLFASVALVAAIIFGVCYRKKGKALTGNVTGNSNSTFISSGQVMNFKGDIIVVYVSQTSQEGAAAAAEPMGRPVQEETLARRDSFAGNGPRFPDPCGGPEGLREPEKASRPVQEQGGAKA

SEQ ID NO: 13561 - protein, 299 aa, Homo sapiens
MAPRARRRRPLFALLLLCALLARLQVALQIAPPCTSEKHYEHLGRCCNKCEPGKYMSSKCTTTSDSVCLPCGPDEYLDSWNEEDKCLLHKVCDTGKALVAVVAGNSTTPRRCACTAGYHWSQDCECCRRNTECAPGLGAQHPLQLNKDTVCKPCLAGYFSDAFSSTDKCRPWTNCTFLGKRVEHHGTEKSDAVCSSSLPARKPPNGNVTGNSNSTFISSGQVMNFKGDIIVVYVSQTSQEGAAAAAEPMGRPVQEETLARRDSFAGNGPRFPDPCGGPEGLREPEKASRPVQEQGGAKA

SEQ ID NO: 13562 - protein, 145 aa, Homo sapiens
MNNLLCCALVFLDISIKWTTQETFPPKYLHYDEETSHQLLCDKCPPGTYLKQHCTAKWKTVCAPCPDHYYTDSWHTSDECLYCSPVCKELQYVKQECNRTHNRVCECKEGRYLEIEFCLKHRSCPPGFGVVQAGCRRRPKPQICI

SEQ ID NO: 13563 - protein, 401 aa, Homo sapiens
MNNLLCCALVFLDISIKWTTQETFPPKYLHYDEETSHQLLCDKCPPGTYLKQHCTAKWKTVCAPCPDHYYTDSWHTSDECLYCSPVCKELQYVKQECNRTHNRVCECKEGRYLEIEFCLKHRSCPPGFGVVQAGTPERNTVCKRCPDGFFSNETSSKAPCRKHTNCSVFGLLLTQKGNATHDNICSGNSESTQKCGIDVTLCEEAFFRFAVPTKFTPNWLSVLVDNLPGTKVNAESVERIKRQHSSQEQTFQLLKLWKHQNKDQDIVKKIIQDIDLCENSVQRHIGHANLTFEQLRSLMESLPGKKVGAEDIEKTIKACKPSDQILKLLSLWRIKNGDQDTLKGLMHALKHSKTYHFPKTVTQSLKKTIRFLHSFTMYKLYQKLFLEMIGNQVQSVKISCL

SEQ ID NO: 13564 - protein, 94 aa, Homo sapiens
MARGSLRRLLRLLVLGLWLALLRSVAGEQAPASDPRPPPQAPPPAPAAAPGARTWTSAWTARLAGRDRTATSAWAALQHLLPPSGCFGPSLGAL

SEQ ID NO: 13565 - protein, 47 aa, Homo sapiens
MARGSLRRLLRLLVLGLWLALLRSVAGEQAPDPRIAESRPQPLTRGP

SEQ ID NO: 13566 - protein, 94 aa, Homo sapiens
MARGSLRRLLRLLVLGLWLALLRSVAGEQAPGAAAPPAPFRLLWPILGGALSLTFVLGLLSGFLVWRRCRRREKFTTPIEETGGEGCPAVALIQ

SEQ ID NO: 13567 - protein, 129 aa, Homo sapiens
MARGSLRRLLRLLVLGLWLALLRSVAGEQAPGTAPCSRGSSWSADLDKCMDCASCRARPHSDFCLGCAAAPPAPFRLLWPILGGALSLTFVLGLLSGFLVWRRCRRREKFTTPIEETGGEGCPAVALIQ

SEQ ID NO: 13568 - protein, 226 aa, Homo sapiens
MARGSLRRLLRLLVLGLWLALLRSVAGEQAPGTRDSGVGEPRAGAREPDWVSGEQRRTGGTGGCGDLGSGGLQTARSRLWEVPSLSKLHSQSGPQFLPPSNWGWGGSSVPQVRSTSNGERKRCSTSCPLPAALAHPWGRSEPDLRAGAAFWLFGLETMPQEREVHHPHRGDRRRGLPSCGADPVTMCPLPAGARPLIIHSSILEPVSASQTRREPSSSNHKGGGGR

SEQ ID NO: 13569 - protein, 80 aa, Homo sapiens
MDCASCRARPHSDFCLGCAAAPPAPFRLLWPILGGALSLTFVLGLLSGFLVWRRCRRREKFTTPIEETGGEGCPAVALIQ

SEQ ID NO: 13570 - protein, 183 aa, Homo sapiens
MEPPGDWGPPPWRSTPKTDVLRLVLYLTFLGAPCYAPALPSCKEDEYPVGSECCPKCSPGYRVKEACGELTGTVCEPCPPGTYIAHLNGLSKCLQCQMCDPAMGLRASRNCSRTENAVCGCSPGHFCIVQDGDHCAACRAYATSSPGQRVQKGGTESQDTLCQNCPPGTFSPNGTLEECQHQT

SEQ ID NO: 13571 - protein, 231 aa, Homo sapiens
MEPPGDWGPPPWRSTPKTDVLRLVLYLTFLGAPCYAPALPSCKEDEYPVGSECCPKCSPGYRVKEACGELTGTVCEPCPPGTYIAHLNGLSKCLQCQMCDPAMGLRASRNCSRTENAVCGCSPGHFCIVQDGDHCAACRAYATSSPGQRVQKGGTESQDTLCQNCPPGTFSPNGTLEECQHQTKCSWLVTKAGAGTSSSHWVWWFLSGSLVIVIVCSTVGLIICVKRRKPR

SEQ ID NO: 13572 - protein, 231 aa, Homo sapiens; identical to SEQ ID NO: 13571

SEQ ID NO: 13573 - protein, 231 aa, Homo sapiens; identical to SEQ ID NO: 13571

SEQ ID NO: 13574 - protein, 283 aa, Homo sapiens
MEPPGDWGPPPWRSTPKTDVLRLVLYLTFLGAPCYAPALPSCKEDEYPVGSECCPKCSPGYRVKEACGELTGTVCEPCPPGTYIAHLNGLSKCLQCQMCDPAMGLRASRNCSRTENAVCGCSPGHFCIVQDGDHCAACRAYATSSPGQRVQKGGTESQDTLCQNCPPGTFSPNGTLEECQHQTKCSWLVTKAGAGTSSSHWVWWFLSGSLVIVIVCSTVGLIICVKRRKPRGDVVKVIVSVQRKRQEAEGEATVIEALQAPPDVTTVAVEETIPSFTGRSPNH

SEQ ID NO: 13575 - protein, 193 aa, Homo sapiens
MEPPGDWGPPPWRSTPKTDVLRLVLYLTFLGAPCYAPALPSCKEDEYPVGSECCPKCSPGYRVKEACGELTGTVCEPCPPGTYIAHLNGLSKCLQCQMCDPAMGLRASRNCSRTENAVCGCSPGHFCIVQDGDHCAACRAYATSSPGQRVQKGGTESQDTLCQNCPPGTFSPNGTLEECQHQTNRAWKSQTDL

SEQ ID NO: 13576 - protein, 25 aa, Homo sapiens
  SITE 1: note = misc_feature - Xaa can be any naturally occurring amino acid
XGTLEECQHQTNWPNHMCEKKKAKG

SEQ ID NO: 13577 - protein, 255 aa, Homo sapiens
MAQHGAMGAFRALCGLALLCALSLGQRPTGGPGCGPGRLLLGTGTDARCCRVHTTRCCRDYPGEECCSEWDCMCVQPEFHCGDPCCTTCRHHPCPPGQGVQSQGKFSFGFQCIDCASGTFSGGHEGHCKPWTDCCWRCRRRPKTPEAASSPRKSGASDRQRRRGGWETCGCEPGRPPGPPTAASPSPGAPQAAGALRSALGRALLPWQQKWVQEGGSDQRPGPCSSAAAAGPCRRERETQSWPPSSLAGPDGVGS

SEQ ID NO: 13578 - protein, 234 aa, Homo sapiens
MAQHGAMGAFRALCGLALLCALSLGQRPTGGPGCGPGRLLLGTGTDARCCRVHTTRCCRDYPGEECCSEWDCMCVQPEFHCGDPCCTTCRHHPCPPGQGVQSQGKFSFGFQCIDCASGTFSGGHEGHCKPWTDCTQFGFLTVFPGNKTHNAVCVPGSPPAEPLGWLTVVLLAVAACVLLLTSAQLGLHIWQLRKTQLLLEVPPSTEDARSCQFPEEERGERSAEEKGRLGDLWV

SEQ ID NO: 13579 - protein, 241 aa, Homo sapiens
MAQHGAMGAFRALCGLALLCALSLGQRPTGGPGCGPGRLLLGTGTDARCCRVHTTRCCRDYPGEECCSEWDCMCVQPEFHCGDPCCTTCRHHPCPPGQGVQSQGKFSFGFQCIDCASGTFSGGHEGHCKPWTDCTQFGFLTVFPGNKTHNAVCVPGSPPAEPLGWLTVVLLAVAACVLLLTSAQLGLHIWQLRSQCMWPRETQLLLEVPPSTEDARSCQFPEEERGERSAEEKGRLGDLWV

SEQ ID NO: 13580 - protein, 169 aa, Homo sapiens
MCVQPEFHCGDPCCTTCRHHPCPPGQGVQSQGKFSFGFQCIDCASGTFSGGHEGHCKPWTDCTQFGFLTVFPGNKTHNAVCVPGSPPAEPLGWLTVVLLAVAACVLLLTSAQLGLHIWQLRSQCMWPRETQLLLEVPPSTEDARSCQFPEEERGERSAEEKGRLGDLWV

SEQ ID NO: 13581 - protein, 122 aa, Homo sapiens
MGLSTVPDLLLPLEPTCTMTVQARGRIRTAGSVRAAPSPLQKTTSDTASAAPNAERKWVRWRSLLAQWTGTPCVAAGRTSTGIIGVKTFSSASIAASASMGPCTSPARRNRTPCAPAMQVSF

SEQ ID NO: 13582 - protein, 412 aa, Homo sapiens
MGLSTVPDLLLPLVLLELLVGIYPSGVIGLVPHLGDREKRDSVCPQGKYIHPQNNSICCTKCHKEMGQVEISSCTVDRDTVCGCRKNQYRHYWSENLFQCFNCSLCLNGTVHLSCQEKQNTVCTCHAGFFLRENECVSCSNCKKSLECTKLCLPQIENVKGTEDSGTTVLLPLVIFFGLCLLSLLFIGLMYRYQRWKSKLYSIVCGKSTPEKEGELEGTTTKPLAPNPSFSPTPGFTPTLGFSPVPSSTFTSSSTYTPGDCPNFAAPRREVAPPYQGADPILATALASDPIPNPLQKWEDSAHKPQSLDTDDPATLYAVVENVPPLRWKEFVRRLGLSDHEIDRLELQNGRCLREAQYSMLATWRRRTPRREATLELLGRVLRDMDLLGCLEDIEEALCGPAALPPAPSLLR

SEQ ID NO: 13583 - protein, 72 aa, Homo sapiens
MGLSTVPDLLLPLVLLELLVGIYPSGVIGLVPHLGDREKRDSVCPQGKYIHPQNNSICCTKCHKEPVPALLE

SEQ ID NO: 13584 - protein, 118 aa, Homo sapiens
MGLSTVPDLLLPLVLLELLVGIYPSGVIGLVPHLGDREKRDSVCPQGKYIHPQNNSICCTKCHKGPGQDTDCRECESGSFTASENHLRHCLSCSKCRKEMGQVEISSCTVDRDTVCGC

SEQ ID NO: 13585 - protein, 71 aa, Homo sapiens
MGLSTVPDLLLPLVLLELLVGIYPSGVIGLVPHLGDREKRDSVCPQGKYIHPQNNSICCTKCHKGTYLYND

SEQ ID NO: 13586 - protein, 254 aa, Homo sapiens
MGLSTVPDLLLPLVLLELLVGIYPSGVIGLVPHLGDREKRDSVCPQGKYIHPQNNSICCTKCHKGTYLYNDCPGPGQDTDCRECESGSFTASENHLRHCLSCSKCRKEMGQVEISSCTVDRDTVCGCRKNQYRHYWSENLFQCFNCSLCLNGTVHLSCERSSPEAKPSPHPRGWPLPHAVALPFLPPPVFCGSDNQLLSGRPHPVPRHFLCPVGWGCRRFSFSCAALLPTGQEKQNTVCTCHAGFFLRENECVS

SEQ ID NO: 13587 - protein, 218 aa, Homo sapiens
MGLSTVPDLLLPLVLLELLVGIYPSGVIGLVPHLGDREKRDSVCPQGKYIHPQNNSICCTKCHKGTYLYNDCPGPGQDTDCRECESGSFTASENHLRHCLSCSKCRKEMGQVEISSCTVDRDTVCGCRKNQYRHYWSENLFQCFNCSLCLNGTVHLSCQEKQNTVCTCHAGFFLRENECVSCSKVLLCRPGWNAVARSRLTATSASQIQAILLLQPPK

SEQ ID NO: 13588 - protein, 298 aa, Homo sapiens
MGLSTVPDLLLPLVLLELLVGIYPSGVIGLVPHLGDREKRDSVCPQGKYIHPQNNSICCTKCHKGTYLYNDCPGPGQDTDCRECESGSFTASENHLRHCLSCSKCRKEMGQVEISSCTVDRDTVCGCRKNQYRHYWSENLFQCFNCSLCLNGTVHLSCQEKQNTVCTCHAGFFLRENECVSCSNCKKSLECTKLCLPQIENVKGTEDSGTTVLLPLVIFFGLCLLSLLFIGLMYRYQRWKSKLYSIGEWGLWEGEGAGGGEGGHGWVRWTCVEGGEECPLSSYRWGLWAEGGPGWLGR

SEQ ID NO: 13589 - protein, 455 aa, Homo sapiens
MGLSTVPDLLLPLVLLELLVGIYPSGVIGLVPHLGDREKRDSVCPQGKYIHPQNNSICCTKCHKGTYLYNDCPGPGQDTDCRECESGSFTASENHLRHCLSCSKCRKEMGQVEISSCTVDRDTVCGCRKNQYRHYWSENLFQCFNCSLCLNGTVHLSCQEKQNTVCTCHAGFFLRENECVSCSNCKKSLECTKLCLPQIENVKGTEDSGTTVLLPLVIFFGLCLLSLLFIGLMYRYQRWKSKLYSIVCGKSTPEKEGELEGTTTKPLAPNPSFSPTPGFTPTLGFSPVPSSTFTSSSTYTPGDCPNFAAPRREVAPPYQGADPILATALASDPIPNPLQKWEDSAHKPQSLDTDDPATLYAVVENVPPLRWKEFVRRLGLSDHEIDRLELQNGRCLREAQYSMLATWRRRTPRREATLELLGRVLRDMDLLGCLEDIEEALCGPAALPPAPSLLR

SEQ ID NO: 13590 - protein, 155 aa, Homo sapiens
MAPVAVWAALAVGLELWAAAHALPAQVAFTPYAPEPGSTCRLREYYDQTAQMCCSKCSPGQHAKVFCTKTSDTVCDSCEDSTYTQLWNWVPECLSCGSRCSSDQVETQACTREQNRICTCRPGWYCALSKQEGCRLCAPLRKCRPGFGVARPDLS

SEQ ID NO: 13591 - protein, 461 aa, Homo sapiens
MAPVAVWAALAVGLELWAAAHALPAQVAFTPYAPEPGSTCRLREYYDQTAQMCCSKCSPGQHAKVFCTKTSDTVCDSCEDSTYTQLWNWVPECLSCGSRCSSDQVETQACTREQNRICTCRPGWYCALSKQEGCRLCAPLRKCRPGFGVARPGTETSDVVCKPCAPGTFSNTTSSTDICRPHQICNVVAIPGNASMDAVCTSTSPTRSMAPGAVHLPQPVSTRSQHTQPTPEPSTAPSTSFLLPMGPSPPAEGSTGDFALPVGLIVGVTALGLLIIGVVNCVIMTQVKKKPLCLQREAKVPHLPADKARGTQGPEQQHLLITAPSSSSSSLESSASALDRRAPTRNQPQAPGVEASGAGEARASTGSSDSSPGGHGTQVNVTCIVNVCSSSDHSSQCSSQASSTMGDTDSSPSESPKDEQVPFSKEECAFRSQLETPETLLGSTEEKPLPLGVPDAGMKPS

SEQ ID NO: 13592 - protein, 126 aa, Homo sapiens
MEQRPRGCAAVAAALLLVLLGARAQGGTRSPRCDCAGDFHKKIGLFCCRGCPAASQVALENCSAVADTRCGCKPGWFVECQVSQCVSSSPFYCQPCLDCGALHRHTRLLCHPSVTLGQRPHPSSTS

SEQ ID NO: 13593 - protein, 136 aa, Homo sapiens
MEQRPRGCAAVAAALLLVLLGARAQGGTRSPRCDCAGDFHKKIGLFCCRGCPAASQVALENCSAVADTRCGCKPGWFVECQVSQCVSSSPFYCQPCLDCGALHRHTRLLCSRRDTDCGTCLPGFYEHGDGCVSCPT

SEQ ID NO: 13594 - protein, 372 aa, Homo sapiens
MEQRPRGCAAVAAALLLVLLGARAQGGTRSPRCDCAGDFHKKIGLFCCRGCPAASQVALENCSAVADTRCGCKPGWFVECQVSQCVSSSPFYCQPCLDCGALHRHTRLLCSRRDTDCGTCLPGFYEHGDGCVSCPTSTLGSCPERCAAVCGWRQMFWVQVLLAGLVVPLLLGATLTYTYRHCWPHKPLVTADEAGMEALTPPPATHLSPLDSAHTLLAPPDSSEKICTVQLVGNSWTPGYPETQEALCPQVTWSWDQLPSRALGPAAAPTLSPESPAGSPAMMLQPGPQLYDVMDAVPARRWKEFVRTLGLREAEIEAVEVEIGRFRDQQYEMLKRWRQQQPAGLGAVYAALERMGLDGCVEDLRSRLQRGP

SEQ ID NO: 13595 - protein, 234 aa, Homo sapiens
MEQRPRGCAAVAAALLLVLLGARAQGGTRSPRCDCAGDFHKKIGLFCCRGCPADEAGMEALTPPPATHLSPLDSAHTLLAPPDSSEKICTVQLVGNSWTPGYPETQEALCPQVTWSWDQLPSRALGPAAAPTLSPESPAGSPAMMLQPGPQLYDVMDAVPARRWKEFVRTLGLREAEIEAVEVEIGRFRDQQYEMLKRWRQQQPAGLGAVYAALERMGLDGCVEDLRSRLQRGP

SEQ ID NO: 13596 - protein, 181 aa, Homo sapiens
MEQRPRGCAAVAAALLLVLLGARAQGGTRSPRCDCAGDFHKKIGLFCCRGCPAGHYLKAPCTEPCGNSTCLVCPQDTFLAWENHHNSECARCQACDEQASQVALENCSAVADTRCGCKPGWFVECQVSQCVSSSPFYCQPCLDCGALHRHTRLLCSRRDTDCGTCLPGFYEHGDGCVSCPT

SEQ ID NO: 13597 - protein, 277 aa, Homo sapiens
MEQRPRGCAAVAAALLLVLLGARAQGGTRSPRCDCAGDFHKKIGLFCCRGCPAGHYLKAPCTEPCGNSTCLVCPQDTFLAWENHHNSECARCQACDEQASQVALENCSAVADTRCGCKPGWFVECQVSQCVSSSPFYCQPCLDCGALHRHTRLLCSRRDTDCGTCLPGFYEHGDGCVSCPTPPPSLAGAPWGAVQSAVPLSVAGGRVGGVLGMRVGELGWTEGRRVRRGATTQHPPAAFSVLGPGAPGWPCGPPPAWGHPDLHIPPLLASQAPGYCR

SEQ ID NO: 13598 - protein, 426 aa, Homo sapiens
MEQRPRGCAAVAAALLLVLLGARAQGGTRSPRCDCAGDFHKKIGLFCCRGCPAGHYLKAPCTEPCGNSTCLVCPQDTFLAWENHHNSECARCQACDEQASQVALENCSAVADTRCGCKPGWFVECQVSQCVSSSPFYCQPCLDCGALHRHTRLLCSRRDTDCGTCLPGFYEHGDGCVSCPTPPPSLAGAPWGAVQSAVPLSVAGGRVGVFWVQVLLAGLVVPLLLGATLTYTYRHCWPHKPLVTADEAGMEALTPPPATHLSPLDSAHTLLAPPDSSEKICTVQLVGNSWTPGYPETQEALCPQVTWSWDQLPSRALGPAAAPTLSPESPAGSPAMMLQPGPQLYDVMDAVPARRWKEFVRTLGLREAEIEAVEVEIGRFRDQQYEMLKRWRQQQPAGLGAVYAALERMGLDGCVEDLRSRLQRGP

SEQ ID NO: 13599 - protein, 417 aa, Homo sapiens
MEQRPRGCAAVAAALLLVLLGARAQGGTRSPRCDCAGDFHKKIGLFCCRGCPAGHYLKAPCTEPCGNSTCLVCPQDTFLAWENHHNSECARCQACDEQASQVALENCSAVADTRCGCKPGWFVECQVSQCVSSSPFYCQPCLDCGALHRHTRLLCSRRDTDCGTCLPGFYEHGDGCVSCPTSTLGSCPERCAAVCGWRQMFWVQVLLAGLVVPLLLGATLTYTYRHCWPHKPLVTADEAGMEALTPPPATHLSPLDSAHTLLAPPDSSEKICTVQLVGNSWTPGYPETQEALCPQVTWSWDQLPSRALGPAAAPTLSPESPAGSPAMMLQPGPQLYDVMDAVPARRWKEFVRTLGLREAEIEAVEVEIGRFRDQQYEMLKRWRQQQPAGLGAVYAALERMGLDGCVEDLRSRLQRGP

SEQ ID NO: 13600 - protein, 380 aa, Homo sapiens
MEQRPRGCAAVAAALLLVLLGARAQGGTRSPRCDCAGDFHKKIGLFCCRGCPAGHYLKAPCTEPCGNSTCLVCPQDTFLAWENHHNSECARCQACDEQASQVALENCSAVADTRCGCKPGWFVECQVSQCVSSSPFYCQPCLDCGALHRHTRLLCSRRDTDCGTCLPGFYEHGDGCVSCPTSTLGSCPERCAAVCGWRQNEAGMEALTPPPATHLSPLDSAHTLLAPPDSSEKICTVQLVGNSWTPGYPETQEALCPQVTWSWDQLPSRALGPAAAPTLSPESPAGSPAMMLQPGPQLYDVMDAVPARRWKEFVRTLGLREAEIEAVEVEIGRFRDQQYEMLKRWRQQQPAGLGAVYAALERMGLDGCVEDLRSRLQRGP

SEQ ID NO: 13601 - protein, 253 aa, Homo sapiens
MEQRPRGCAAVAAALLLVLLGARAQGGTRSPRCDCAGDFHKKIGLFCCRGCPAGHYLKAPCTEPCGNSTCLVCPQDTFLAWENHHNSECARCQACDEQASQVALENCSAVADTRCGCKPGWFVECQVSQCVSSSPFYCQPCLDCGALHRHTRLLCSRRDTDCGTCLPGFYEHGDGCVSCPTSTLGSCPERCAAVCGWRQSRWCAGNASGRTGMDRGEAGEEGGNHPTPTSCFQCSGSRCSWLALWSPSCLGPP

SEQ ID NO: 13602 - protein, 218 aa, Homo sapiens
MEQRPRGCAAVAAALLLVLLGARAQGGTRSPRCDCAGDFHKKIGLFCCRGCPAGHYLKAPCTEPCGNSTCLVCPQDTFLAWENHHNSECARCQACDEQASQVALENCSAVADTRCGCKPGWFVECQVSQCVSSSPFYCQPCLDCGALHRHTRLLCSRRDTDCGTCLPGFYEHGDGCVSCPTVLGPGAPGWPCGPPPAWGHPDLHIPPLLASQAPGYCR

SEQ ID NO: 13603 - protein, 45 aa, Homo sapiens
MFWVQVLLAGLVVPLLLGATLTYTYRHCWPHKPLVTDEAGMEALT

SEQ ID NO: 13604 - protein, 300 aa, Homo sapiens
MRALEGPGLSLLCLVLALPALLPVPAVRGVAETPTYPWRDAETGERLVCAQCPPGTFVQRPCRRDSPTTCGPCPPRHYTQFWNYLERCRYCNVLCGEREEEARACHATHNRACRCRTGFFAHAGFCLEHASCPPGAGVIAPGTPSQNTQCQPCPPGTFSASSSSSEQCQPHRNCTALGLALNVPGSSSHDTLCTSCTGFPLSTRVPGAEECERAVIDFVAFQDISIKRLQRLLQALEAPEGWGPTPRAGRAALQLKLRRRLTELLGAQDGALLVRLLQALRVARMPGLERSVRERFLPVH

SEQ ID NO: 13605 - protein, 244 aa, Homo sapiens
MDPNRISEDGTHCIYRILRLHENADFQDTTLESQDTKLIPDSCRRIKQAFQGAVQKELQHIVGSQHIRAEKAMVDGSWLDLAKRSKLEAQPFAHLTINATDIPSGSHKVSLSSWYHDRGWAKISNMTFSNGKLIVNQDGFYYLYANICFRHHETSGDLATEYLQLMVYVTKTSIKIPSSHTLMKGGSTKYWSGNSEFHFYSINVGGFFKLRSGEEISIEVSNPSLLDPDQDATYFGAFKVRDID

SEQ ID NO: 13606 - protein, 244 aa, Homo sapiens; identical to SEQ ID NO: 13605

SEQ ID NO: 13607 - protein, 244 aa, Homo sapiens; identical to SEQ ID NO: 13605

SEQ ID NO: 13608 - protein, 270 aa, Homo sapiens
MFVALLGLGLGQVVCSVALFFYFRAQMDPNRISEDGTHCIYRILRLHENADFQDTTLESQDTKLIPDSCRRIKQAFQGAVQKELQHIVGSQHIRAEKAMVDGSWLDLAKRSKLEAQPFAHLTINATDIPSGSHKVSLSSWYHDRGWAKISNMTFSNGKLIVNQDGFYYLYANICFRHHETSGDLATEYLQLMVYVTKTSIKIPSSHTLMKGGSTKYWSGNSEFHFYSINVGGFFKLRSGEEISIEVSNPSLLDPDQDATYFGAFKVRDID

SEQ ID NO: 13609 - protein, 317 aa, Homo sapiens
MRRASRDYTKYLRGSEEMGGGPGAPHEGPLHAPPPPAPHQPPAASRSMFVALLGLGLGQVVCSVALFFYFRAQMDPNRISEDGTHCIYRILRLHENADFQDTTLESQDTKLIPDSCRRIKQAFQGAVQKELQHIVGSQHIRAEKAMVDGSWLDLAKRSKLEAQPFAHLTINATDIPSGSHKVSLSSWYHDRGWAKISNMTFSNGKLIVNQDGFYYLYANICFRHHETSGDLATEYLQLMVYVTKTSIKIPSSHTLMKGGSTKYWSGNSEFHFYSINVGGFFKLRSGEEISIEVSNPSLLDPDQDATYFGAFKVRDID

SEQ ID NO: 13610 - protein, 134 aa, Homo sapiens
MAARRSQRRRGRRGEPGTALLVPLALGLGLALACLGLLLAVVSLGSRASLSAQEPAQEELVAEEDQDPSELNPQTEESQDPAPFLNRLVRPRRSAPKGRKTRARRAIAAHYEVHPRPGQDGAQADGGYTTCLRP

SEQ ID NO: 13611 - protein, 249 aa, Homo sapiens
MAARRSQRRRGRRGEPGTALLVPLALGLGLALACLGLLLAVVSLGSRASLSAQEPAQEELVAEEDQDPSELNPQTEESQDPAPFLNRLVRPRRSAPKGRKTRARRAIAAHYEVHPRPGQDGAQAGVDGTVSGWEEARINSSSPLRYNRQIGEFIVTRAGLYYLYCQVHFDEGKAVYLKLDLLVDGVLALRCLEEFSATAASSLGPQLRLCQVSGLLALRPGSSLRIRTLPWAHLKAAPFLTYFGLFQVH

SEQ ID NO: 13612 - protein, 330 aa, Homo sapiens
MAARRSQRRRGRRGEPGTALLVPLALGLGLALACLGLLLAVVSLGSRASLSAQEPAQEELVAEEDQDPSELNPQTEESQDPAPFLNRLVRPRRSAPKGRKTRARRAIAAHYEVHPRPGQDGAQAGVDGTVSGWEEARINSSSPLRYNRQIGEFIVTRAGLYYLYCQSSDALEAWENGERSRKRRAVLTQKQKKQHSVLHLVPINATSKDDSDVTEVMWQPALRRGRGLQAQGYGVRIQDAGVYLLYSQVLFQDVTFTMGQVVSREGQGRQETLFRCIRSMPSHPDRAYNSCYSAGVFHLHQGDILSVIIPRARAKLNLSPHGTFLGFVKL

SEQ ID NO: 13613 - protein, 251 aa, Homo sapiens
MAEDLGLSFGETASVEMLPEHGSCRPKARSSSARWALTCCLVLLPFLAGLTTYLLVSQLRAQGEACVQFQALKGQEFAPSHQQVYAPLRADGDKPRAHLTVVRQTPTQHFKNQFPALHWEHELGLAFTKNRMNYTNKFLLIPESGDYFIYSQVTFRGMTSECSEIRQAGRPNKPDSITVVITKVTDSYPEPTQLLMGTKSVCEVGSNWFQPIYLGAMFSLQEGDKLMVNVSDISLVDYTKEDKTFFGAFLL

SEQ ID NO: 13614 - protein, 174 aa, Homo sapiens
MRHFLSKVYSFPMRKLILFLVFPVVRQTPTQHFKNQFPALHWEHELGLAFTKNRMNYTNKFLLIPESGDYFIYSQVTFRGMTSECSEIRQAGRPNKPDSITVVITKVTDSYPEPTQLLMGTKSVCEVGSNWFQPIYLGAMFSLQEGDKLMVNVSDISLVDYTKEDKTFFGAFLL

SEQ ID NO: 13615 - protein, 1299 aa, Homo sapiens
MSLQEMFRFPMGLLLGSVLLVASAPATLEPPGCSNKEQQVTVSHTYKIDVPKSALVQVDADPQPLSDDGASLLALGEAREEQNIIFRHNIRLQTPQKDCELAGSVQDLLARVKKLEEEMVEMKEQCSAQRCCQGVTDLSRHCSGHGTFSLETCSCHCEEGREGPACERLACPGACSGHGRCVDGRCLCHEPYVGADCGYPACPENCSGHGECVRGVCQCHEDFMSEDCSEKRCPGDCSGHGFCDTGECYCEEGFTGLDCAQVVTPQGLQLLKNTEDSLLVSWEPSSQVDHYLLSYYPLGKELSGKQIQVPKEQHSYEILGLLPGTKYIVTLRNVKNEVSSSPQHLLATTDLAVLGTAWVTDETENSLDVEWENPSTEVDYYKLRYGPMTGQEVAEVTVPKSSDPKSRYDITGLHPGTEYKITVVPMRGELEGKPILLNGRTEIDSPTNVVTDRVTEDTATVSWDPVQAVIDKYVVRYTSADGDTKEMAVHKDESSTVLTGLKPGEAYKVYVWAERGNQGSKKADTNALTEIDSPANLVTDRVTENTATISWDPVQATIDKYVVRYTSADDQETREVLVGKEQSSTVLTGLRPGVEYTVHVWAQKGDRESKKADTNAPTDIDSPKNLVTDRVTENMATVSWDPVQAAIDKYVVRYTSAGGETREVPVGKEQSSTVLTGLRPGMEYMVHVWAQKGDQESKKADTKAQTDIDSPQNLVTDRVTENMATVSWDPVRATIDRYVVRYTSAKDGETREVPVGKEQSSTVLTGLRPGVEYTVHVWAQKGAQESKKADTKAQTDIDSPQNLVTDWVTENTATVSWDPVQATIDRYVVHYTSANGETREVPVGKEQSSTVLTGLRPGMEYTVHVWAQKGNQESKKADTKAQTEIDGPKNLVTDWVTENMATVSWDPVQATIDKYMVRYTSADGETREVPVGKEHSSTVLTGLRPGMEYMVHVWAQKGAQESKKADTKAQTELDPPRNLRPSAVTQSGGILTWTPPSAQIHGYILTYQFPDGTVKEMQLGREDQRFALQGLEQGATYPVSLVAFKGGRRSRNVSTTLSTVGARFPHPSDCSQVQQNSNAASGLYTIYLHGDASRPLQVYCDMETDGGGWIVFQRRNTGQLDFFKRWRSYVEGFGDPMKEFWLGLDKLHNLTTGTPARYEVRVDLQTANESAYAIYDFFQVASSKERYKLTVGKYRGTAGDALTYHNGWKFTTFDRDNDIALSNCALTHHGGWWYKNCHLANPNGRYGETKHSEGVNWEPWKGHEFSIPYVELKIRPHGYSREPVLGRKKRTLRGRLRTF

SEQ ID NO: 13616 - protein, 1122 aa, Homo sapiens
MSLQEMFRFPMGLLLGSVLLVASAPATLEPPGCSNKEQQVTVSHTYKIDVPKSALVQVDADPQPLSDDGASLLALGEAREEQNIIFRHNIRLQTPQKDCELAGSVQDLLARVKKLEEEMVEMKEQCSAQRCCQGVTDLSRHCSGHGTFSLETCSCHCEEGREGPACERLACPGACSGHGRCVDGRCLCHEPYVGADCGYPACPENCSGHGECVRGVCQCHEDFMSEDCSEKRCPGDCSGHGFCDTGECYCEEGFTGLDCAQVVTPQGLQLLKNTEDSLLVSWEPSSQVDHYLLSYYPLGKELSGKQIQVPKEQHSYEILGLLPGTKYIVTLRNVKNEVSSSPQHLLATTDLAVLGTAWVTDETENSLDVEWENPSTEVDYYKLRYGPMTGQEVAEVTVPKSSDPKSRYDITGLHPGTEYKITVVPMRGELEGKPILLNGRTEIDSPTNVVTDRVTEDTATVSWDPVQAVIDKYVVRYTSADGDTKEMAVHKDESSTVLTGLKPGEAYKVYVWAERGNQGSKKADTNALTDIDSPQNLVTDRVTENMATVSWDPVRATIDRYVVRYTSAKDGETREVPVGKEQSSTVLTGLRPGVEYTVHVWAQKGAQESKKADTKAQTDIDSPQNLVTDWVTENTATVSWDPVQATIDRYVVHYTSANGETREVPVGKEQSSTVLTGLRPGMEYTVHVWAQKGNQESKKADTKAQTEIDGPKNLVTDWVTENMATVSWDPVQATIDKYMVRYTSADGETREVPVGKEHSSTVLTGLRPGMEYMVHVWAQKGAQESKKADTKAQTELDPPRNLRPSAVTQSGGILTWTPPSAQIHGYILTYQFPDGTVKEMQLGREDQRFALQGLEQGATYPVSLVAFKGGRRSRNVSTTLSTVGARFPHPSDCSQVQQNSNAASGLYTIYLHGDASRPLQVYCDMETDGGGWIVFQRRNTGQLDFFKRWRSYVEGFGDPMKEFWLGLDKLHNLTTGTPARYEVRVDLQTANESAYAIYDFFQVASSKERYKLTVGKYRGTAGDALTYHNGWKFTTFDRDNDIALSNCALTHHGGWWYKNCHLANPNGRYGETKHSEGVNWEPWKGHEFSIPYVELKIRPHGYSREPVLGRKKRTLRGRLRTF

SEQ ID NO: 13617 - protein, 1122 aa, Homo sapiens
MSLQEMFRFPMGLLLGSVLLVASAPATLEPPGCSNKEQQVTVSHTYKIDVPKSALVQVDADPQPLSDDGASLLALGEAREEQNIIFRHNIRLQTPQKDCELAGSVQDLLARVKKLEEEMVEMKEQCSAQRCCQGVTDLSRHCSGHGTFSLETCSCHCEEGREGPACERLACPGACSGHGRCVDGRCLCHEPYVGADCGYPACPENCSGHGECVRGVCQCHEDFMSEDCSEKRCPGDCSGHGFCDTGECYCEEGFTGLDCAQVVTPQGLQLLKNTEDSLLVSWEPSSQVDHYLLSYYPLGKELSGKQIQVPKEQHSYEILGLLPGTKYIVTLRNVKNEVSSSPQHLLATTDLAVLGTAWVTDETENSLDVEWENPSTEVDYYKLRYGPMTGQEVAEVTVPKSSDPKSRYDITGLHPGTEYKITVVPMRGELEGKPILLNGRTEIDSPTNVVTDRVTEDTATVSWDPVQAVIDKYVVRYTSADGDTKEMAVHKDESSTVLTGLKPGEAYKVYVWAERGNQGSKKADTNALTEIDSPANLVTDRVTENTATISWDPVQATIDRYVVRYTSAKDGETREVPVGKEQSSTVLTGLRPGVEYTVHVWAQKGAQESKKADTKAQTDIDSPQNLVTDWVTENTATVSWDPVQATIDRYVVHYTSANGETREVPVGKEQSSTVLTGLRPGMEYTVHVWAQKGNQESKKADTKAQTEIDGPKNLVTDWVTENMATVSWDPVQATIDKYMVRYTSADGETREVPVGKEHSSTVLTGLRPGMEYMVHVWAQKGAQESKKADTKAQTELDPPRNLRPSAVTQSGGILTWTPPSAQIHGYILTYQFPDGTVKEMQLGREDQRFALQGLEQGATYPVSLVAFKGGRRSRNVSTTLSTVGARFPHPSDCSQVQQNSNAASGLYTIYLHGDASRPLQVYCDMETDGGGWIVFQRRNTGQLDFFKRWRSYVEGFGDPMKEFWLGLDKLHNLTTGTPARYEVRVDLQTANESAYAIYDFFQVASSKERYKLTVGKYRGTAGDALTYHNGWKFTTFDRDNDIALSNCALTHHGGWWYKNCHLANPNGRYGETKHSEGVNWEPWKGHEFSIPYVELKIRPHGYSREPVLGRKKRTLRGRLRTF

SEQ ID NO: 13618 - protein, 1358 aa, Homo sapiens
MGADGETVVLKNMLIGINLILLGSMIKPSECQLEVTTERVQRQSVEEEGGIANYNTSSKEQPVVFNHVYNINVPLDNLCSSGLEASAEQEVSAEDETLAEYMGQTSDHESQVTFTHRINFPKKACPCASSAQVLQELLSRIEMLEREVSVLRDQCNANCCQESAATGQLDYIPHCSGHGNFSFESCGCICNEGWFGKNCSEPYCPLGCSSRGVCVDGQCICDSEYSGDDCSELRCPTDCSSRGLCVDGECVCEEPYTGEDCRELRCPGDCSGKGRCANGTCLCEEGYVGEDCGQRQCLNACSGRGQCEEGLCVCEEGYQGPDCSAVAPPEDLRVAGISDRSIELEWDGPMAVTEYVISYQPTALGGLQLQQRVPGDWSGVTITELEPGLTYNISVYAVISNILSLPITAKVATHLSTPQGLQFKTITETTVEVQWEPFSFSFDGWEISFIPKNNEGGVIAQVPSDVTSFNQTGLKPGEEYIVNVVALKEQARSPPTSASVSTVIDGPTQILVRDVSDTVAFVEWIPPRAKVDFILLKYGLVGGEGGRTTFRLQPPLSQYSVQALRPGSRYEVSVSAVRGTNESDSATTQFTTEIDAPKNLRVGSRTATSLDLEWDNSEAEVQEYKVVYSTLAGEQYHEVLVPRGIGPTTRATLTDLVPGTEYGVGISAVMNSQQSVPATMNARTELDSPRDLMVTASSETSISLIWTKASGPIDHYRITFTPSSGIASEVTVPKDRTSYTLTDLEPGAEYIISVTAERGRQQSLESTVDAFTGFRPISHLHFSHVTSSSVNITWSDPSPPADRLILNYSPRDEEEEMMEVSLDATKRHAVLMGLQPATEYIVNLVAVHGTVTSEPIVGSITTGIDPPKDITISNVTKDSVMVSWSPPVASFDYYRVSYRPTQVGRLDSSVVPNTVTEFTITRLNPATEYEISLNSVRGREESERICTLVHTAMDNPVDLIATNITPTEALLQWKAPVGEVENYVIVLTHFAVAGETILVDGVSEEFRLVDLLPSTHYTATMYATNGPLTSGTISTNFSTLLDPPANLTASEVTRQSALISWQPPRAEIENYVLTYKSTDGSRKELIVDAEDTWIRLEGLLENTDYTVLLQAAQDTTWSSITSTAFTTGGRVFPHPQDCAQHLMNGDTLSGVYPIFLNGELSQKLQVYCDMTTDGGGWIVFQRRQNGQTDFFRKWADYRVGFGNVEDEFWLGLDNIHRITSQGRYELRVDMRDGQEAAFASYDRFSVEDSRNLYKLRIGSYNGTAGDSLSYHQGRPFSTEDRDNDVAVTNCAMSYKGAWWYKNCHRTNLNGKYGESRHSQGINWYHWKGHEFSIPFVEMKMRPYNHRLMAGRKRQSLQF

SEQ ID NO: 13619 - protein, 1358 aa, Homo sapiens; identical to SEQ ID NO: 13618

SEQ ID NO: 13620 - protein, 181 aa, Homo sapiens
  SITE 1: note = misc_feature - Xaa can be any naturally occurring amino acid
XINFPKKACPCASSAQVLQELLSRIEMLEREVSVLRDQCNANCCQESAATVAPPEDLRVAGISDRSIELEWDGPMAVTEYVISYQPTALGGLQLQQRVPGDWSGVTITELEPGLTYNISVYAVISNILSLPITAKVATHLSTPQGLQFKTITETTVEVQWEPFSFSFDGWEISFIPKNNEG

SEQ ID NO: 13621 - protein, 1962 aa, Homo sapiens
APGKDEEMAPASTEPPTPEPPIKPRLEELTVTDATPDSLSLSWTVPEGQFDHFLVQYKNGDGQPKATRVPGHEDRVTISGLEPDNKYKMNLYGFHGGQRVGPVSAIGVTAAEEETPSPTEPSMEAPEPPEEPLLGELTVTGSSPDSLSLSWTVPQGRFDSFTVQYKDRDGRPQVVRVGGEESEVTVGGLEPGRKYKMHLYGLHEGRRVGPVSTVGVTAPQEDVDETPSPTEPGTEAPGPPEEPLLGELTVTGSSPDSLSLSWTVPQGRFDSFTVQYKDRDGRPQAVRVGGQESKVTVRGLEPGRKYKMHLYGLHEGRRLGPVSAVGVTEDEAETTQAVPTMTPEPPIKPRLGELTMTDATPDSLSLSWTVPEGQFDHFLVQYRNGDGQPKAVRVPGHEDGVTISGLEPDHKYKMNLYGFHGGQRVGPISVIGVTAAEEETPSPTELSTEAPEPPEEPLLGELTVTGSSPDSLSLSWTIPQGHFDSFTVQYKDRDGRPQVMRVRGEESEVTVGGLEPGRKYKMHLYGLHEGRRVGPVSTVGVTEDEAETTQAVPTTTPEPPNKPRLGELTVTDATPDSLSLSWMVPEGQFDHFLVQYRNGDGQPKVVRVPGHEDGVTISGLEPDHKYKMNLYGFHGGQRVGPISVIGVTAAEEETPAPTEPSTEAPEPPEEPLLGELTVTGSSPDSLSLSWTIPQGRFDSFTVQYKDRDGRPQVVRVRGEESEVTVGGLEPGCKYKMHLYGLHEGQRVGPVSAVGVTAPKDEAETTQAVPTMTPEPPIKPRLGELTVTDATPDSLSLSWMVPEGQFDHFLVQYRNGDGQPKAVRVPGHEDGVTISGLEPDHKYKMNLYGFHGGQRVGPVSAIGVTEEETPSPTEPSTEAPEAPEEPLLGELTVTGSSPDSLSLSWTVPQGRFDSFTVQYKDRDGQPQVVRVRGEESEVTVGGLEPGRKYKMHLYGLHEGQRVGPVSTVGITAPLPTPLPVEPRLGELAVAAVTSDSVGLSWTVAQGPFDSFLVQYRDAQGQPQAVPVSGDLRAVAVSGLDPARKYKFLLFGLQNGKRHGPVPVEARTAPDTKPSPRLGELTVTDATPDSVGLSWTVPEGEFDSFVVQYKDKDGRLQVVPVAANQREVTVQGLEPSRKYRFLLYGLSGRKRLGPISADSTTAPLEKELPPHLGELTVAEETSSSLRLSWTVAQGPFDSFVVQYRDTDGQPRAVPVAADQRTVTVEDLEPGKKYKFLLYGLLGGKRLGPVSALGMTAPEEDTPAPELAPEAPEPPEEPRLGVLTVTDTTPDSMRLSWSVAQGPFDSFVVQYEDTNGQPQALLVDGDQSKILISGLEPSTPYRFLLYGLHEGKRLGPLSAEGTTGLAPAGQTSEESRPRLSQLSVTDVTTSSLRLNWEAPPGAFDSFLLRFGVPSPSTLEPHPRPLLQRELMVPGTRHSAVLRDLRSGTLYSLTLYGLRGPHKADSIQGTARTLSPVLESPRDLQFSEIRETSAKVNWMPPPSRADSFKVSYQLADGGEPQSVQVDGQARTQKLQGLIPGARYEVTVVSVRGFEESEPLTGFLTTVPDGPTQLRALNLTEGFAVLHWKPPQNPVDTYDVQVTAPGAPPLQAETPGSAVDYPLHDLVLHTNYTATVRGLRGPNLTSPASITFTTGLEAPRDLEAKEVTPRTALLTWTEPPVRPAGYLLSFHTPGGQNQEILLPGGITSHQLLGLFPSTSYNARLQAMWGQSLLPPVSTSFTTGGLRIPFPRDCGEEMQNGAGASRTSTIFLNGNRERPLNVFCDMETDGGGWLVFQRRMDGQTDFWRDWEDYAHGFGNISGEFWLGNEALHSLTQAGDYSMRVDLRAGDEAVFAQYDSFHVDSAAEYYRLHLEGYHGTAGDSMSYHSGSVFSARDRDPNSLLISCAVSYRGAWWYRNCHYANLNGLYGSTVDHQGVSWYHWKGFEFSVPFTEMKLRPRNFRSPAGGG

SEQ ID NO: 13622 - protein, 8 aa, Homo sapiens
MMPAQYAL

SEQ ID NO: 13623 - protein, 4244 aa, Homo sapiens
MMPAQYALTSSLVLLVLLSTARAGPFSSRSNVTLPAPRPPPQPGGHTVGAGVGSPSSQLYEHTVEGGEKQVVFTHRINLPPSTGCGCPPGTEPPVLASEVQALRVRLEILEELVKGLKEQCTGGCCPASAQAGTGQTDVRTLCSLHGVFDLSRCTCSCEPGWGGPTCSDPTDAEIPPSSPPSASGSCPDDCNDQGRCVRGRCVCFPGYTGPSCGWPSCPGDCQGRGRCVQGVCVCRAGFSGPDCSQRSCPRGCSQRGRCEGGRCVCDPGYTGDDCGMRSCPRGCSQRGRCENGRCVCNPGYTGEDCGVRSCPRGCSQRGRCKDGRCVCDPGYTGEDCGTRSCPWDCGEGGRCVDGRCVCWPGYTGEDCSTRTCPRDCRGRGRCEDGECICDTGYSGDDCGVRSCPGDCNQRGRCEDGRCVCWPGYTGTDCGSRACPRDCRGRGRCENGVCVCNAGYSGEDCGVRSCPGDCRGRGRCESGRCMCWPGYTGRDCGTRACPGDCRGRGRCVDGRCVCNPGFTGEDCGSRRCPGDCRGHGLCEDGVCVCDAGYSGEDCSTRSCPGGCRGRGQCLDGRCVCEDGYSGEDCGVRQCPNDCSQHGVCQDGVCICWEGYVSEDCSIRTCPSNCHGRGRCEEGRCLCDPGYTGPTCATRMCPADCRGRGRCVQGVCLCHVGYGGEDCGQEEPPASACPGGCGPRELCRAGQCVCVEGFRGPDCAIQTCPGDCRGRGECHDGSCVCKDGYAGEDCGEEVPTIEGMRMHLLEETTVRTEWTPAPGPVDAYEIQFIPTTEGASPPFTARVPSSASAYDQRGLAPGQEYQVTVRALRGTSWGLPASKTITTMIDGPQDLRVVAVTPTTLELGWLRPQAEVDRFVVSYVSAGNQRVRLEVPPEADGTLLTDLMPGVEYVVTVTAERGRAVSYPASVRANTGSSPLGLLGTTDEPPPSGPSTTQGAQAPLLQQRPQELGELRVLGRDETGRLRVVWTAQPDTFAYFQLRMRVPEGPGAHEEVLPGDVRQALVPPPPPGTPYELSLHGVPPGGKPSDPIIYQGIMDKDEEKPGKSSGPPRLGELTVTDRTSDSLLLRWTVPEGEFDSFVIQYKDRDGQPQVVPVEGPQRSAVITSLDPGRKYKFVLYGFVGKKRHGPLVAEAKILPQSDPSPGTPPHLGNLWVTDPTPDSLHLSWTVPEGQFDTFMVQYRDRDGRPQVVPVEGPERSFVVSSLDPDHKYRFTLFGIANKKRYGPLTADGTTAPERKEEPPRPEFLEQPLLGELTVTGVTPDSLRLSWTVAQGPFDSFMVQYKDAQGQPQAVPVAGDENEVTVPGLDPDRKYKMNLYGLRGRQRVGPESVVAKTAPQEDVDETPSPTELGTEAPESPEEPLLGELTVTGSSPDSLSLFWTVPQGSFDSFTVQYKDRDGRPRAVRVGGKESEVTVGGLEPGHKYKMHLYGLHEGQRVGPVSAVGVTAPQQEETPPATESPLEPRLGELTVTDVTPNSVGLSWTVPEGQFDSFIVQYKDKDGQPQVVPVAADQREVTVYNLEPERKYKMNMYGLHDGQRMGPLSVVIVTAPLPPAPATEASKPPLEPRLGELTVTDITPDSVGLSWTVPEGEFDSFVVQYKDRDGQPQVVPVAADQREVTIPDLEPSRKYKFLLFGIQDGKRRSPVSVEAKTVARGDASPGAPPRLGELWVTDPTPDSLRLSWTVPEGQFDSFVVQFKDKDGPQVVPVEGHERSVTVTPLDAGRKYRFLLYGLLGKKRHGPLTADGTTEARSAMDDTGTKRPPKPRLGEELQVTTVTQNSVGLSWTVPEGQFDSFVVQYKDRDGQPQVVPVEGSLREVSVPGLDPAHRYKLLLYGLHHGKRVGPISAVAITAGREETETETTAPTPPAPEPHLGELTVEEATSHTLHLSWMVTEGEFDSFEIQYTDRDGQLQMVRIGGDRNDITLSGLESDHRYLVTLYGFSDGKHVGPVHVEALTVPEEEKPSEPPTATPEPPIKPRLGELTVTDATPDSLSLSWTVPEGQFDHFLVQYRNGDGQPKAVRVPGHEEGVTISGLEPDHKYKMNLYGFHGGQRMGPVSVVGVTAAEEETPSPTEPSMEAPEPAEEPLLGELTVTGSSPDSLSLSWTVPQGRFDSFTVQYKDRDGRPQVVRVGGEESEVTVGGLEPGRKYKMHLYGLHEGRRVGPVSAVGVTAPEEESPDAPLAKLRLGQMTVRDITSDSLSLSWTVPEGQFDHFLVQFKNGDGQPKAVRVPGHEDGVTISGLEPDHKYKMNLYGFHGGQRVGPVSAVGLTAPGKDEEMAPASTEPPTPEPPIKPRLEELTVTDATPDSLSLSWTVPEGQFDHFLVQYKNGDGQPKATRVPGHEDRVTISGLEPDNKYKMNLYGFHGGQRVGPVSAIGVTAAEEETPSPTEPSMEAPEPPEEPLLGELTVTGSSPDSLSLSWTVPQGRFDSFTVQYKDRDGRPQVVRVGGEESEVTVGGLEPGRKYKMHLYGLHEGRRVGPVSTVGVTAPQEDVDETPSPTEPGTEAPGPPEEPLLGELTVTGSSPDSLSLSWTVPQGRFDSFTVQYKDRDGRPQAVRVGGQESKVTVRGLEPGRKYKMHLYGLHEGRRLGPVSAVGVTEDEAETTQAVPTMTPEPPIKPRLGELTMTDATPDSLSLSWTVPEGQFDHFLVQYRNGDGQPKAVRVPGHEDGVTISGLEPDHKYKMNLYGFHGGQRVGPISVIGVTAAEEETPSPTELSTEAPEPPEEPLLGELTVTGSSPDSLSLSWTIPQGHFDSFTVQYKDRDGRPQVMRVRGEESEVTVGGLEPGRKYKMHLYGLHEGRRVGPVSTVGVTAPEDEAETTQAVPTTTPEPPNKPRLGELTVTDATPDSLSLSWMVPEGQFDHFLVQYRNGDGQPKVVRVPGHEDGVTISGLEPDHKYKMNLYGFHGGQRVGPISVIGVTAAEEETPAPTEPSTEAPEPPEEPLLGELTVTGSSPDSLSLSWTIPQGRFDSFTVQYKDRDGRPQVVRVRGEESEVTVGGLEPGCKYKMHLYGLHEGQRVGPVSAVGVTAPKDEAETTQAVPTMTPEPPIKPRLGELTVTDATPDSLSLSWMVPEGQFDHFLVQYRNGDGQPKAVRVPGHEDGVTISGLEPDHKYKMNLYGFHGGQRVGPVSAIGVTEEETPSPTEPSTEAPEAPEEPLLGELTVTGSSPDSLSLSWTVPQGRFDSFTVQYKDRDGQPQVVRVRGEESEVTVGGLEPGRKYKMHLYGLHEGQRVGPVSTVGITAPLPTPLPVEPRLGELAVAAVTSDSVGLSWTVAQGPFDSFLVQYRDAQGQPQAVPVSGDLRAVAVSGLDPARKYKFLLFGLQNGKRHGPVPVEARTAPDTKPSPRLGELTVTDATPDSVGLSWTVPEGEFDSFVVQYKDKDGRLQVVPVAANQREVTVQGLEPSRKYRFLLYGLSGRKRLGPISADSTTAPLEKELPPHLGELTVAEETSSSLRLSWTVAQGPFDSFVVQYRDTDGQPRAVPVAADQRTVTVEDLEPGKKYKFLLYGLLGGKRLGPVSALGMTAPEEDTPAPELAPEAPEPPEEPRLGVLTVTDTTPDSMRLSWSVAQGPFDSFVVQYEDTNGQPQALLVDGDQSKILISGLEPSTPYRFLLYGLHEGKRLGPLSAEGTTGLAPAGQTSEESRPRLSQLSVTDVTTSSLRLNWEAPPGAFDSFLLRFGVPSPSTLEPHPRPLLQRELMVPGTRHSAVLRDLRSGTLYSLTLYGLRGPHKADSIQGTARTLSPVLESPRDLQFSEIRETSAKVNWMPPPSRADSFKVSYQLADGGEPQSVQVDGQARTQKLQGLIPGARYEVTVVSVRGFEESEPLTGFLTTVPDGPTQLRALNLTEGFAVLHWKPPQNPVDTYDVQVTAPGAPPLQAETPGSAVDYPLHDLVLHTNYTATVRGLRGPNLTSPASITFTTGLEAPRDLEAKEVTPRTALLTWTEPPVRPAGYLLSFHTPGGQNQEILLPGGITSHQLLGLFPSTSYNARLQAMWGQSLLPPVSTSFTTGGLRIPFPRDCGEEMQNGAGASRTSTIFLNGNRERPLNVFCDMETDGGGWLVFQRRMDGQTDFWRDWEDYAHGFGNISGEFWLGNEALHSLTQAGDYSMRVDLRAGDEAVFAQYDSFHVDSAAEYYRLHLEGYHGTAGDSMSYHSGSVFSARDRDPNSLLISCAVSYRGAWWYRNCHYANLNGLYGSTVDHQGVSWYHWKGFEFSVPFTEMKLRPRNFRSPAGGG

SEQ ID NO: 13624 - protein, 842 aa, Homo sapiens
MMPAQYALTSSLVLLVLLSTARAGPFSSRSNVTLPAPRPPPQPGGHTVGAGVGSPSSQLYEHTVEGGEKQVVFTHRINLPPSTGCGCPPGTEPPVLASEVQALRVRLEILEELVKGLKEQCTGGCCPASAQAGTGQTDVRTLCSLHGVFDLSRCTCSCEPGWGGPTCSDPTDAEIPPSSPPSASGSCPDDCNDQGRCVRGRCVCFPGYTGPSCGWPSCPGDCQGRGRCVQGVCVCRAGFSGPDCSQRSCPRGCSQRGRCEGGRCVCDPGYTGDDCGMRSCPRGCSQRGRCENGRCVCNPGYTGEDCGVRSCPRGCSQRGRCKDGRCVCDPGYTGEDCGTRSCPWDCGEGGRCVDGRCVCWPGYTGEDCSTRTCPRDCRGRGRCEDGECICDTGYSGDDCGVRSCPGDCNQRGRCEDGRCVCWPGYTGTDCGSRACPRDCRGRGRCENGVCVCNAGYSGEDCGVRSCPGDCRGRGRCESGRCMCWPGYTGRDCGTRACPGDCRGRGRCVDGRCVCNPGFTGEDCGSRRCPGDCRGHGLCEDGVCVCDAGYSGEDCSTRSCPGGCRGRGQCLDGRCVCEDGYSGEDCGVRQCPNDCSQHGVCQDGVCICWEGYVSEDCSIRTCPSNCHGRGRCEEGRCLCDPGYTGPTCATRMCPADCRGRGRCVQGVCLCHVGYGGEDCGQEEPPASACPGGCGPRELCRAGQCVCVEGFRGPDCAIQTCPGDCRGRGECHDGSCVCKDGYAGEDCGEEVPTIEGMRMHLLEETTVRTEWTPAPGPVDAYEIQFIPTASPLLCSASPHSPAKAEAEISTSWRNQDSLNFFFCLNIFFCCCYKNTLITRQEFGN

SEQ ID NO: 13625 - protein, 4244 aa, Homo sapiens; identical to SEQ ID NO: 13623

SEQ ID NO: 13626 - protein, 1545 aa, Homo sapiens
MMPAQYALTSSLVLLVLLSTARAGPFSSRSNVTLPAPRPPPQPGGHTVGAGVGSPSSQLYEHTVEGGEKQVVFTHRINLPPSTGCGCPPGTEPPVLASEVQALRVRLEILEELVKGLKEQCTGGCCPASAQAGTGQTDVRTLCSLHGVFDLSRCTCSCEPGWGGPTCSDPTDAEIPPSSPPSASGSCPDDCNDQGRCVRGRCVCFPGYTGPSCGWPSCPGDCQGRGRCVQGVCVCRAGFSGPDCSQRSCPRGCSQRGRCEGGRCVCDPGYTGDDCGMRSCPRGCSQRGRCENGRCVCNPGYTGEDCGVRSCPRGCSQRGRCKDGRCVCDPGYTGEDCGTRSCPWDCGEGGRCVDGRCVCWPGYTGEDCSTRTCPRDCRGRGRCEDGECICDTGYSGDDCGVRSCPGDCNQRGRCEDGRCVCWPGYTGTDCGSRACPRDCRGRGRCENGVCVCNAGYSGEDCGVRSCPGDCRGRGRCESGRCMCWPGYTGRDCGTRACPGDCRGRGRCVDGRCVCNPGFTGEDCGSRRCPGDCRGHGLCEDGVCVCDAGYSGEDCSTRSCPGGCRGRGQCLDGRCVCEDGYSGEDCGVRQCPNDCSQHGVCQDGVCICWEGYVSEDCSIRTCPSNCHGRGRCEEGRCLCDPGYTGPTCATRMCPADCRGRGRCVQGVCLCHVGYGGEDCGQEEPPASACPGGCGPRELCRAGQCVCVEGFRGPDCAIQTCPGDCRGRGECHDGSCVCKDGYAGEDCGEARVPSSASAYDQRGLAPGQEYQVTVRALRGTSWGLPASKTITTMIDGPQDLRVVAVTPTTLELGWLRPQAEVDRFVVSYVSAGNQRVRLEVPPEADGTLLTDLMPGVEYVVTVTAERGRAVSYPASVRANTEEREEESPPRPSLSQPPRRPWGNLTAELSRFRGTVQDLERHLRAHGYPLRANQTYTSVARHIHEYLQRQVLGSSADGALLVSLDGLRGQFERVVLRWRPQPPAEGPGGELTVPGTTRTVSLPDLRPGTTYHVEVHGVRAGQTSKSYAFITTTGPSTTQGAQAPLLQQRPQELGELRVLGRDETGRLRVVWTAQPDTFAYFQLRMRVPEGPGAHEEVLPGDVRQALVPPPPPGTPYELSLHGVPPGGKPSDPIIYQGIMDKDEEKPGKSSGPPRLGELTVTDRTSDSLLLRWTVPEGEFDSFVIQYKDRDGQPQVVPVEGPQRSAVITSLDPGRKYKFVLYGFVGKKRHGPLVAEAKILPQSDPSPGTPPHLGNLWVTDPTPDSLHLSWTVPEGQFDTFMVQYRDRDGRPQVVPVEGPERSFVVSSLDPDHKYRFTLFGIANKKRYGPLTADGTTAPERKEEPPRPEFLEQPLLGELTVTGVTPDSLRLSWTVAQGPFDSFMVQYKDAQGQPQAVPVAGDENEVTVPGLDPDRKYKMNLYGLRGRQRVGPESVVAKTAPQEDVDETPSPTELGTEAPESPEEPLLGELTVTGSSPDSLSLFWTVPQGSFDSFTVQYKDRDGRPRAVRVGGKESEVTVGGLEPGHKYKMHLYGLHEGQRVGPVSAVGVT

SEQ ID NO: 13627 - protein, 673 aa, Homo sapiens
MRLSWSVAQGPFDSFVVQYEDTNGQPQALLVDGDQSKILISGLEPSTPYRFLLYGLHEGKRLGPLSAEGTTGLAPAGQTSEESRPRLSQLSVTDVTTSSLRLNWEAPPGAFDSFLLRFGVPSPSTLEPHPRPLLQRELMVPGTRHSAVLRDLRSGTLYSLTLYGLRGPHKADSIQGTARTLSPVLESPRDLQFSEIRETSAKVNWMPPPSRADSFKVSYQLADGGEPQSVQVDGQARTQKLQGLIPGARYEVTVVSVRGFEESEPLTGFLTTVPDGPTQLRALNLTEGFAVLHWKPPQNPVDTYDVQVTAPGAPPLQAETPGSAVDYPLHDLVLHTNYTATVRGLRGPNLTSPASITFTTGLEAPRDLEAKEVTPRTALLTWTEPPVRPAGYLLSFHTPGGQNQEILLPGGITSHQLLGLFPSTSYNARLQAMWGQSLLPPVSTSFTTGGLRIPFPRDCGEEMQNGAGASRTSTIFLNGNRERPLNVFCDMETDGGGWLVFQRRMDGQTDFWRDWEDYAHGFGNISGEFWLGNEALHSLTQAGDYSMRVDLRAGDEAVFAQYDSFHVDSAAEYYRLHLEGYHGTAGDSMSYHSGSVFSARDRDPNSLLISCAVSYRGAWWYRNCHYANLNGLYGSTVDHQGVSWYHWKGFEFSVPFTEMKLRPRNFRSPAGGG

SEQ ID NO: 13628 - protein, 1720 aa, Homo sapiens
MAAAPSALLLLPPFPVLSTYRLQSRSRPSAPETDDSRVGGIMRGEKNYYFRGAAGDHGSCPTTTSPLASALLMPSEAVSSSWSESGGGLSGGDEEDTRLLQLLRTARDPSEAFQALQAALPRRGGRLGFPRRKEALYRALGRVLVEGGSDEKRLCLQLLSDVLRGQGEAGQLEEAFSLALLPQLVVSLREENPALRKDALQILHICLKRSPGEVLRTLIQQGLESTDARLRASTALLLPILLTTEDLLLGLDLTEVIISLARKLGDQETEEESETAFSALQQIGERLGQDRFQSYISRLPSALRRHYNRRLESQFGSQVPYYLELEASGFPEDPLPCAVTLSNSNLKFGIIPQELHSRLLDQEDYKNRTQAVEELKQVLGKFNPSSTPHSSLVGFISLLYNLLDDSNFKVVHGTLEVLHLLVIRLGEQVQQFLGPVIAASVKVLADNKLVIKQEYMKIFLKLMKEVGPQQVLCLLLEHLKHKHSRVREEVVNICICSLLTYPSEDFDLPKLSFDLAPALVDSKRRVRQAALEAFAVLASSMGSGKTSILFKAVDTVELQDNGDGVMNAVQARLARKTLPRLTEQGFVEYAVLMPSSAGGRSNHLAHGADTDWLLAGNRTQSAHCHCGDHVRDSMHIYGSYSPTICTRRVLSAGKGKNKLPWENEQPGIMGENQTSTSKDIEQFSTYDFIPSAKLKLSQGMPVNDDLCFSRKRVSRNLFQNSRDFNPDCLPLCAAGTTGTHQTNLSGKCAQLGFSQICGKTGSVGSDLQFLGTTSSHQEKVYASLNFGSKTQQTFGSQTECTSSNGQNPSPGAYILPSYPVSSPRTSPKHTSPLIISPKKSQDNSVNFSNSWPLKSFEGLSKPSPQKKLVSQKSSDPTGRNHGENSQEKPPVQLTPALVRSPSSRRGLNGTKPVPPIPRGISLLPDKADLSTVGHKKKEPDDIWKCEKDSLPIDLSELNFKDKDLDQEEMHSSLRSLRNSAAKKRAKLSGSTSDLESPDSAMKLDLTMDSPSLSSSPNINSYSESGVYSQESLTSSLSTTPQGKRIMSDIFPTFGSKPCPTRLSSAKKKISHIAEQSPSAGSSSNPQQISSFDFTTTKALSEDSVVVVGKGVFGSLSSAPATCSQSVISSVENGDTFSIKQSIEPPSGIYGRSVQQNISSYLDVENEKDAKVSISKSTYNKMRQKRKEEKELFHNKDCEKKEKNSWERMRHTGTEKMASESETPTGAISQYKERMPSVTHSPEIMDLSELRPFSKPEIALTEALRLLADEDWEKKIEGLNFIRCLAAFHSEILNTKLHETNFAVVQEVKNLRSGVSRAAVVCLSDLFTYLKKSMDQELDTTVKVLLHKAGESNTFIREDVDKALRAMVNNVTPARAVVSLINGGQRYYGRKMLFFMMCHPNFEKMLEKYVPSKDLPYIKDSVRNLQQKGLGEIPLDTPSAKGRRSHTGSVGNTRSSSVSRDAFNSAERAVTEVREVTRKSVPRNSLESAEYLKLITGLLNAKDFRDRINGIKQLLSDTENNQDLVVGNIVKIFDAFKSRLHDSNSKVNLVALETMHKMIPLLRDHLSPIINMLIPAIVDNNLNSKNPGIYAAATNVVQALSQHVDNYLLLQPFCTKAQFLNGKAKQDMTEKLADIVTELYQRKPHATEQKVLVVLWHLLGNMTNSGSLPGAGGNIRTATAKLSKALFAQMGQNLLNQAASQPPHIKKSLEELLDMTILNEL

SEQ ID NO: 13629 - protein, 1773 aa, Homo sapiens
MAAAPSALLLLPPFPVLSTYRLQSRSRPSAPETDDSRVGGIMRGEKNYYFRGAAGDHGSCPTTTSPLASALLMPSEAVSSSWSESGGGLSGGDEEDTRLLQLLRTARDPSEAFQALQAALPRRGGRLGFPRRKEALYRALGRVLVEGGSDEKRLCLQLLSDVLRGQGEAGQLEEAFSLALLPQLVVSLREENPALRKDALQILHICLKRSPGEVLRTLIQQGLESTDARLRASTALLLPILLTTEDLLLGLDLTEVIISLARKLGDQETEEESETAFSALQQIGERLGQDRFQSYISRLPSALRRHYNRRLESQFGSQVPYYLELEASGFPEDPLPCAVTLSNSNLKFGIIPQELHSRLLDQEDYKNRTQAVEELKQVLGKFNPSSTPHSSLVGFISLLYNLLDDSNFKVVHGTLEVLHLLVIRLGEQVQQFLGPVIAASVKVLADNKLVIKQEYMKIFLKLMKEVGPQQVLCLLLEHLKHKHSRVREEVVNICICSLLTYPSEDFDLPKLSFDLAPALVDSKRRVRQAALEAFAVLASSMGSGKTSILFKAVDTVELQDNGDGVMNAVQARLARKTLPRLTEQGFVEYAVLMPSSAGGRSNHLAHGADTDWLLAGNRTQSAHCHCGDHVRDSMHIYGSYSPTICTRRVLSAGKGKNKLPWENEQPGIMGENQTSTSKDIEQFSTYDFIPSAKLKLSQGMPVNDDLCFSRKRVSRNLFQNSRDFNPDCLPLCAAGTTGTHQTNLSGKCAQLGFSQICGKTGSVGSDLQFLGTTSSHQEKVYASLNFGSKTQQTFGSQTECTSSNGQNPSPGAYILPSYPVSSPRTSPKHTSPLIISPKKSQDNSVNFSNSWPLKSFEGLSKPSPQKKLVSQKSSDPTGRNHGENSQEKPPVQLTPALVRSPSSRRGLNGTKPVPPIPRGISLLPDKADLSTVGHKKKEPDDIWKCEKDSLPIDLSELNFKDKDLDQEEMHSSLRSLRNSAAKKRAKLSGSTSDLESPDSAMKLDLTMDSPSLSSSPNINSYSESGVYSQESLTSSLSTTPQGKRIMSDIFPTFGSKPCPTRLSSAKKKISHIAEQSPSAGSSSNPQQISSFDFTTTKALSEDSVVVVGKGVFGSLSSAPATCSQSVISSVENGDTFSIKQSIEPPSGIYGRSVQQNISSYLDVENEKDAKVSISKSTYNKMRQKRKEEKELFHNKDCEKKEKNSWERMRHTGTEKMASESETPTGAISQYKERMPSVTHSPEIMDLSELRPFSKPEIALTEALRLLADEDWEKKIEGLNFIRCLAAFHSEILNTKLHETNFAVVQEVKNLRSGVSRAAVVCLSDLFTYLKKSMDQELDTTVKVLLHKAGESNTFIREDVDKALRAMVNNVTPARAVVSLINGGQSHLHIAVRRCTAQHLSDVLEFMEPERILSAAKDMAERILPAAAKFAQDSSQETRYYGRKMLFFMMCHPNFEKMLEKYVPSKDLPYIKDSVRNLQQKGLGEIPLDTPSAKGRRSHTGSVGNTRSSSVSRDAFNSAERAVTEVREVTRKSVPRNSLESAEYLKLITGLLNAKDFRDRINGIKQLLSDTENNQDLVVGNIVKIFDAFKSRLHDSNSKVNLVALETMHKMIPLLRDHLSPIINMLIPAIVDNNLNSKNPGIYAAATNVVQALSQHVDNYLLLQPFCTKAQFLNGKAKQDMTEKLADIVTELYQRKPHATEQKVLVVLWHLLGNMTNSGSLPGAGGNIRTATAKLSKALFAQMGQNLLNQAASQPPHIKKSLEELLDMTILNEL

SEQ ID NO: 13630 - protein, 995 aa, Homo sapiens
MAAAPSALLLLPPFPVLSTYRLQSRSRPSAPETDDSRVGGIMRGEKNYYFRGAAGDHGSCPTTTSPLASALLMPSEAVSSSWSESGGGLSGGDEEDTRLLQLLRTARDPSEAFQALQAALPRRGGRLGFPRRKEALYRALGRVLVEGGSDEKRLCLQLLSDVLRGQGEAGQLEEAFSLALLPQLVVSLREENPALRKDALQILHICLKRSPGEVLRTLIQQGLESTDARLRASTALLLPILLTTEDLLLGLDLTEVIISLARKLGDQETEEESETAFSALQQIGERLGQDRFQSYISRLPSALRRHYNRRLESQFGSQVPYYLELEASGFPEDPLPCAVTLSNSNLKFGIIPQELHSRLLDQEDYKNRTQAVEELKQVLGKFNPSSTPHSSLVGFISLLYNLLDDSNFKVVHGTLEVLHLLVIRLGEQVQQFLGPVIAASVKVLADNKLVIKQEYMKIFLKLMKEVGPQQVLCLLLEHLKHKHSRVREEVVNICICSLLTYPSEDFDLPKLSFDLAPALVDSKRRVRQAALEAFAVLASSMGSGKTSILFKAVDTVELQDNGDGVMNAVQARLARKTLPRLTEQGFVEYAVLMPSSAGGRSNHLAHGADTDWLLAGNRTQSAHCHCGDHVRDSMHIYGSYSPTICTRRVLSAGKGKNKLPWENEQPGIMGENQTSTSKDIEQFSTYDFIPSAKLKLSQGMPVNDDLCFSRKRVSRNLFQNSRDFNPDCLPLCAAGTTGTHQTNLSGKCAQLGFSQICGKTGSVGSDLQFLGTTSSHQEKVYASLNFGSKTQQTFGSQTECTSSNGQNPSPGAYILPSYPVSSPRTSPKHTSPLIISPKKSQDNSVNFSNSWPLKSFEGLSKPSPQKKLVSQKSSDPTGRNHGENSQEKPPVQLTPALVRSPSSRRGLNGTKPVPPIPRGISLLPDKADLSTVGHKKKEPDDIWKCEKDSLPIDLSELNFKDKDLDQEEVRHISNIWVKTLSNKTFFCKEKNFSYC

SEQ ID NO: 13631 - protein, 174 aa, Homo sapiens
MFSTYDFIPSAKLKLSQGMPVNDDLCFSRKRVSRNLFQNSRDFNPDCLPLCAAGTTGTHQTNLSGKCAQLGFSQICGKTGSVGSDLQFLGTTSSHQEKVYASLNFGSKTQQTFGSQTECTSSNGQNPSPGAYILPSYPVSSPRTSPKHTSPLIISPKKSQDNSVNFSNSWPLKS

SEQ ID NO: 13632 - protein, 155 aa, Homo sapiens
SRLHDSNSKVNLVALETMHKMIPLLRDHLSPIINMLIPAIVDNNLNSKNPGIYAAATNVVQALSQHVDIVTELYQRKPHATEQKVLVVLWHLLGNMTNSGSLPGAGGNIRTATAKLSKALFAQMGQNLLNQAASQPPHIKKSLEELLDMTILNEL

SEQ ID NO: 13633 - protein, 160 aa, Homo sapiens
  SITE 1: note = misc_feature - Xaa can be any naturally occurring amino acid
XFSRKRVSRNLFQNSRDFNPDCLPLCAAGTTGTHQTNLSGKCAQLGFSQICGKTGSVGSDLQFLGTTSSHQEKGENSQEKPPVQLTPALVRSPSSRRGLNGTKPVPPIPRGISLLPDKADLSTVGHKKKEPDDIWKCEKDSLPIDLSELNFKDKDLDQEE

SEQ ID NO: 13634 - protein, 51 aa, Homo sapiens
MIIIIVVGCLCFLTCTMKGLDDFYYCPHFTGFKRGADPGMPEPTVLSLLWG

SEQ ID NO: 13635 - protein, 55 aa, Homo sapiens [sequence omitted]

SEQ ID NO: 13636 - protein, 125 aa, Homo sapiens
MVKLSKEAKQRLQQLFKGSQFAIRWGFIPLVIYLGFKRGADPGMPEPTVLRVWWLTPVISALWKAKVGRSWEDCLKLGVQDQPGQRSETHLYQKKKTYFGDKGLFGLLDLEAISGQHGRCVLWLG

SEQ ID NO: 13637 - protein, 55 aa, Homo sapiens
MVKLSKEAKQRLQQLFKGSQFAIRWGFIPLVIYLGFKRGADPGMPEPTVLSLLWG

SEQ ID NO: 13638 - protein, 49 aa, Homo sapiens
ATFYGRMLDHEYTTKEVFRKNFFNDWRKAPLLDPLLWPDATPLPFTTAL

SEQ ID NO: 13639 - protein, 164 aa, Homo sapiens
MKSHPRKKAKNSQKGPFRNVCCTCFPLSDPSETSCCSEDTHPSRPGPPGPQQHYLAGVTCRSPGSGRWEKEKHEDGVKWRQLEHKGPYFAPPYEPLPDGVRFFYEGRPVRLSVAAEEVATFYGRMLDHEYTTKEVFRKNFFNDWRKEMAVEEREVIKSLDKCDF

SEQ ID NO: 13640 - protein, 134 aa, Homo sapiens
MKSHPRKKAKWEKEKHEDGVKWRQLEHKGPYFAPPYEPLPDGVRFFYEGRPVRLSVAAEEVATFYGRMLDHEYTTKEVFRKNFFNDWRKEMAVEEREVIKSLDKCDFTEIHRYFVDKAAARKVLSREEKQKLKE

SEQ ID NO: 13641 - protein, 33 aa, Homo sapiens
MLDHEYTTKEVFRKNFFNDWRKEMAVEEREVIK

SEQ ID NO: 13642 - protein, 201 aa, Homo sapiens
MLDHEYTTKEVFRKNFFNDWRKEMAVEEREVIKSLDKCDFTEIHRYFVDKAAARKVLSREEKQKLKEEAEKLQQEFGYCILDGHQEKIGNFKIEPPGLFRGRGDHPKMGMLKRRITPEDVVINCSRDSKIPEPPAGHQWKEVRSDNTVTWLAAWTESVQNSIKYIMLNPCSKLKGETAWQKFETARRLRGFVDEIRSQYRA

SEQ ID NO: 13643 - protein, 221 aa, Homo sapiens
MLDHEYTTKEVFRKNFFNDWRKEMAVEEREVIKSLDKCDFTEIHRYFVDKAAARKVLSREEKQKLKEEAEKLQQEFGYCILDGHQEKIGNFKIEPPGLFRGRGDHPKMGMLKRRITPEDVVINCSRDSKIPEPPAGHQWKEVRSDNTVTWLAAWTESVQNSIKYIMLNPCSKLKGETAWQKFETARRLRGFVDEIRSQYRADWKSREMKTRQRAVALYFID

SEQ ID NO: 13644 - protein, 376 aa, Homo sapiens
MLDHEYTTKEVFRKNFFNDWRKEMAVEEREVIKSLDKCDFTEIHRYFVDKAAARKVLSREEKQKLKEEAEKLQQEFGYCILDGHQEKIGNFKIEPPGLFRGRGDHPKMGMLKRRITPEDVVINCSRDSKIPEPPAGHQWKEVRSDNTVTWLAAWTESVQNSIKYIMLNPCSKLKGETAWQKFETARRLRGFVDEIRSQYRADWKSREMKTRQRAVALYFIDKLALRAGNEKEDGEAADTVGCCSLRVEHVQLHPEADGCQHVVEFDFLGKDCIRYYNRVPVEKPVYKNLQLFMENKDPRDDLFDRLTVSWDGPAKPRNYRDHFPPQTTSLNKHLQELMDGLTAKVFRTYNASITLQEQLRALTRAEDSIAAKILSY

SEQ ID NO: 13645 - protein, 503 aa, Homo sapiens
MLDHEYTTKEVFRKNFFNDWRKEMAVEEREVIKSLDKCDFTEIHRYFVDKAAARKVLSREEKQKLKEEAEKLQQEFGYCILDGHQEKIGNFKIEPPGLFRGRGDHPKMGMLKRRITPEDVVINCSRDSKIPEPPAGHQWKEVRSDNTVTWLAAWTESVQNSIKYIMLNPCSKLKGETAWQKFETARRLRGFVDEIRSQYRADWKSREMKTRQRAVALYFIDKLALRAGNEKEDGEAADTVGCCSLRVEHVQLHPEADGCQHVVEFDFLGKDCIRYYNRVPVEKPVYKNLQLFMENKDPRDDLFDRLTTTSLNKHLQELMDGLTAKVFRTYNASITLQEQLRALTRAEDSIAAKILSYNRANRVVAILCNHQRATPSTFEKSMQNLQTKIQAKKEQVAEARAELRRARAEHKAQGDGKSRSVLEKKRRLLEKLQEQLAQLSVQATDKEENKQVALGTSKLNYLDPRISIAWCKRFRVPVEKIYSKTQRERFAWALAMAGEDFEF

SEQ ID NO: 13646 - protein, 503 aa, Homo sapiens; identical to SEQ ID NO: 13645

SEQ ID NO: 13647 - protein, 503 aa, Homo sapiens; identical to SEQ ID NO: 13645

SEQ ID NO: 13648 - protein, 164 aa, Homo sapiens
MRVVRLLRLRAALTLLGEVPRRPASRGVPGSRRTQKGSGARNSQKGPFRNVCCTCFPLSDPSETSCCSEDTHPSRPGPPGPQQHYLAGVTCRSPGSGRWEKEKHEDGVKWRQLEHKGPYFAPPYEPLPDGVRFFYEGRPVRLSVAAEEVATFYGRMLDHEYTTK

SEQ ID NO: 13649 - protein, 601 aa, Homo sapiens
MRVVRLLRLRAALTLLGEVPRRPASRGVPGSRRTQKGSGARWEKEKHEDGVKWRQLEHKGPYFAPPYEPLPDGVRFFYEGRPVRLSVAAEEVATFYGRMLDHEYTTKEVFRKNFFNDWRKEMAVEEREVIKSLDKCDFTEIHRYFVDKAAARKVLSREEKQKLKEEAEKLQQEFGYCILDGHQEKIGNFKIEPPGLFRGRGDHPKMGMLKRRITPEDVVINCSRDSKIPEPPAGHQWKEVRSDNTVTWLAAWTESVQNSIKYIMLNPCSKLKGETAWQKFETARRLRGFVDEIRSQYRADWKSREMKTRQRAVALYFIDKLALRAGNEKEDGEAADTVGCCSLRVEHVQLHPEADGCQHVVEFDFLGKDCIRYYNRVPVEKPVYKNLQLFMENKDPRDDLFDRLTTTSLNKHLQELMDGLTAKVFRTYNASITLQEQLRALTRAEDSIAAKILSYNRANRVVAILCNHQRATPSTFEKSMQNLQTKIQAKKEQVAEARAELRRARAEHKAQGDGKSRSVLEKKRRLLEKLQEQLAQLSVQATDKEENKQVALGTSKLNYLDPRISIAWCKRFRVPVEKIYSKTQRERFAWALAMAGEDFEF

SEQ ID NO: 13650 - protein, 167 aa, Homo sapiens
MRVVRLLRLRAALTLLGEVPRRPASRGVPGSRRTQKGSGARWEKEKHEDGVKWRQLEHKGPYFAPPYEPLPDGVRFFYEGRPVRLSVAAEEVATFYGRMLDHEYTTKEVFRKNFFNDWRKEMAVEEREVIKSLDKCDFTEIHRYFVDKAAARKVLSREEKQMVTKKK

SEQ ID NO: 13651 - protein, 111 aa, Homo sapiens
  SITE 1: note = misc_feature - Xaa can be any naturally occurring amino acid
XEQVAEARAELRRARAEHKAQGDGKSRSVLEKKRRLLEKLQEQLAQLSVQATDKEENKQVALGTSKLNYLDPRISIAWCKRFRVPVEKIYSKTQRERFAWALAMAGEDFEF

SEQ ID NO: 13652 - protein, 123 aa, Homo sapiens
  SITE 1: note = misc_feature - Xaa can be any naturally occurring amino acid
XLRLRAALTLLGEVPRRPASRGVPGSRRTQKGSGARWEKEKHEDGVKWRQLEHKGPYFAPPYEPLPDGVRFFYEGRPVRLSVAAEEVATFYGRMLDHEYTTKEVFRKNFFNDWRKVLCQTHML

SEQ ID NO: 13653 - protein, 332 aa, Homo sapiens
MKLGRAVLGLLLLAPSVVQAVEPISLGLALAGVLTGYIYPRLYCLFAECCGQKRSLSREALQKDLDDNLFGQHLAKKIILNAVFGFINNPKPKKPLTLSLHGWTGTGKNFVSKIIAENIYEGGLNSDYVHLFVATLHFPHASNITLYKDQLQLWIRGNVSACARSIFIFDEMDKMHAGLIDAIKPFLDYYDLVDGVSYQKAMFIFLSNAGAERITDVALDFWRSGKQREDIKLKDIEHALSVSVFNNKNSGFWHSSLIDRNLIDYFVPFLPLEYKHLKMCIRVEMQSRGYEIDEDIVSRVAEEMTFFPKEERVFSDKGCKTVFTKLDYYYDD

SEQ ID NO: 13654 - protein, 336 aa, Homo sapiens
MLRAGWLRGAAALALLLAARVVAAFEPITVGLAIGAASAITGYLSYNDIYCRFAECCREERPLNASALKLDLEEKLFGQHLATEVIFKALTGFRNNKNPKKPLTLSLHGWAGTGKNFVSQIVAENLHPKGLKSNFVHLFVSTLHFPHEQKIKLYQDQLQKWIRGNVSACANSVFIFDEMDKLHPGIIDAIKPFLDYYEQVDGVSYRKAIFIFLSNAGGDLITKTALDFWRAGRKREDIQLKDLEPVLSVGVFNNKHSGLWHSGLIDKNLIDYFIPFLPLEYRHVKMCVRAEMRARGSAIDEDIVTRVAEEMTFFPRDEKIYSDKGCKTVQSRLDFH

SEQ ID NO: 13655 - protein, 141 aa, Homo sapiens
  SITE 1: note = misc_feature - Xaa can be any naturally occurring amino acid
XRVVAAFEPITVGLAIGAASAITGYLSYNDIYCRFAECCREERPLNASALKLDLEEKLFGQHLATEVIFKALTGFRNNKNPKKPLTLSLHGWAGTGKNFVSQIVAENLHPKGLKSNFVHLFVSTLHFPHEQKIKLYQSSLT

SEQ ID NO: 13656 - protein, 72 aa, Homo sapiens
MAAATRGCRPWGSLLGLLGLVSAAAAAWDLASLRCTLGAFCECDFRPDLPEGSEELGPREPHCLWPLPLPLR

SEQ ID NO: 13657 - protein, 72 aa, Homo sapiens; identical to SEQ ID NO: 13656

SEQ ID NO: 13658 - protein, 72 aa, Homo sapiens; identical to SEQ ID NO: 13656

SEQ ID NO: 13659 - protein, 72 aa, Homo sapiens; identical to SEQ ID NO: 13656

SEQ ID NO: 13660 - protein, 253 aa, Homo sapiens
MAAATRGCRPWGSLLGLLGLVSAAAAAWDLASLRCTLGAFCECDFRPDLPGLECDLAQHLAGQHLAKALVVKALKAFVRDPAPTKPLVLSLHGWTGTGKSYVSSLLAHYLFQGGLRSPRVHHFSPVLHFPHPSHIERYKKDLKSWVQGNLTACGRSLFLFDEMDKMPPGLMEVLRPFLGSSWVVYGTNYRKAIFIFIRWGPALQWAQWGGHFSEVQLYSLSLCSQQNPVPHGLSWAFPVPSATLRDDIVIPPG

SEQ ID NO: 13661 - protein, 242 aa, Homo sapiens
MAAATRGCRPWGSLLGLLGLVSAAAAAWDLASLRCTLGAFCECDFRPDLPGLECDLAQHLAGQHLAKALVVKALKAFVRDPAPTKPLVLSLHGWTGTGKSYVSSLLAHYLFQGGLRSPRVHHFSPVLHFPHPSHIERYKKDLKSWVQGNLTACGRSLFLFDEMDKMPPGLMEVLRPFLGSSWVVYGTNYRKAIFIFIRWLLKLGHHGRAPPRRSGALPPAPAAPRPALRAQRAGPAGPGAKG

SEQ ID NO: 13662 - protein, 321 aa, Homo sapiens
MAAATRGCRPWGSLLGLLGLVSAAAAAWDLASLRCTLGAFCECDFRPDLPGLECDLAQHLAGQHLAKALVVKALKAFVRDPAPTKPLVLSLHGWTGTGKSYVSSLLAHYLFQGGLRSPRVHHFSPVLHFPHPSHIERYKKDLKSWVQGNLTACGRSLFLFDEMDKMPPGLMEVLRPFLGSSWVVYGTNYRKAIFIFISNTGGKQINQVALEAWRSRRDREEILLQELEPVISRAVLDNPHHGFSNSGIMEERLLDAVVPFLPLQRHHVRHCVLNELAQLGLEPRDEVVQAVLDSTTFFPEDEQLFSSNGCKTVASRIAFFL

SEQ ID NO: 13663 - protein, 174 aa, Homo sapiens
MGLCVPFAVTTSFLSLGLEWDLNVRLHGQHLVQQLVLRTVRGYLETPQPEKALALSFHGWSGTGKNFVARMLVENLYRDGLMSDCVRMFIATFHFPHPKYVDLYKEQLMSQIRETQQLCHQTLFIFDEAEKLHPGLLEVLGPHLERRAPEGHRAESPWTIFLFLSNLRGDIINE

SEQ ID NO: 13664 - protein, 97 aa, Homo sapiens
MLRGPWRQLWLFFLLLLPGAPEPRGASRPWEGTDEPGSAWAWPGFQRLQEQLRAAGALSKRYWTLFSCQVWPDDCDEDEEAATGPLALGNVRCGHAW

SEQ ID NO: 13665 - protein, 153 aa, Homo sapiens
MLRGPWRQLWLFFLLLLPGAPEPRGASRPWEGTDEPGSAWAWPGFQRLQEQLRAAGALSKRYWTLFSCQVWPDDCDEDEEAATGPLGWRLPLLGQRYLDLLTTWYCSFKDCCPRGDCRISNNFTGKNFVARMLVENLYRDGLMSDCVRMFIAT

SEQ ID NO: 13666 - protein, 397 aa, Homo sapiens
MLRGPWRQLWLFFLLLLPGAPEPRGASRPWEGTDEPGSAWAWPGFQRLQEQLRAAGALSKRYWTLFSCQVWPDDCDEDEEAATGPLGWRLPLLGQRYLDLLTTWYCSFKDCCPRGDCRISNNFTGLEWDLNVRLHGQHLVQQLVLRTVRGYLETPQPEKALALSFHGWSGTGKNFVARMLVENLYRDGLMSDCVRMFIATFHFPHPKYVDLYKEQLMSQIRETQQLCHQTLFIFDEAEKLHPGLLEVLGPHLERRAPEGHRAESPWTIFLFLSNLRGDIINEVVLKLLKAGWSREEITMEHLEPHLQAEIVETIDNGFGHSRLVKENLIDYFIPFLPLEYRHVRLCARDAFLSQELLYKEETLDEIAQMMVYVPKEEQLFSSQGCKSISQRINYFLS

SEQ ID NO: 13667 - protein, 336 aa, Homo sapiens
MLRGPWRQLWLFFLLLLPGAPEPRGASRPWEGTDEPGSAWAWPGFQRLQEQLRAAGALSKRYWTLFSCQVWPDDCDEDEEAATGPLGWRLPLLGQRYLDLLTTWYCSFKDCCPRGDCRISNNFTGLEWDLNVRLHGQHLVQQLVLRTVRGYLETPQPEKALALSFHGWSGTGKNFVARMLVENLYRDGLMSDCVRMFIATFHFPHPKYVDLYKEQLMSQIRETQQLCHQTLFIFDEAEKLHPGLLEVLGPHLERRAPEGHRAESPWTIFLFLSNLRGDIINEVVLKLLKAGWSREEITMEHLEPHLQAEIVETIGFSFLTTRWPHLDLPTSSVAPT

SEQ ID NO: 13668 - protein, 151 aa, Homo sapiens
MDCREMDLYEDYQSPFDFDAGVNKSYLYLSPSGNSSPPGSPTLQKFGLLRTDPVPEEGEDVAATISATETLSEEEQEELRRELAKVEEEIQTLSQVLAAKEKHLAEIKRKLGINSLQELKQNIAKGWQDVTATSARSKLLAAETELLCLLY

SEQ ID NO: 13669 - protein, 233 aa, Homo sapiens
MDCREMDLYEDYQSPFDFDAGVNKSYLYLSPSGNSSPPGSPTLQKFGLLRTDPVPEEGEDVAATISATETLSEEEQEELRRELAKVEEEIQTLSQVLAAKEKHLAEIKRKLGINSLQELKQNIAKGWQDVTATSAYKKTSETLSQAGQKASAAFSSVGSVITKKLEDVKLQAFSHSFRNSPTFKSFEEKVENLKSKVGGTKPAGGDFGEVLNSAANASATTTEPLPEKTQESL

SEQ ID NO: 13670 - protein, 247 aa, Homo sapiens
MDCREMDLYEDYQSPFDFDAGVNKSYLYLSPSGNSSPPGSPTLQKFGLLRTDPVPEEGEDVAATISATETLSEEEQEELRRELAKVEEEIQTLSQVLAAKEKHLAEIKRKLGINSLQELKQNIAKGWQDVTATSAYKKTSETLSQAGQKASAAFSSVGSVITKKLEDVKLQAFSHSFSIRSIQHSISMPAMRNSPTFKSFEEKVENLKSKVGGTKPAGGDFGEVLNSAANASATTTEPLPEKTQESL

SEQ ID NO: 13671 - protein, 224 aa, Homo sapiens
MDCREMDLYEDYQSPFDFDAGVNKSYLYLSPSGNSSPPGSPTLQKFGLLRTDPVPEEGEDVAATISATETLSEEEQEELRRELAKVEEEIQTLSQVLAAKEKHLAEIKRKLGINSLQELKQNIAKGWQDVTATSAYKKTSETLSQAGQKASAAFSSVGSVITKKLEDVKNSPTFKSFEEKVENLKSKVGGTKPAGGDFGEVLNSAANASATTTEPLPEKTQESL

SEQ ID NO: 13672 - protein, 238 aa, Homo sapiens
MDCREMDLYEDYQSPFDFDAGVNKSYLYLSPSGNSSPPGSPTLQKFGLLRTDPVPEEGEDVAATISATETLSEEEQEELRRELAKVEEEIQTLSQVLAAKEKHLAEIKRKLGINSLQELKQNIAKGWQDVTATSAYKKTSETLSQAGQKASAAFSSVGSVITKKLEDVNIRSIQHSISMPAMRNSPTFKSFEEKVENLKSKVGGTKPAGGDFGEVLNSAANASATTTEPLPEKTQESL

SEQ ID NO: 13673 - protein, 38 aa, Homo sapiens
MDRGEQAFYFIWNFWLELGKDLSFLHSYKMSAENRPSP

SEQ ID NO: 13674 - protein, 38 aa, Homo sapiens; identical to SEQ ID NO: 13673

SEQ ID NO: 13675 - protein, 111 aa, Homo sapiens
MDRGEQGLLRTDPVPEEGEDVAATISATETLSEEEQEELRRELAKVEEEIQTLSQVLAAKEKHLAEIKRKLGINSLQELKQNIAKGWQDVTATSARSKLLAAETELLCLLY

SEQ ID NO: 13676 - protein, 207 aa, Homo sapiens
MDRGEQGLLRTDPVPEEGEDVAATISATETLSEEEQEELRRELAKVEEEIQTLSQVLAAKEKHLAEIKRKLGINSLQELKQNIAKGWQDVTATSAYKKTSETLSQAGQKASAAFSSVGSVITKKLEDVKLQAFSHSFSIRSIQHSISMPAMRNSPTFKSFEEKVENLKSKVGGTKPAGGDFGEVLNSAANASATTTEPLPEKTQESL

SEQ ID NO: 13677 - protein, 184 aa, Homo sapiens
MDRGEQGLLRTDPVPEEGEDVAATISATETLSEEEQEELRRELAKVEEEIQTLSQVLAAKEKHLAEIKRKLGINSLQELKQNIAKGWQDVTATSAYKKTSETLSQAGQKASAAFSSVGSVITKKLEDVKNSPTFKSFEEKVENLKSKVGGTKPAGGDFGEVLNSAANASATTTEPLPEKTQESL

SEQ ID NO: 13678 - protein, 61 aa, Homo sapiens
MDRGEQGRRRNPDSVSSVSSKREASSRDQAETWNQFSTGTKTEHCQRVARRDSNICLQEDI

SEQ ID NO: 13679 - protein, 60 aa, Homo sapiens
MPAMRNSPTFKSFEEKVENLKSKVGGTKPAGGDFGEVLNSAANASATTTEPLPEKTQESL

SEQ ID NO: 13680 - protein, 148 aa, Homo sapiens
  SITE 1: note = misc_feature - Xaa can be any naturally occurring amino acid
XGLGLGLWLGAGLSAARRLEQVPSLLGRRRKLHLPDPDLASWGPGRSGSGGGRWDCMCECLLRTDPVPEEGEDVAATISATETLSEEEQEELRRELAKVEEEIQTLSQVLAAKEKHLAEIKRKLGINSLQELKQNIAKGWQDVTATSA

SEQ ID NO: 13681 - protein, 172 aa, Homo sapiens
MRALAVLSVTLVMACTEAFFPFISRGKELLWGKPEESRVSSVLEESKRLVDTAMYATMQRNLKKRGILSPAQLLSFSKLPEPTSGVIARAAEIMETSIQAMKRKVNLKTQQSQHPTDALSEDLLSIIANMSGCLPYMLPPKCPNTCLANKYRPITGACNNRDHPRWGASNTA

SEQ ID NO: 13682 - protein, 933 aa, Homo sapiens
MRALAVLSVTLVMACTEAFFPFISRGKELLWGKPEESRVSSVLEESKRLVDTAMYATMQRNLKKRGILSPAQLLSFSKLPEPTSGVIARAAEIMETSIQAMKRKVNLKTQQSQHPTDALSEDLLSIIANMSGCLPYMLPPKCPNTCLANKYRPITGACNNRDHPRWGASNTALARWLPPVYEDGFSQPRGWNPGFLYNGFPLPPVREVTRHVIQVSNEVVTDDDRYSDLLMAWGQYIDHDIAFTPQSTSKAAFGGGADCQMTCENQNPCFPIQLPEEARPAAGTACLPFYRSSAACGTGDQGALFGNLSTANPRQQMNGLTSFLDASTVYGSSPALERQLRNWTSAEGLLRVHARLRDSGRAYLPFVPPRAPAACAPEPGIPGETRGPCFLAGDGRASEVPSLTALHTLWLREHNRLAAALKALNAHWSADAVYQEARKVVGALHQIITLRDYIPRILGPEAFQQYVGPYEGYDSTANPTVSNVFSTAAFRFGHATIHPLVRRLDASFQEHPDLPGLWLHQAFFSPWTLLRGGGLDPLIRGLLARPAKLQVQDQLMNEELTERLFVLSNSSTLDLASINLQRGRDHGLPGYNEWREFCGLPRLETPADLSTAIASRSVADKILDLYKHPDNIDVWLGGLAENFLPRARTGPLFACLIGKQMKALRDGDWFWWENSHVFTDAQRRELEKHSLSRVICDNTGLTRVPMDAFQVGKFPEDFESCDSITGMNLEAWRETFPQDDKCGFPESVENGDFVHCEESGRRVLVYSCRHGYELQGREQLTCTQEGWDFQPPLCKDVNECADGAHPPCHASARCRNTKGGFQCLCADPYELGDDGRTCVDSGRLPRVTWISMSLAALLIGGFAGLTSTVICRWTRTGTKSTLPISETGGGTPELRCGKHQAVGTSPQRAAAQDSEQESAGMEGRDTHRLPRAL

SEQ ID NO: 13683 - protein, 933 aa, Homo sapiens; identical to SEQ ID NO: 13682

SEQ ID NO: 13684 - protein, 889 aa, Homo sapiens
MRALAVLSVTLVMACTEAFFPFISRGKELLWGKPEESRVSSVLEESKRLVDTAMYATMQRNLKKRGILSPAQLLSFSKLPEPTSGVIARAAEIMETSIQAMKRKVNLKTQQSQHPTDALSEDLLSIIANMSGCLPYMLPPKCPNTCLANKYRPITGACNNRDHPRWGASNTALARWLPPVYEDGFSQPRGWNPGFLYNGFPLPPVREVTRHVIQVSNEVVTDDDRYSDLLMAWGQYIDHDIAFTPQSTSKAAFGGGADCQMTCENQNPCFPIQLPEEARPAAGTACLPFYRSSAACGTGDQGALFGNLSTANPRQQMNGLTSFLDASTVYGSSPALERQLRNWTSAEGLLRVHARLRDSGRAYLPFVPPRAPAACAPEPGIPGETRGPCFLAGDGRASEVPSLTALHTLWLREHNRLAAALKALNAHWSADAVYQEARKVVGALHQIITLRDYIPRILGPEAFQQYVGPYEGYDSTANPTVSNVFSTAAFRFGHATIHPLVRRLDASFQEHPDLPGLWLHQAFFSPWTLLRGGGLDPLIRGLLARPAKLQVQDQLMNEELTERLFVLSNSSTLDLASINLQRGRDHGLPGYNEWREFCGLPRLETPADLSTAIASRSVADKILDLYKHPDNIDVWLGGLAENFLPRARTGPLFACLIGKQMKALRDGDWFWWENSHVFTDAQRRELEKHSLSRVICDNTGLTRVPMDAFQVGKFPEDFESCDSITGMNLEAWRETFPQDDKCGFPESVENGDFVHCEESGRRVLVYSCRHGYELQGREQLTCTQEGWDFQPPLCKDSGRLPRVTWISMSLAALLIGGFAGLTSTVICRWTRTGTKSTLPISETGGGTPELRCGKHQAVGTSPQRAAAQDSEQESAGMEGRDTHRLPRAL

SEQ ID NO: 13685 - protein, 876 aa, Homo sapiens
MRALAVLSVTLVMACTEAFFPFISRGKELLWGKPEESRVSSVLEESKRLVDTAMYATMQRNLKKRGILSPAQLLSFSKLPEPTSGVIARAAEIMETSIQAMKRKVNLKTQQSQHPTDALSEDLLSIIANMSGCLPYMLPPKCPNTCLANKYRPITGACNNRDHPRWGASNTALARWLPPVYEDGFSQPRGWNPGFLYNGFPLPPVREVTRHVIQVSNEVVTDDDRYSDLLMAWGQYIDHDIAFTPQSTSKAAFGGGADCQMTCENQNPCFPIQLPEEARPAAGTACLPFYRSSAACGTGDQGALFGNLSTANPRQQMNGLTSFLDASTVYGSSPALERQLRNWTSAEGLLRVHARLRDSGRAYLPFVPPRAPAACAPEPGIPGETRGPCFLAGDGRASEVPSLTALHTLWLREHNRLAAALKALNAHWSADAVYQEARKVVGALHQIITLRDYIPRILGPEAFQQYVGPYEGYDSTANPTVSNVFSTAAFRFGHATIHPLVRRLDASFQEHPDLPGLWLHQAFFSPWTLLRGGYNEWREFCGLPRLETPADLSTAIASRSVADKILDLYKHPDNIDVWLGGLAENFLPRARTGPLFACLIGKQMKALRDGDWFWWENSHVFTDAQRRELEKHSLSRVICDNTGLTRVPMDAFQVGKFPEDFESCDSITGMNLEAWRETFPQDDKCGFPESVENGDFVHCEESGRRVLVYSCRHGYELQGREQLTCTQEGWDFQPPLCKDVNECADGAHPPCHASARCRNTKGGFQCLCADPYELGDDGRTCVDSGRLPRVTWISMSLAALLIGGFAGLTSTVICRWTRTGTKSTLPISETGGGTPELRCGKHQAVGTSPQRAAAQDSEQESAGMEGRDTHRLPRAL

SEQ ID NO: 13686 - protein, 760 aa, Homo sapiens
MRALAVLSVTLVMACTEAFFPFISRGKELLWGKPEESRVSSVLEESKRLVDTAMYATMQRNLKKRGILSPAQLLSFSKLPEPTSGVIARAAEIMETSIQAMKRKVNLKTQQSQHPTDALSEDLLSIIANMSGCLPYMLPPKCPNTCLANKYRPITGACNNRDHPRWGASNTALARWLPPVYEDGFSQPRGWNPGFLYNGFPLPPVREVTRHVIQVSNEVVTDDDRYSDLLMAWGQYIDHDIAFTPQSTSKAAFGGGADCQMTCENQNPCFPIQIITLRDYIPRILGPEAFQQYVGPYEGYDSTANPTVSNVFSTAAFRFGHATIHPLVRRLDASFQEHPDLPGLWLHQAFFSPWTLLRGGGLDPLIRGLLARPAKLQVQDQLMNEELTERLFVLSNSSTLDLASINLQRGRDHGLPGYNEWREFCGLPRLETPADLSTAIASRSVADKILDLYKHPDNIDVWLGGLAENFLPRARTGPLFACLIGKQMKALRDGDWFWWENSHVFTDAQRRELEKHSLSRVICDNTGLTRVPMDAFQVGKFPEDFESCDSITGMNLEAWRETFPQDDKCGFPESVENGDFVHCEESGRRVLVYSCRHGYELQGREQLTCTQEGWDFQPPLCKDVNECADGAHPPCHASARCRNTKGGFQCLCADPYELGDDGRTCVDSGRLPRVTWISMSLAALLIGGFAGLTSTVICRWTRTGTKSTLPISETGGGTPELRCGKHQAVGTSPQRAAAQDSEQESAGMEGRDTHRLPRAL

SEQ ID NO: 13687 - protein, 174 aa, Homo sapiens
MRALAVLSVTLVMACTEAFFPFISRGKELLWGKPEESRVSSVLEESKRLVDTAMYATMQRNLKKRGILSPAQLLSFSKLPEPTSGVIARAAEIMETSIQAMKRKVNLKTQQSQHPTDALSEDLLSIIANMSGCLPYMLPPKCPNTCLANKYRPITGACNNRKMKYKPDHSETAN

SEQ ID NO: 13688 - protein, 174 aa, Homo sapiens; identical to SEQ ID NO: 13687

SEQ ID NO: 13689 - protein, 864 aa, Homo sapiens
QLLSFSKLPEPTSGVIARAAEIMETSIQAMKRKVNLKTQQSQHPTDALSEDLLSIIANMSGCLPYMLPPKCPNTCLANKYRPITGACNNRDHPRWGASNTALARWLPPVYEDGFSQPRGWNPGFLYNGFPLPPVREVTRHVIQVSNEVVTDDDRYSDLLMAWGQYIDHDIAFTPQSTSKAAFGGGADCQMTCENQNPCFPIQLPEEARPAAGTACLPFYRSSAACGTGDQGALFGNLSTANPRQQMNGLTSFLDASTVYGSSPALERQLRNWTSAEGLLRVHARLRDSGRAYLPFVPPRAPAACAPEPGIPGETRGPCFLAGDGRASEVPSLTALHTLWLREHNRLAAALKALNAHWSADAVYQEARKVVGALHQIITLRDYIPRILGPEAFQQYVGPYEGYDSTANPTVSNVFSTAAFRFGHATIHPLVRRLDASFQEHPDLPGLWLHQAFFSPWTLLRGGGLDPLIRGLLARPAKLQVQDQLMNEELTERLFVLSNSSTLDLASINLQRGRDHGLPGYNEWREFCGLPRLETPADLSTAIASRSVADKILDLYKHPDNIDVWLGGLAENFLPRARTGPLFACLIGKQMKALRDGDWFWWENSHVFTDAQRRELEKHSLSRVICDNTGLTRVPMDAFQVGKFPEDFESCDSITGMNLEAWRETFPQDDKCGFPESVENGDFVHCEESGRRVLVYSCRHGYELQGREQLTCTQEGWDFQPPLCKDSGRLPRVTWISMSLAALLIGGFAGLTSTVICRWTRTGTKSTLPISETGGGTPELRCGKHQAVGTSPQRAAAQDSEQVGHTMPHVSSCHRSGWTGSGCRSSSAGAPCIFLFTPCFLVRSAPSSGRFYLQANDSEPECEPA

SEQ ID NO: 13690 - protein, 404 aa, Homo sapiens
  SITE 1: note = misc_feature - Xaa can be any naturally occurring amino acid
XYEGYDSTANPTVSNVFSTAAFRFGHATIHPLVRRLDASFQEHPDLPGLWLHQAFFSPWTLLRGGYNEWREFCGLPRLETPADLSTAIASRSVADKILDLYKHPDNIDVWLGGLAENFLPRARTGPLFACLIGKQMKALRDGDWFWWENSHVFTDAQRRELEKHSLSRVICDNTGLTRVPMDAFQVGKFPEDFESCDSITGMNLEAWRETFPQDDKCGFPESVENGDFVHCEESGRRVLVYSCRHGYELQGREQLTCTQEGWDFQPPLCKDVNECADGAHPPCHASARCRNTKGGFQCLCADPYELGDDGRTCVDSGRLPRVTWISMSLAALLIGGFAGLTSTVICRWRVLGWKAGILTGCREPSEGKVAGHCRTASCSQNHRTTLFQTQANPKSAGRLFSQHG

SEQ ID NO: 13691 - protein, 363 aa, Homo sapiens
YEGYDSTANPTVSNVFSTAAFRFGHATIHPLVRRLDASFQEHPDLPGLWLHQAFFSPWTLLRGGYNEWREFCGLPRLETPADLSTAIASRSVADKILDLYKHPDNIDVWLGGLAENFLPRARTGPLFACLIGKQMKALRDGDWFWWENSHVFTDAQRRELEKHSLSRVICDNTGLTRVPMDAFQVGKFPEDFESCDSITGMNLEAWRETFPQDDKCGFPESVENGDFVHCEESGRRVLVYSCRHGYELQGREQLTCTQEGWDFQPPLCKDSGRLPRVTWISMSLAALLIGGFAGLTSTVICRWTRTGTKSTLPISETGGGTPELRCGKHQAVGTSPQRAAAQDSEQESAGMEGRDTHRLPRAL

SEQ ID NO: 13692 - protein, 30 aa, Homo sapiens
MGLQACLLGLFALILSGKCSYSPEPDQRRT

SEQ ID NO: 13693 - protein, 39 aa, Homo sapiens
MGLQACLLGLFALILSGKCSYSPEPDQRRTKIPDPRECG

SEQ ID NO: 13694 - protein, 39 aa, Homo sapiens; identical to SEQ ID NO: 13693

SEQ ID NO: 13695 - protein, 81 aa, Homo sapiens
MGLQACLLGLFALILSGKCSYSPEPDQRRTLPPGWVSLGRADPEEELSLTFALRQQNVERLSELVQAVSDPSSPQYGAFWD

SEQ ID NO: 13696 - protein, 563 aa, Homo sapiens
MGLQACLLGLFALILSGKCSYSPEPDQRRTLPPGWVSLGRADPEEELSLTFALRQQNVERLSELVQAVSDPSSPQYGKYLTLENVADLVRPSPLTLHTVQKWLLAAGAQKCHSVITQDFLTCWLSIRQAELLLPGAEFHHYVGGPTETHVVRSPHPYQLPQALAPHVDFVGGLHRFPPTSSLRQRPEPQVTGTVGLHLGVTPSVIRKRYNLTSQDVGSGTSNNSQACAQFLEQYFHDSDLAQFMRLFGGNFAHQASVARVVGQQGRGRAGIEASLDVQYLMSAGANISTWVYSSPGRHEGQEPFLQWLMLLSNESALPHVHTVSYGDDEDSLSSAYIQRVNTELMKAAARGLTLLFASGDSGAGCWSVSGRHQFRPTFPASSPYVTTVGGTSFQEPFLITNEIVDYISGGGFSNVFPRPSYQEEAVTKFLSSSPHLPPSSYFNASGRAYPDVAALSDGYWVVSNRVPIPWVSGTSASTPVFGGILSLINEHRILSGRPPLGFLNPRLYQQHGAGLFDVTRGCHESCLDEEVEGQGFCSGPGWDPVTGWGTPNFPALLKTLLNP

SEQ ID NO: 13697 - protein, 500 aa, Homo sapiens
MGLQACLLGLFALILSGKCSYSPEPDQRRTLPPGWVSLGRADPEEELSLTFALRQQNVERLSELVQAVSDPSSPQYGKYLTLENVADLVRPSPLTLHTVQKWLLAAGAQKCHSVITQDFLTCWLSIRQAELLLPGAEFHHYVGGPTETHVVRSPHPYQLPQALAPHVDFVGGLHRFPPTSSLRQRPEPQVTGTVGLHLGVTPSVIRKRYNLTSQDVGSGTSNNSQACAQFLEQYFHDSDLAQFMRLFGGNFAHQASVARVVGQQGRGRAGIEASLDVQYLMSAGANISTWVYSSPGDSGAGCWSVSGRHQFRPTFPASSPYVTTVGGTSFQEPFLITNEIVDYISGGGFSNVFPRPSYQEEAVTKFLSSSPHLPPSSYFNASGRAYPDVAALSDGYWVVSNRVPIPWVSGTSASTPVFGGILSLINEHRILSGRPPLGFLNPRLYQQHGAGLFDVTRGCHESCLDEEVEGQGFCSGPGWDPVTGWGTPNFPALLKTLLNP

SEQ ID NO: 13698 - protein, 162 aa, Homo sapiens
MGLQACLLGLFALILSGKCSYSPEPDQRRTLPPGWVSLGRADPEEELSLTFALRQQNVERLSELVQAVSDPSSPQYGKYLTLENVADLVRPSPLTLHTVQKWLLAAGAQKCHSVITQDFLTCWLSIRQAELLLPGAEFHHYVGGPTETHVWGDCTVFPQHHP

SEQ ID NO: 13699 - protein, 470 aa, Homo sapiens
MGLQACLLGLFALILSGKCSYSPEPDQRRTLPPGWVSLGRADPEEELSLTFALRQQNVERLSELVQAVSDPSSPQYVGGLHRFPPTSSLRQRPEPQVTGTVGLHLGVTPSVIRKRYNLTSQDVGSGTSNNSQACAQFLEQYFHDSDLAQFMRLFGGNFAHQASVARVVGQQGRGRAGIEASLDVQYLMSAGANISTWVYSSPGRHEGQEPFLQWLMLLSNESALPHVHTVSYGDDEDSLSSAYIQRVNTELMKAAARGLTLLFASGDSGAGCWSVSGRHQFRPTFPASSPYVTTVGGTSFQEPFLITNEIVDYISGGGFSNVFPRPSYQEEAVTKFLSSSPHLPPSSYFNASGRAYPDVAALSDGYWVVSNRVPIPWVSGTSASTPVFGGILSLINEHRILSGRPPLGFLNPRLYQQHGAGLFDVTRGCHESCLDEEVEGQGFCSGPGWDPVTGWGTPNFPALLKTLLNP

SEQ ID NO: 13700 - protein, 40 aa, Homo sapiens
MGLQAWALCPHPLWQMQLQPGARPAEDAAPRLGVPGPCGP

SEQ ID NO: 13701 - protein, 99 aa, Homo sapiens
MRLFGGNFAHQASVARVVGQQGRGRAGIEASLDVQYLMSAGANISTWVYSSPGDSGAGCWSVSGRHQFRPTFPASRSQAPNLLCGIQLPLFLFVSSQAF

SEQ ID NO: 13702 - protein, 162 aa, Homo sapiens
MRLFGGNFAHQASVARVVGQQGRGRAGIEASLDVQYLMSAGANISTWVYSSPGRHEGQEPFLQWLMLLSNESALPHVHTVSYGDDEDSLSSAYIQRVNTELMKAAARGLTLLFASGDSGAGCWSVSGRHQFRPTFPASRSQAPNLLCGIQLPLFLFVSSQAF

SEQ ID NO: 13703 - protein, 320 aa, Homo sapiens
MRLFGGNFAHQASVARVVGQQGRGRAGIEASLDVQYLMSAGANISTWVYSSPGRHEGQEPFLQWLMLLSNESALPHVHTVSYGDDEDSLSSAYIQRVNTELMKAAARGLTLLFASGDSGAGCWSVSGRHQFRPTFPASSPYVTTVGGTSFQEPFLITNEIVDYISGGGFSNVFPRPSYQEEAVTKFLSSSPHLPPSSYFNASGRAYPDVAALSDGYWVVSNRVPIPWVSGTSASTPVFGGILSLINEHRILSGRPPLGFLNPRLYQQHGAGLFDVTRGCHESCLDEEVEGQGFCSGPGWDPVTGWGTPNFPALLKTLLNP

SEQ ID NO: 13704 - protein, 320 aa, Homo sapiens; identical to SEQ ID NO: 13703

SEQ ID NO: 13705 - protein, 320 aa, Homo sapiens; identical to SEQ ID NO: 13703

SEQ ID NO: 13706 - protein, 320 aa, Homo sapiens; identical to SEQ ID NO: 13703

SEQ ID NO: 13707 - protein, 171 aa, Homo sapiens
  SITE 1: note = misc_feature - Xaa can be any naturally occurring amino acid
XAVSDPSSPQYGKYLTLENVADLVRPSPLTLHTVQKWLLAAGAQKCHSVITQDFLTCWLSIRQAELLLPGAEFHHYVGGPTETHVVRSPHPYQLPQALAPHVDFGDSGAGCWSVSGRHQFRPTFPASSPYVTTVGGTSFQEPFLITNEIVDYISGGGFSNVFPRPSYQEEA

SEQ ID NO: 13708 - protein, 400 aa, Homo sapiens
  SITE 1: note = misc_feature - Xaa can be any naturally occurring amino acid
XGRADPEEELSLTFALRQQNVERLSELVQAVSDPSSPQYGKYLTLENVADLVRPSPLTLHTVQKWLLAAGAQKCHSVITQDFLTCWLSIRQAELLLPGAEFHHYVGGPTETHVVRSPHPYQLPQALAPHVDFGRHEGQEPFLQWLMLLSNESALPHVHTVSYGDDEDSLSSAYIQRVNTELMKAAARGLTLLFASGDSGAGCWSVSGRHQFRPTFPASSPYVTTVGGTSFQEPFLITNEIVDYISGGGFSNVFPRPSYQEEAVTKFLSSSPHLPPSSYFNASGRAYPDVAALSDGYWVVSNRVPIPWVSGTSASTPVFGGILSLINEHRILSGRPPLGFLNPRLYQQHGAGLFDVTRGCHESCLDEEVEGQGFCSGPGWDPVTGWGTPNFPALLKTLLNP

SEQ ID NO: 13709 - protein, 92 aa, Homo sapiens
  SITE 1: note = misc_feature - Xaa can be any naturally occurring amino acid
XLQWLMLLSNESALPHVHTVSYGDDEDSLSSAYIQRVNTELMKAAARGLTLLFASGDSGAGCWSVSGRHQFRPTFPASSGRHILPGTFPHHK

SEQ ID NO: 13710 - protein, 282 aa, Homo sapiens
MLLLAPQMLNLLLLALPVLASRAYAAPAPGQALQRVGIVGGQEAPRSKWPWQVSLRVHGPYWMHFCGGSLIHPQWVLTAAHCVGPDVKDLAALRVQLREQHLYYQDQLLPVSRIIVHPQFYTAQIGADIALLELEEPVNVSSHVHTVTLPPASETFPPGMPCWVTGWGDVDNDERLPPPFPLKQVKVPIMENHICDAKYHLGAYTGDDVRIVRDDMLCAGNTRRDSCQGDSGGPLVCKVNGTWLQAGVVSWGEGCAQPNRPGIYTRVTYYLDWIHHYVPKKP

SEQ ID NO: 13711 - protein, 275 aa, Homo sapiens
MLNLLLLALPVLASRAYAAPAPGQALQRVGIVGGQEAPRSKWPWQVSLRVHGPYWMHFCGGSLIHPQWVLTAAHCVGPDVKDLAALRVQLREQHLYYQDQLLPVSRIIVHPQFYTAQIGADIALLELEEPVNVSSHVHTVTLPPASETFPPGMPCWVTGWGDVDNDERLPPPFPLKQVKVPIMENHICDAKYHLGAYTGDDVRIVRDDMLCAGNTRRDSCQGDSGGPLVCKVNGTWLQAGVVSWGEGCAQPNRPGIYTRVTYYLDWIHHYVPKKP

SEQ ID NO: 13712 - protein, 213 aa, Homo sapiens
YWMHFCGGSLIHPQWVLTAAHCVGPVQLREQHLYYQDQLLPVSRIIVHPQFYTAQIGADIALLELEEPVNVSSHVHTVTLPPASETFPPGMPCWVTGWGDVDNDERLPPPFPLKQVKVPIMENHICDAKYHLGAYTGDDVRIVRDDMLCAGNTRRDSCQGDSGGPLVCKVNGTWLQAGVVSWGEGCAQPNRPGIYTRVTYYLDWIHHYVPKKP

SEQ ID NO: 13713 - protein, 282 aa, Homo sapiens
MLLLAPQMLNLLLLALPVLASRAYAAPAPGQALQRVGIVGGQEAPRSKWPWQVSLRVRDRYWMHFCGGSLIHPQWVLTAAHCVGPDVKDLAALRVQLREQHLYYQDQLLPVSRIIVHPQFYTAQIGADIALLELEEPVNVSSHVHTVTLPPASETFPPGMPCWVTGWGDVDNDERLPPPFPLKQVKVPIMENHICDAKYHLGAYTGDDVRIVRDDMLCAGNTRRDSCQGDSGGPLVCKVNGTWLQAGVVSWGEGCAQPNRPGIYTRVTYYLDWIHHYVPKKP

SEQ ID NO: 13714 - protein, 275 aa, Homo sapiens
MLNLLLLALPVLASRAYAAPAPGQALQRVGIVGGQEAPRSKWPWQVSLRVRDRYWMHFCGGSLIHPQWVLTAAHCVGPDVKDLAALRVQLREQHLYYQDQLLPVSRIIVHPQFYTAQIGADIALLELEEPVNVSSHVHTVTLPPASETFPPGMPCWVTGWGDVDNDERLPPPFPLKQVKVPIMENHICDAKYHLGAYTGDDVRIVRDDMLCAGNTRRDSCQGDSGGPLVCKVNGTWLQAGVVSWGEGCAQPNRPGIYTRVTYYLDWIHHYVPKKP

SEQ ID NO: 13715 - protein, 292 aa, Homo sapiens
MLNLLLLALPVLASRAYAAPAPGQALQRVGIVGGQEAPRSKWPWQVSLRVRDRYWMHFCGGSLIHPQWVLTAAHCVGPDVKDLAALRVQLREQHLYYQDQLLPVSRIIVHPQFYTAQIGADIALLELEEPVNVSSHVHTVTLPPASETFPPGMPCWVTGWGDVDNDERLPPPFPLKQVKVPIMENHICDAKYHLGAYTGDDVRIVRDDMLCAGNTRRDSCQGDSGGPLVCKVNGTWLQAGVVSWGEGCAQPNRPGIYTRVTYYLDWIHHYVPKKPDGVSPCWPVWSRTPDLK

SEQ ID NO: 13716 - protein, 242 aa, Homo sapiens
MLLLAPQMLSLLLLALPVLASPAYVAPAPGQALQQTGIVGGQEAPRSKWPWQVSLRVRGPYWMHFCGGSLIHPQWVLTAAHCVEPDIKDLAALRVQLREQHLYYQDQLLPVSRIIVHPQFYIIQTGADIALLELEEPVNISSHIHTVTLPPASETFPPGMPCWVTGWGDVDNNVHLPPPYPLKEVEVPVVENHLCNAEYHTGLHTGHSFQIVRDDMLCAGSENHDSCQGDSGGPLVCKVNGT

SEQ ID NO: 13717 - protein, 235 aa, Homo sapiens
MLSLLLLALPVLASPAYVAPAPGQALQQTGIVGGQEAPRSKWPWQVSLRVRGPYWMHFCGGSLIHPQWVLTAAHCVEPDIKDLAALRVQLREQHLYYQDQLLPVSRIIVHPQFYIIQTGADIALLELEEPVNISSHIHTVTLPPASETFPPGMPCWVTGWGDVDNNVHLPPPYPLKEVEVPVVENHLCNAEYHTGLHTGHSFQIVRDDMLCAGSENHDSCQGDSGGPLVCKVNGT

SEQ ID NO: 13718 - protein, 42 aa, Homo sapiens
MVGKLKQNLLLACLVISSVTVFYLGQHAMECHHRIEERSQPV

SEQ ID NO: 13719 - protein, 140 aa, Homo sapiens
MVGKLKQNLLLACLVISSVTVFYLGQHAMECHHRIEERSQPVKLESTRTTVRTGLDLKANKTFAYHKDMPLIFIGGVPRSGTTLMRAMLDAHPDIRCGEETRVIPRILALKQMWSRSSKEKIRLDEAGVTDEVLDSAMQA

SEQ ID NO: 13720 - protein, 370 aa, Homo sapiens
MVGKLKQNLLLACLVISSVTVFYLGQHAMECHHRIEERSQPVKLESTRTTVRTGLDLKANKTFAYHKDMPLIFIGGVPRSGTTLMRAMLDAHPDIRCGEETRVIPRILALKQMWSRSSKEKIRLDEAGVTDEVLDSAMQAFLLEIIVKHGEPAPYLCNKDPFALKSLTYLSRLFPNAKFLLMVRDGRASVHSMISRKVTIAGFDLNSYRDCLTKWNRAIETMYNQCMEVGYKKCMLVHYEQLVLHPERWMRTLLKFLQIPWNHSVLHHEEMIGKAGGVSLSKVERSTDQVIKPVNVGALSKWVGKIPPDVLQDMAVIAPMLAKLGYDPYANPPNYGKPDPKIIENTRRVYKGEFQLPDFLKEKPQTEQVE

SEQ ID NO: 13721 - protein, 168 aa, Homo sapiens
DFLGIAWSDAVLHHEDLIGKPGGVSLSKIERSTDQVIKPVNLEALSKWTGHIPGDVVRDMAQIAPMLAQLGYDPYANPPNYGNPDPFVINNTQRVSVHLYLWKCTLGDMGLLQMWKLQPPEEMFSLSIPGHLICSCLMDTVNYMIACISILLGLQGSSKPTGSLSLIL

SEQ ID NO: 13722 - protein, 47 aa, Homo sapiens
MRLSVRRVLLAAGCALVLVLAVQLGQQVLECRAVLAGLRSPRGAMRP

SEQ ID NO: 13723 - protein, 48 aa, Homo sapiens
MRLSVRRVLLAAGCALVLVLAVQLGQQVLECRAVLAGLRSPRGAMRPE

SEQ ID NO: 13724 - protein, 64 aa, Homo sapiens
MRLSVRRVLLAAGCALVLVLAVQLGQQVLECRAVLAGLRSPRGAMRPEQEELVMVGTNHVEYRY

SEQ ID NO: 13725 - protein, 120 aa, Homo sapiens
MRLSVRRVLLAAGCALVLVLAVQLGQQVLECRAVLAGLRSPRGAMRPEQEELVMVGTNHVEYRYGKAMPLIFVGGVPRSGTTLMRAMLDAHPEVRCGEETRIIPRVLAMRQAWSKSGREK

SEQ ID NO: 13726 - protein, 142 aa, Homo sapiens
MRLSVRRVLLAAGCALVLVLAVQLGQQVLECRAVLAGLRSPRGAMRPEQEELVMVGTNHVEYRYGKAMPLIFVGGVPRSGTTLMRAMLDAHPEVRCGEETRIIPRVLAMRQAWSKSGREKLRLDEAGVTDEVLDAAMQAFIL

SEQ ID NO: 13727 - protein, 377 aa, Homo sapiens
MRLSVRRVLLAAGCALVLVLAVQLGQQVLECRAVLAGLRSPRGAMRPEQEELVMVGTNHVEYRYGKAMPLIFVGGVPRSGTTLMRAMLDAHPEVRCGEETRIIPRVLAMRQAWSKSGREKLRLDEAGVTDEVLDAAMQAFILEVIAKHGEPARVLCNKDPFTLKSSVYLSRLFPNSKFLLMVRDGRASVHSMITRKVTIAGFDLSSYRDCLTKWNKAIEVMYAQCMEVGKEKCLPVYYEQLVLHPRRSLKLILDFLGIAWSDAVLHHEDLIGKPGGVSLSKIERSTDQVIKPVNLEALSKWTGHIPGDVVRDMAQIAPMLAQLGYDPYANPPNYGNPDPFVINNTQRVLKGDYKTPANLKGYFQVNQNSTSSHLGSS

SEQ ID NO: 13728 - protein, 377 aa, Homo sapiens; identical to SEQ ID NO: 13727

SEQ ID NO: 13729 - protein, 377 aa, Homo sapiens; identical to SEQ ID NO: 13727

SEQ ID NO: 13730 - protein, 333 aa, Homo sapiens
MSPWSWFLLQTLCLLPTGAASRRGAPGTANCELKPQQSELNSFLWTIKRDPPSYFFGTIHVPYTRVWDFIPDNSKEAFLQSSIVYFELDLTDPYTISALTSCQMLPQGENLQDVLPRDIYCRLKRHLEYVKLMMPLWMTPDQRGKGLYADYLFNAIAGNWERKRPVWVMLMVNSLTEVDIKSRGVPVLDLFLAQEAERLRKQTGAVEKVEEQCHPLNGLNFSQVIFALNQTLLQQESLRAGSLQIPYTTEDLIKHYNCGDLSSVILSHDSSQVPNFINATLPPQERITAQEIDSYLRRELIYKRNERIGKRVKALLEEFPDKGFFFAFGAASQ

SEQ ID NO: 13731 - protein, 505 aa, Homo sapiens
MSPWSWFLLQTLCLLPTGAASRRGAPGTANCELKPQQSELNSFLWTIKRDPPSYFFGTIHVPYTRVWDFIPDNSKEAFLQSSIVYFELDLTDPYTISALTSCQMLPQGENLQDVLPRDIYCRLKRHLEYVKLMMPLWMTPDQRGKGLYADYLFNAIAGNWERKRPVWVMLMVNSLTEVDIKSRGVPVLDLFLAQEAERLRKQTGAVEKVEEQCHPLNGLNFSQVIFALNQTLLQQESLRAGSLQIPYTTEDLIKHYNCGDLSSVILSHDSSQVPNFINATLPPQERITAQEIDSYLRRELIYKRNERIGKRVKALLEEFPDKGFFFAFGAGHFMGNNTVLDVLRREGYEVEHAPAGRPIHKGKSKKTSTRPTLSTIFAPKVPTLEVPAPEAVSSGHSTLPPLVSRPGSADTPSEAEQRFRKKRRRSQRRPRLRQFSDLWVRLEESDIVPQLQVPVLDRHISTELRLPRRGHSHHSQMVASSACLSLWTPVFWVLVLAFQTETPLL

SEQ ID NO: 13732 - protein, 456 aa, Homo sapiens
MSPWSWFLLQTLCLLPTGAASRRGAPGTANCELKPQQSELNSFLWTIKRDPPSYFFGTIHVPYTRVWDFIPDNSKEAFLQSSIVYFELDLTDPYTISALTSCQMLPQGENLQDVLPRDIYCRLKRHLEYVKLMMPLWMTPDQRGKGLYADYLFNAIAGNWERKRPVWVMLMVNSLTEVDIKSRGVPVLDLFLAQEAERLRKQTGAVEKVEEQCHPLNGLNFSQVPNFINATLPPQERITAQEIDSYLRRELIYKRNERIGKRVKALLEEFPDKGFFFAFGAGHFMGNNTVLDVLRREGYEVEHAPAGRPIHKGKSKKTSTRPTLSTIFAPKVPTLEVPAPEAVSSGHSTLPPLVSRPGSADTPSEAEQRFRKKRRRSQRRPRLRQFSDLWVRLEESDIVPQLQVPVLDRHISTELRLPRRGHSHHSQMVASSACLSLWTPVFWVLVLAFQTETPLL

SEQ ID NO: 13733 - protein, 517 aa, Homo sapiens
MHAALAGPLLAALLATARARPQPPDGGQCRPPGSQRDLNSFLWTIRRDPPAYLFGTIHVPYTRVWDFIPDNSKAAFQASTRVYFELDLTDPYTISALASCQLLPHGENLQDVLPHELYWRLKRHLDYVKLMMPSWMTPAQRGKGLYADYLFNAIAGNWERKRPVWVMLMVNSLTERDVRFRGVPVLDLYLAQQAEKMKKTTGAVEQVEEQCHPLNNGLNFSQVLFALNQTLLQQESVRAGSLQASYTTEDLIKHYNCGDLSAVIFNHDTSQLPNFINTTLPPHEQVTAQEIDSYFRQELIYKRNERMGKRVMALLRENEDKICFFAFGAGHFLGNNTVIDILRQAGLEVDHTPAGQAIHSPAPQSPAPSPEGTSTSPAPVTPAAAVPEAPSVTPTAPPEDEDPALSPHLLLPDSLSQLEEFGRQRKWHKRQSTHQRPRQFNDLWVRIEDSTTASPPPLPLQPTHSSGTAKPPFQLSDQLQQQDPPGPASSSAPTLGLLPAIATTIAVCFLLHSLGPS

SEQ ID NO: 13734 - protein, 37 aa, Homo sapiens
MPGRTWELCLLLLLGLGLGSQEALPPPCERTSPADLH

SEQ ID NO: 13735 - protein, 552 aa, Homo sapiens
MPGRTWELCLLLLLGLGLGSQEALPPPCESEIYCHGELLNQVQMAKLYQDDKQFVDMPLSIAPEQVLQTFTELSRDHNHSIPREQLQAFVHEHFQAKGQELQPWTPADWKDSPQFLQKISDAKLRAWAGQLHQLWKKLGKKMKPEVLSHPERFSLIYSEHPFIVPGGRFVEFYYCYGHVPNGGRVYYLQRSQPPLLTLMMDCYLTHTNDTAFLQENIETLALELDFWTKNRTVSVSLEGKNYLLNRYYVPYGGPRPESYSKDVELADTLPEGDREALWAELKAGAESGWDFSSRWLIGGPNPNSLSGIRTSKLVPVDLNAFLCQAEELMSNFYSRLGNDSQATKYRILRSQRLAALNTVLWDEQTGAWFDYDLEKKKKNREFYPSNLTPLWAGCFSDPGVADKALKYLEDNRILTYQYGIPTSLQKTGQQWDFPNAWAPLQDLVIRGLAKAPLRRAQEVAFQLAQNWIRTNFDVYSQKSAMYEKYDVSNGGQPGGGGEYEVQEGFGWTNGVVLMLLDRYGDRLTSGAKLAFLEPHCLAATLLPSLLLSLLPW

SEQ ID NO: 13736 - protein, 583 aa, Homo sapiens
MPGRTWELCLLLLLGLGLGSQEALPPPCESEIYCHGELLNQVQMAKLYQDDKQFVDMPLSIAPEQVLQTFTELSRDHNHSIPREQLQAFVHEHFQAKGQELQPWTPADWKDSPQFLQKISDAKLRAWAGQLHQLWKKLGKKMKPEVLSHPERFSLIYSEHPFIVPGGRFVEFYYWDSYWVMEGLLLSEMAETVKGMLQNFLDLVKTYGHVPNGGRVYYLQRSQPPLLTLMMDCYLTHTNDTAFLQENIETLALELDFWTKNRTVSVSLEGKNYLLNRYYVPYGGPRPESYSKDVELADTLPEGDREALWAELKAGAESGWDFSSRWLIGGPNPNSLSGIRTSKLVPVDLNAFLCQAEELMSNFYSRLGNDSQATKYRILRSQRLAALNTVLWDEQTGAWFDYDLEKKKKNREFYPSNLTPLWAGCFSDPGVADKALKYLEDNRILTYQYGIPTSLQKTGQQWDFPNAWAPLQDLVIRGLAKAPLRRAQEVAFQLAQNWIRTNFDVYSQKSAMYEKYDVSNGGQPGGGGEYEVQEGFGWTNGVVLMLLDRYGDRLTSGAKLAFLEPHCLAATLLPSLLLSLLPW

SEQ ID NO: 13737 - protein, 150 aa, Homo sapiens
MRKTRLWGLLWMLFVSELRAATKLTEEKYELKEGQTLDVKCDYTLEKFASSQKAWQIIRDGEMPKTLACTERPSKNSHPVQVGRIILEDYHDHGLLRVRMVNLQVEDSGLYQCVIYQPPKEPHMLFDRIRLVVTKGFRCSTLSFSWLVDS

SEQ ID NO: 13738 - protein, 250 aa, Homo sapiens
MRKTRLWGLLWMLFVSELRAATKLTEEKYELKEGQTLDVKCDYTLEKFASSQKAWQIIRDGEMPKTLACTERPSKNSHPVQVGRIILEDYHDHGLLRVRMVNLQVEDSGLYQCVIYQPPKEPHMLFDRIRLVVTKGFSGTPGSNENSTQNVYKIPPTTTKALCPLYTSPRTVTQAPPKSTADVSTPDSEINLTNVTDIIREKSMTFGIRRLDVESHPLPPLHTGHFRISQFFSQAGTQSLHSCYKGKPTP

SEQ ID NO: 13739 - protein, 234 aa, Homo sapiens
MRKTRLWGLLWMLFVSELRAATKLTEEKYELKEGQTLDVKCDYTLEKFASSQKAWQIIRDGEMPKTLACTERPSKNSHPVQVGRIILEDYHDHGLLRVRMVNLQVEDSGLYQCVIYQPPKEPHMLFDRIRLVVTKGFSGTPGSNENSTQNVYKIPPTTTKALCPLYTSPRTVTQAPPKSTADVSTPDSEINLTNVTDIIRVPVFNIVILLAGGFLSKSLVFSVLFAVTLRSFVP

SEQ ID NO: 13740 - protein, 225 aa, Homo sapiens
MRKTRLWGLLWMLFVSELRAATKLTEEKYELKEGQTLDVKCDYTLEKFASSQKAWQIIRDGEMPKTLACTERPSKNSHPVQVGRIILEDYHDHGLLRVRMVNLQVEDSGLYQCVIYQPPKEPHMLFDRIRLVVTKGFSGTPGSNENSTQNVYKIPPTTTKALCPLYTSPRTVTQAPPKSTADVSTPDSEINLTNVTDIIRYSFQVPGPLVWTLSPLFPSLCAERM

SEQ ID NO: 13741 - protein, 219 aa, Homo sapiens
MEPLRLLILLFVTELSGAHNTTVFQGVAGQSLQVSCPYDSMKHWGRRKAWCRQLGEKGPCQRVVSTHNLWLLSFLRRWNGSTAITDDTLGGTLTITLRNLQPHDAGLYQCQSLHGSEADTLRKVLVEVLADPLDHRDAGDLWFPGESESFEDAHVEHSISRAERHVKEDDGRKSPGEVPPGTSPACILATWPPGLLVLLWQETTLPEHCFSWTLEAGTG

SEQ ID NO: 13742 - protein, 222 aa, Homo sapiens
MEPLRLLILLFVTELSGAHNTTVFQGVAGQSLQVSCPYDSMKHWGRRKAWCRQLGEKGPCQRVVSTHNLWLLSFLRRWNGSTAITDDTLGGTLTITLRNLQPHDAGLYQCQSLHGSEADTLRKVLVEVLADPLDHRDAGDLWFPGESESFEDAHVEHSISRPSQGSHLPSCLSKEPLGRRNPLPTHFHPSPPGLHLSHQDSSSQRPLGCSLAWTEARDTSTQ

SEQ ID NO: 13743 - protein, 230 aa, Homo sapiens
MEPLRLLILLFVTELSGAHNTTVFQGVAGQSLQVSCPYDSMKHWGRRKAWCRQLGEKGPCQRVVSTHNLWLLSFLRRWNGSTAITDDTLGGTLTITLRNLQPHDAGLYQCQSLHGSEADTLRKVLVEVLADPLDHRDAGDLWFPGESESFEDAHVEHSISRSLLEGEIPFPPTSILLLLACIFLIKILAASALWAAAWHGQKPGTHPPSELDCGHDPGYQLQTLPGLRDT

SEQ ID NO: 13744 - protein, 238 aa, Homo sapiens
MPGPWLLLALALTLNLTGVPGGRAQPEAAQQEAVTAAEHPGLDDFLRQVERLLFLRENIQRLQGDQASQIFQSDWLSKRQHPGKREEEEEEGVEEEEEEEGGAVGPHKRQHPGRREDEASWSVDVTQHKRQHPGRRSPWLAYAVPKRQHPGRRLADPKAQRSWEEEEEEEEREEDLMPEKRQHPGKRALGGPCGPQGAYGQAGLLLGLLDDLSRSQGAEEKRQHPGRRAAWVREPLEE

SEQ ID NO: 13745 - protein, 242 aa, Homo sapiens
MPGPWLLLALALTLNLTGVPGGRAQPEAAQQEAVTAAEHPGLDDFLRQVERLLFLRENIQRLQGDQGEHSASQIFQSDWLSKRQHPGKREEEEEEGVEEEEEEEGGAVGPHKRQHPGRREDEASWSVDVTQHKRQHPGRRSPWLAYAVPKRQHPGRRLADPKAQRSWEEEEEEEEREEDLMPEKRQHPGKRALGGPCGPQGAYGQAGLLLGLLDDLSRSQGAEEKRQHPGRRAAWVREPLEE

SEQ ID NO: 13746 - protein, 1050 aa, Homo sapiens
MEVAVEKAVAAAAAASAAASGGPSAAPSGENEAESRQGPDSERGGEAARLNLLDTCAVCHQNIQSRAPKLLPCLHSFCQRCLPAPQRYLMLPAPMLGSAETPPPVPAPGSPVSGSSPFATQVGVIRCPVCSQECAERHIIDNFFVKDTTEVPSSTVEKSNQVCTSCEDNAEANGFCVECVEWLCKTCIRAHQRVKFTKDHTVRQKEEVSPEAVGVTSQRPVFCPFHKKEQLKLYCETCDKLTCRDCQLLEHKEHRYQFIEEAFQNQKVIIDTLITKLMEKTKYIKFTGNQIQNRIIEVNQNQKQVEQDIKVAIFTLMVEINKKGKALLHQLESLAKDHRMKLMQQQQEVAGLSKQLEHVMHFSKWAVSSGSSTALLYSKRLITYRLRHLLRARCDASPVTNNTIQFHCDPSFWAQNIINLGSLVIEDKESQPQMPKQNPVVEQNSQPPSGLSSNQLSKFPTQISLAQLRLQHMQQQVMAQRQQVQRRPAPVGLPNPRMQGPIQQPSISHQQPPPRLINFQNHSPKPNGPVLPPHPQQLRYPPNQNIPRQAIKPNPLQMAFLAQQAIKQWQISSGQGTPSTTNSTSSTPSSPTITSAAGYDGKAFGSPMIDLSSPVGGSYNLPSLPDIDCSSTIMLDNIVRKDTNIDHGQPRPPSNRTVQSPNSSVPSPGLAGPVTMTSVHPPIRSPSASSVGSRGSSGSSSKPAGADSTHKVPVVMLEPIRIKQENSGPPENYDFPVVIVKQESDEESRPQNANYPRSILTSLLLNSSQSSTSEETVLRSDAPDSTGDQPGLHQDNSSNGKSEWLDPSQKSPLHVGETRKEDDPNEDWCAVCQNGGELLCCEKCPKVFHLSCHVPTLTNFPSGEWICTFCRDLSKPEVEYDCDAPSHNSEKKKTEGLVKLTPIDKRKCERLLLFLYCHEMSLAFQDPVPLTVPDYYKIIKNPMDLSTIKKRLQEDYSMYSKPEDFVADFRLIFQNCAEFNEPDSEVANAGIKLENYFEELLKNLYPEKRFPKPEFRNESEDNKFSDDSDDDFVQPRKKRLKSIEERQLLK

SEQ ID NO: 13747 - protein, 1016 aa, Homo sapiens
MEVAVEKAVAAAAAASAAASGGPSAAPSGENEAESRQGPDSERGGEAARLNLLDTCAVCHQNIQSRAPKLLPCLHSFCQRCLPAPQRYLMLPAPMLGSAETPPPVPAPGSPVSGSSPFATQVGVIRCPVCSQECAERHIIDNFFVKDTTEVPSSTVEKSNQVCTSCEDNAEANGFCVECVEWLCKTCIRAHQRVKFTKDHTVRQKEEVSPEAVGVTSQRPVFCPFHKKEQLKLYCETCDKLTCRDCQLLEHKEHRYQFIEEAFQNQKVIIDTLITKLMEKTKYIKFTGNQIQNRIIEVNQNQKQVEQDIKVAIFTLMVEINKKGKALLHQLESLAKDHRMKLMQQQQEVAGLSKQLEHVMHFSKWAVSSGSSTALLYSKRLITYRLRHLLRARCDASPVTNNTIQFHCDPSFWAQNIINLGSLVIEDKESQPQMPKQNPVVEQNSQPPSGLSSNQLSKFPTQISLAQLRLQHMQQQQPPPRLINFQNHSPKPNGPVLPPHPQQLRYPPNQNIPRQAIKPNPLQMAFLAQQAIKQWQISSGQGTPSTTNSTSSTPSSPTITSAAGYDGKAFGSPMIDLSSPVGGSYNLPSLPDIDCSSTIMLDNIVRKDTNIDHGQPRPPSNRTVQSPNSSVPSPGLAGPVTMTSVHPPIRSPSASSVGSRGSSGSSSKPAGADSTHKVPVVMLEPIRIKQENSGPPENYDFPVVIVKQESDEESRPQNANYPRSILTSLLLNSSQSSTSEETVLRSDAPDSTGDQPGLHQDNSSNGKSEWLDPSQKSPLHVGETRKEDDPNEDWCAVCQNGGELLCCEKCPKVFHLSCHVPTLTNFPSGEWICTFCRDLSKPEVEYDCDAPSHNSEKKKTEGLVKLTPIDKRKCERLLLFLYCHEMSLAFQDPVPLTVPDYYKIIKNPMDLSTIKKRLQEDYSMYSKPEDFVADFRLIFQNCAEFNEPDSEVANAGIKLENYFEELLKNLYPEKRFPKPEFRNESEDNKFSDDSDDDFVQPRKKRLKSIEERQLLK

SEQ ID NO: 13748 - protein, 460 aa, Homo sapiens
IYFQLHRALKMIVDPVEPHGEMKFQWDLNAWTKSAEAFGKIVAERPGTNSTGPAPMAPPRAPGPLSKQGSGSSQPMEVQEGYGFGSEPHVSGVKRSRSGEGEVSGLMRKVPRVSLERLDLDLTADSQPPVFKVFPGSTTEDYNLIVIERGAAAAATGQPGTAPAGTPGAPPLAGMAIVKEEETEAAIGAPPTATEGPETKPVLMALAEGPGAEGPRLASPSGSTSSGLEVVAPEGTSAPGGGPGTLDDSATICRVCQKPGDLVMCNQCEFCFHLDCHLPALQDVPGEEWSCSLCHVLPDLKEEDGSLSLDGADSTGVVAKLSPANQRKCERVLLALFCHEPCRPLHQLATDSTFSLDQPGGTLDLTLIRARLQEKLSPPYSSPQEFAQDVGRMFKQFNKLTEDKADVQSIIGLQRFFETRMNEAFGDTKFSAVLVEPPPMSLPGAGLSSQELSGGPGDGP

SEQ ID NO: 13749 - protein, 753 aa, Homo sapiens
MAASAAAASAAAASAASGSPGPGEGSAGGEKRSTAPSAAASASASAAASSPAGGGAEALELLEHCGVCRERLRPEREPRLLPCLHSACSACLGPAAPAAANSSGDGGAAGDGTGPAKSRDGERTVYCNVHKHEPLVLFCESCDTLTCRDCQLNAHKDHQYQFLEDAVRNQRKLLASLVKRLGDKHATLQKSTKEVRSSIRQVSDVQKRVQVDVKMAILQIMKELNKRGRVLVNDAQKVTEGQQERLERQHWTMTKIQKHQEHILRFASWALESDNNTALLLSKKLIYFQLHRALKMIVDPVEPHGEMKFQWDLNAWTKSAEAFGKIVAERPGTNSTGPAPMAPPRAPGPLSKQGSGSSQPMEVQEGYGFGSGDDPYSSAEPHVSGVKRSRSGEGEVSGLMRKVPRVSLERLDLDLTADSQPPVFKVFPGSTTEDYNLIVIERGAAAAATGQPGTAPAGTPGAPPLAGMAIVKEEETEAAIGAPPTATEGPETKPVLMALAEGPGAEGPRLASPSGSTSSGLEVVAPEGTSAPGGGPGTLDDSATICRVCQKPGDLVMCNQCEFCFHLDCHLPALQDVPGEEWSCSLCHVLPDLKEEDGSLSLDGADSTGVVAKLSPANQRKCERVLLALFCHEPCRPLHQLATDSTFSLDQPGGTLDLTLIRARLQEKLSPPYSSPQEFAQDVGRMFKQFNKLTEDKADVQSIIGLQRFFETRMNEAFGDTKFSAVLVEPPPMSLPGAGLSSQELSGGPGDGP

SEQ ID NO: 13750 - protein, 835 aa, Homo sapiens
MAASAAAASAAAASAASGSPGPGEGSAGGEKRSTAPSAAASASASAAASSPAGGGAEALELLEHCGVCRERLRPEREPRLLPCLHSACSACLGPAAPAAANSSGDGGAAGDGTVVDCPVCKQQCFSKDIVENYFMRDSGSKAATDAQDANQCCTSCEDNAPATSYCVECSEPLCETCVEAHQRVKYTKDHTVRSTGPAKSRDGERTVYCNVHKHEPLVLFCESCDTLTCRDCQLNAHKDHQYQFLEDAVRNQRKLLASLVKRLGDKHATLQKSTKEVRSSIRQVSDVQKRVQVDVKMAILQIMKELNKRGRVLVNDAQKVTEGQQERLERQHWTMTKIQKHQEHILRFASWALESDNNTALLLSKKLIYFQLHRALKMIVDPVEPHGEMKFQWDLNAWTKSAEAFGKIVAERPGTNSTGPAPMAPPRAPGPLSKQGSGSSQPMEVQEGYGFGSGDDPYSSAEPHVSGVKRSRSGEGEVSGLMRKVPRVSLERLDLDLTADSQPPVFKVFPGSTTEDYNLIVIERGAAAAATGQPGTAPAGTPGAPPLAGMAIVKEEETEAAIGAPPTATEGPETKPVLMALAEGPGAEGPRLASPSGSTSSGLEVVAPEGTSAPGGGPGTLDDSATICRVCQKPGDLVMCNQCEFCFHLDCHLPALQDVPGEEWSCSLCHVLPDLKEEDGSLSLDGADSTGVVAKLSPANQRKCERVLLALFCHEPCRPLHQLATDSTFSLDQPGGTLDLTLIRARLQEKLSPPYSSPQEFAQDVGRMFKQFNKLTEDKADVQSIIGLQRFFETRMNEAFGDTKFSAVLVEPPPMSLPGAGLSSQELSGGPGDGP

SEQ ID NO: 13751 - protein, 61 aa, Homo sapiens
MRDSGSKAATDAQDANQCCTSCEDNAPATSYCVECSEPLCETCVEAHQRVKYTKDHTVRST

SEQ ID NO: 13752 - protein, 178 aa, Homo sapiens
MRDSGSKAATDAQDANQCCTSCEDNAPATSYCVECSEPLCETCVEAHQRVKYTKDHTVRSTGPAKSRDGERTVYCNVHKHEPLVLFCESCDTLTCRDCQLNAHKDHQYQFLEDAVRNQRKLLASLVKRLGDKHATLQKSTKEVRSSIRQVSDVQKRVQVDVKMAILQIMKELNKRGRV

SEQ ID NO: 13753 - protein, 162 aa, Homo sapiens
MRLGAQRPASVWSGGGAERGITLYKVVDCPVCKQQCFSKDIVENYFMRDSGSKAATDAQDANQCCTSCEDNAPATSYCVECSEPLCETCVEAHQRVKYTKDHTVRSTGPAKSRDGERTVYCNVHKHEPLVLFCESCDTLTCRDCQLNAHKDHQYQFLEDAVR

SEQ ID NO: 13754 - protein, 2546 aa, Homo sapiens
IKAPIEDLDLEGQKLLQRIQSSESFPKKNSGSGNADLQNLLPKVSTMLDRLHSTRQHLHQMWHVRKLKLDQCFQLRLFEQDAEKMFDWITHNKGLFLNSYTEIGTSHPHAMELQTQHNHFAMNCMNVYVNINRIMSVANRLVESGHYASQQIRQIASQLEQEWKAFAAALDERSTLLDMSSIFHQKAEKYMSNVDSWCKACGEVDLPSELQDLEDAIHHHQGIYEHITLAYSEVSQDGKSLLDKLQRPLTPGSSDSLTASANYSKAVHHVLDVIHEVLHHQRQLENIWQHRKVRLHQRLQLCVFQQDVQQVLDWIENHGEAFLSKHTGVGKSLHRARALQKRHEDFEEVAQNTYTNADKLLEAAEQLAQTGECDPEEIYQAAHQLEDRIQDFVRRVEQRKILLDMSVSFHTHVKELWTWLEELQKELLDDVYAESVEAVQDLIKRFGQQQQTTLQVTVNVIKEGEDLIQQLRDSAISSNKTPHNSSINHIETVLQQLDEAQSQMEELFQERKIKLELFLQLRIFERDAIDIISDLESWNDELSQQMNDFDTEDLTIAEQRLQHHADKALTMNNLTFDVIHQGQDLLQYVNEVQASGVELLCDRDVDMATRVQDLLEFLHEKQQELDLAAEQHRKHLEQCVQLRHLQAEVKQVLGWIRNGESMLNAGLITASSLQEAEQLQREHEQFQHAIEKTHQSALQVQQKAEAMLQANHYDMDMIRDCAEKVASHWQQLMLKMEDRLKLVNASVAFYKTSEQVCSVLESLEQEYKREEDWCGGADKLGPNSETDHVTPMISKHLEQKEAFLKACTLARRNADVFLKYLHRNSVNMPGMVTHIKAPEQQVKNILNELFQRENRVLHYWTMRKRRLDQCQQYVVFERSAKQALEWIHDNGEFYLSTHTSTGSSIQHTQELLKEHEEFQITAKQTKERVKLLIQLADGFCEKGHAHAAEIKKCVTAVDKRYRDFSLRMEKYRTSLEKALGISSDSNKSSKSLQLDIIPASIPGSEVKLRDAAHELNEEKRKSARRKEFIMAELIQTEKAYVRDLRECMDTYLWEMTSGVEEIPPGIVNKELIIFGNMQEIYEFHNNIFLKELEKYEQLPEDVGHCFVTWADKFQMYVTYCKNKPDSTQLILEHAGSYFDEIQQRHGLANSISSYLIKPVQRITKYQLLLKELLTCCEEGKGEIKDGLEVMLSVPKRANDAMHLSMLEGFDENIESQGELILQESFQVWDPKTLIRKGRERHLFLFEMSLVFSKEVKDSSGRSKYLYKSKLFTSELGVTEHVEGDPCKFALWVGRTPTSDNKIVLKASSIENKQDWIKHIREVIQERTIHLKGALKEPIHIPKTAPATRQKGRRDGEDLDSQGDGSSQPDTISIASRTSQNTLDSDKLSGGCELTVVIHDFTACNSNELTIRRGQTVEVLERPHDKPDWCLVRTTDRSPAAEGLVPCGSLCIAHSRSSMEMEGIFNHKDSLSVSSNDASPPASVASLQPHMIGAQSSPGPKRPGNTLRKWLTSPVRRLSSGKADGHVKKLAHKHKKSREVRKSADAGSQKDSDDSAATPQDETVEERGRNEGLSSGTLSKSSSSGMQSCGEEEGEEGADAVPLPPPMAIQQHSLLQPDSQDDKASSRLLVRPTSSETPSAAELVSAIEELVKSKMALEDRPSSLLVDQGDSSSPSFNPSDNSLLSSSSPIDEMEERKSSSLKRRHYVLQELVETERDYVRDLGYVVEGYMALMKEDGVPDDMKGKDKIVFGNIHQIYDWHRDFFLGELEKCLEDPEKLGSLFVKHERRLHMYIAYCQNKPKSEHIVSEYIDTFFEDLKQRLGHRLQLTDLLIKPVQRIMKYQLLLKDFLKYSKKASLDTSELERAVEVMCIVPRRCNDMMNVGRLQGFDGKIVAQGKLLLQDTFLVTDQDAGLLPRCRERRIFLFEQIVIFSEPLDKKKGFSMPGFLFKNSIKVSCLCLEENVENDPCKFALTSRTGDVVETFILHSSSPSVRQTWIHEINQILENQRNFLNALTSPIEYQRNHSGGGGGGGSGGSGGGGGSGGGGAPSGGSGHSGGPSSCGGAPSTSRSRPSRIPQPVRHHPPVLVSSAASSQAEADKMSGTSTPGPSLPPPGAAPEAGPSAPSRRPPGADAEGSEREAEPIPKMKVLESPRKGAANASGSSPDAPAKDARASLGTLPLGKPRAGAASPLNSPLSSAVPSLGKEPFPPSSPLQKGGSFWSSIPASPASRPGSFTFPGDSDSLQRQTPRHAAPGKDTDRMSTCSSASEQSVQSTQSNGSESSSSSNISTMLVTHDYTAVKEDEINVYQGEVVQILASNQQNMFLVFRAATDQCPAAEGWIPGFVLGHTSAVIVENPDGTLKKSTSWHTALRLRKKSEKKDKDGKREGKLENGYRKSREGLSNKVSVKLLNPNYIYDVPPEFVIPLSEVTCETGETVVLRCRVCGRPKASITWKGPEHNTLNNDGHYSISYSDLGEATLKIVGVTTEDDGIYTCIAVNDMGSASSSASLRVLGPGMDGIMVTWKDNFDSFYSEVAELGRANWNNWSPY

SEQ ID NO: 13755 - protein, 1508 aa, Homo sapiens
MAEGFRKNDEMKAMDVLPILKEKVAYLSGGRDKRGGPILTFPARSNHDRIRQEDLRRLISYLACIPSEEVCKRGFTVIVDMRGSKWDSIKPLLKILQESFPCCIHVALIIKPDNFWQKQRTNFGSSKFEFETNMVSLEGLTKVVDPSQLTPEFDGCLEYNHEEWIEIRVAFEDYISNATHMLSRLEELQDILAKKELPQDLEGARNMIEEHSQLKKKVIKAPIEDLDLEGQKLLQRIQSSESFPKKNSGSGNADLQNLLPKVSTMLDRLHSTRQHLHQMWHVRKLKLDQCFQLRLFEQDAEKMFDWITHNKGLFLNSYTEIGTSHPHAMELQTQHNHFAMNCMNVYVNINRIMSVANRLVESGHYASQQIRQIASQLEQEWKAFAAALDERSTLLDMSSIFHQKAEKYMSNVDSWCKACGEVDLPSELQDLEDAIHHHQGIYEHITLAYSEVSQDGKSLLDKLQRPLTPGSSDSLTASANYSKAVHHVLDVIHEVLHHQRQLENIWQHRKVRLHQRLQLCVFQQDVQQVLDWIENHGEAFLSKHTGVGKSLHRARALQKRHEDFEEVAQNTYTNADKLLEAAEQLAQTGECDPEEIYQAAHQLEDRIQDFVRRVEQRKILLDMSVSFHTHVKELWTWLEELQKELLDDVYAESVEAVQDLIKRFGQQQQTTLQVTVNVIKEGEDLIQQLRDSAISSNKTPHNSSINHIETVLQQLDEAQSQMEELFQERKIKLELFLQLRIFERDAIDIISDLESWNDELSQQMNDFDTEDLTIAEQRLQHHADKALTMNNLTFDVIHQGQDLLQYVNEVQASGVELLCDRDVDMATRVQDLLEFLHEKQQELDLAAEQHRKHLEQCVQLRHLQAEVKQVLGWIRNGESMLNAGLITASSLQEAEQLQREHEQFQHAIEKTHQSALQVQQKAEAMLQANHYDMDMIRDCAEKVASHWQQLMLKMEDRLKLVNASVAFYKTSEQVCSVLESLEQEYKREEDWCGGADKLGPNSETDHVTPMISKHLEQKEAFLKACTLARRNADVFLKYLHRNSVNMPGMVTHIKAPEQQVKNILNELFQRENRVLHYWTMRKRRLDQCQQYVVFERSAKQALEWIHDNGEFYLSTHTSTGSSIQHTQELLKEHEEFQITAKQTKERVKLLIQLADGFCEKGHAHAAEIKKCVTAVDKRYRDFSLRMEKYRTSLEKALGISSDSNKSSKSLQLDIIPASIPGSEVKLRDAAHELNEEKRKSARRKEFIMAELIQTEKAYVRDLRECMDTYLWEMTSGVEEIPPGIVNKELIIFGNMQEIYEFHNNIFLKELEKYEQLPEDVGHCFVTWADKFQMYVTYCKNKPDSTQLILEHAGSYFDEIQQRHGLANSISSYLIKPVQRITKYQLLLKELLTCCEEGKGEIKDGLEVMLSVPKRANDAMHLSMLEGFDENIESQGELILQESFQVWDPKTLIRKGRERHLFLFEMSLVFSKEVKDSSGRSKYLYKSKLFVSIGVQNCKSKGNTIAVFL

SEQ ID NO: 13756 - protein, 255 aa, Homo sapiens
MALEDRPSSLLVDQGDSSSPSFNPSDNSLLSSSSPIDEMEERKSSSLKRRHYVLQELVETERDYVRDLGYVVEGYMALMKEDGVPDDMKGKDKIVFGNIHQIYDWHRDFFLGELEKCLEDPEKLGSLFVKHERRLHMYIAYCQNKPKSEHIVSEYIDTFFEDLKQRLGHRLQLTDLLIKPVQRIMKYQLLLKDFLKYSKKASLDTSELERAVEVMCIVPRRCNDMMNVGRLQGFDGRVVALCHRFKETFREICWF

SEQ ID NO: 13757 - protein, 2309 aa, Homo sapiens
MKAMDVLPILKEKVAYLSGGRDKRGGPILTFPARSNHDRIRQEDLRRLISYLACIPSEEVCKRGFTVIVDMRGSKWDSIKPLLKILQESFPCCIHVALIIKPDNFWQKQRTNFGSSKFEFETNMVSLEGLTKVVDPSQLTPEFDGCLEYNHEEWIEIRVAFEDYISNATHMLSRLEELQDILAKKELPQDLEGARNMIEEHSQLKKKVIKAPIEDLDLEGQKLLQRIQSSESFPKKNSGSGNADLQNLLPKVSTMLDRLHSTRQHLHQMWHVRKLKLDQCFQLRLFEQDAEKMFDWITHNKGLFLNSYTEIGTSHPHAMELQTQHNHFAMNCMNVYVNINRIMSVANRLVESGHYASQQIRQIASQLEQEWKAFAAALDERSTLLDMSSIFHQKAEKYMSNVDSWCKACGEVDLPSELQDLEDAIHHHQGIYEHITLAYSEVSQDGKSLLDKLQRPLTPGSSDSLTASANYSKAVHHVLDVIHEVLHHQRQLENIWQHRKVRLHQRLQLCVFQQDVQQVLDWIENHGEAFLSKHTGVGKSLHRARALQKRHEDFEEVAQNTYTNADKLLEAAEQLAQTGECDPEEIYQAAHQLEDRIQDFVRRVEQRKILLDMSVSFHTHVKELWTWLEELQKELLDDVYAESVEAVQDLIKRFGQQQQTTLQVTVNVIKEGEDLIQQLRDSAISSNKTPHNSSINHIETVLQQLDEAQSQMEELFQERKIKLELFLQLRIFERDAIDIISDLESWNDELSQQMNDFDTEDLTIAEQRLQHHADKALTMNNLTFDVIHQGQDLLQYVNEVQASGVELLCDRDVDMATRVQDLLEFLHEKQQELDLAAEQHRKHLEQCVQLRHLQAEVKQVLGWIRNGESMLNAGLITASSLQEAEQLQREHEQFQHAIEKTHQSALQVQQKAEAMLQANHYDMDMIRDCAEKVASHWQQLMLKMEDRLKLVNASVAFYKTSEQVCSVLESLEQEYKREEDWCGGADKLGPNSETDHVTPMISKHLEQKEAFLKACTLARRNADVFLKYLHRNSVNMPGMVTHIKAPEQQVKNILNELFQRENRVLHYWTMRKRRLDQCQQYVVFERSAKQALEWIHDNGEFYLSTHTSTGSSIQHTQELLKEHEEFQITAKQTKERVKLLIQLADGFCEKGHAHAAEIKKCVTAVDKRYRDFSLRMEKYRTSLEKALGISSDSNKSSKSLQLDIIPASIPGSEVKLRDAAHELNEEKRKSARRKEFIMAELIQTEKAYVRDLRECMDTYLWEMTSGVEEIPPGIVNKELIIFGNMQEIYEFHNNIFLKELEKYEQLPEDVGHCFVTWADKFQMYVTYCKNKPDSTQLILEHAGSYFDEIQQRHGLANSISSYLIKPVQRITKYQLLLKELLTCCEEGKGEIKDGLEVMLSVPKRANDAMHLSMLEGFDENIESQGELILQESFQVWDPKTLIRKGRERHLFLFEMSLVFSKEVKDSSGRSKYLYKSKLFTSELGVTEHVEGDPCKFALWVGRTPTSDNKIVLKASSIENKQDWIKHIREVIQERTIHLKGALKEPIHIPKTAPATRQKGRRDGEDLDSQGDGSSQPDTISIASRTSQNTLDSDKLSGGCELTVVIHDFTACNSNELTIRRGQTVEVLERPHDKPDWCLVRTTDRSPAAEGLVPCGSLCIAHSRSSMEMEGIFNHKDSLSVSSNDASPPASVASLQPHMIGAQSSPGPKRPGNTLRKWLTSPVRRLSSGKADGHVKKLAHKHKKSREVRKSADAGSQKDSDDSAATPQDETVEERGRNEGLSSGTLSKSSSSGMQSCGEEEGEEGADAVPLPPPMAIQQHSLLQPDSQDDKASSRLLVRPTSSETPSAAELVSAIEELVKSKMALEDRPSSLLVDQGDSSSPSFNPSDNSLLSSSSPIDEMEERKSSSLKRRHYVLQELVETERDYVRDLGYVVEGYMALMKEDGVPDDMKGKDKIVFGNIHQIYDWHRDFFLGELEKCLEDPEKLGSLFVKHERRLHMYIAYCQNKPKSEHIVSEYIDTFFEDLKQRLGHRLQLTDLLIKPVQRIMKYQLLLKDFLKYSKKASLDTSELERAVEVMCIVPRRCNDMMNVGRLQGFDGKIVAQGKLLLQDTFLVTDQDAGLLPRCRERRIFLFEQIVIFSEPLDKKKGFSMPGFLFKNSIKVSCLCLEENVENDPCKFALTSRTGDVVETFILHSSSPSVRQTWIHEINQILENQRNFLNALTSPIEYQRNHSGGGGGGGSGGSGGGGGSGGGGAPSGGSGHSGGPSSCGGAPSTSRSRPSRIPQPVRHHPPVLVSSAASSQAEADKMSE

SEQ ID NO: 13758 - protein, 596 aa, Homo sapiens
MLPSQAQGLLWWVFPLFPASSLSYPPVSYRADGLARNTFLKACSESSSSSNISTMLVTHDYTAVKEDEINVYQGEVVQILASNQQNMFLVFRAATDQCPAAEGWIPGFVLGHTSAVIVENPDGTLKKSTSWHTALRLRKKSEKKDKDGKREGKLENGYRKSREGLSNKVSVKLLNPNYIYDVPPEFVIPLSEVTCETGETVVLRCRVCGRPKASITWKGPEHNTLNNDGHYSISYSDLGEATLKIVGVTTEDDGIYTCIAVNDMGSASSSASLRVLGPGMDGIMVTWKDNFDSFYSEVAELGRGRFSVVKKCDQKGTKRAVATKFVNKKLMKRDQVTHELGILQSLQHPLLVGLLDTFETPTSYILVLEMADQGRLLDCVVRWGSLTEGKIRAHLGEVLEAVRYLHNCRIAHLDLKPENILVDESLAKPTIKLADFGDAVQLNTTYYIHQLLGNPEFAAPEIILGNPVSLTSDTWSVGVLTYVLLSGVSPFLDDSVEETCLNICRLDFSFPDDYFKGVSQKAKEFVCFLLQEDPAKRPSAALALQEQWLQAGNGRSTGVLDTSRLTSFIERRKHQNDVRPIRSIKNFLQSRLLPRV

SEQ ID NO: 13759 - protein, 458 aa, Homo sapiens
MPNGLKPVDTLDSLSSVSSAYCSGGQPGTCKYWILDLDSLSVSSNDASPPASVASLQPHMIGAQSSPGPKRPGNTLRKWLTSPVRRLSSGKADGHVKKLAHKHKKSREVRKSADAGSQKDSDDSAATPQDETVEERGRNEGLSSGTLSKSSSSGMQSCGEEEGEEGADAVPLPPPMAIQQHSLLQPDSQDDKASSRLLVRPTSSETPSAAELVSAIEELVKSKMALEDRPSSLLVDQGDSSSPSFNPSDNSLLSSSSPIDEMEERKSSSLKRRHYVLQELVETERDYVRDLGYVVEGYMALMKEDGVPDDMKGKDKIVFGNIHQIYDWHRDFFLGELEKCLEDPEKLGSLFVKHERRLHMYIAYCQNKPKSEHIVSEYIDTFFEDLKQRLGHRLQLTDLLIKPVQRIMKYQLLLKDFLKYSKKASLDTSELERAVEVMCIVPRRCNDMMNVGRLQGFD

SEQ ID NO: 13760 - protein, 3097 aa, Homo sapiens
MSGSSGGAAAPAASSGPAAAASAAGSGCGGGAGEGAEEAAKDLADIAAFFRSGFRKNDEMKAMDVLPILKEKVAYLSGGRDKRGGPILTFPARSNHDRIRQEDLRRLISYLACIPSEEVCKRGFTVIVDMRGSKWDSIKPLLKILQESFPCCIHVALIIKPDNFWQKQRTNFGSSKFEFETNMVSLEGLTKVVDPSQLTPEFDGCLEYNHEEWIEIRVAFEDYISNATHMLSRLEELQDILAKKELPQDLEGARNMIEEHSQLKKKVIKAPIEDLDLEGQKLLQRIQSSESFPKKNSGSGNADLQNLLPKVSTMLDRLHSTRQHLHQMWHVRKLKLDQCFQLRLFEQDAEKMFDWITHNKGLFLNSYTEIGTSHPHAMELQTQHNHFAMNCMNVYVNINRIMSVANRLVESGHYASQQIRQIASQLEQEWKAFAAALDERSTLLDMSSIFHQKAEKYMSNVDSWCKACGEVDLPSELQDLEDAIHHHQGIYEHITLAYSEVSQDGKSLLDKLQRPLTPGSSDSLTASANYSKAVHHVLDVIHEVLHHQRQLENIWQHRKVRLHQRLQLCVFQQDVQQVLDWIENHGEAFLSKHTGVGKSLHRARALQKRHEDFEEVAQNTYTNADKLLEAAEQLAQTGECDPEEIYQAAHQLEDRIQDFVRRVEQRKILLDMSVSFHTHVKELWTWLEELQKELLDDVYAESVEAVQDLIKRFGQQQQTTLQVTVNVIKEGEDLIQQLRDSAISSNKTPHNSSINHIETVLQQLDEAQSQMEELFQERKIKLELFLQLRIFERDAIDIISDLESWNDELSQQMNDFDTEDLTIAEQRLQHHADKALTMNNLTFDVIHQGQDLLQYVNEVQASGVELLCDRDVDMATRVQDLLEFLHEKQQELDLAAEQHRKHLEQCVQLRHLQAEVKQVLGWIRNGESMLNAGLITASSLQEAEQLQREHEQFQHAIEKTHQSALQVQQKAEAMLQANHYDMDMIRDCAEKVASHWQQLMLKMEDRLKLVNASVAFYKTSEQVCSVLESLEQEYKREEDWCGGADKLGPNSETDHVTPMISKHLEQKEAFLKACTLARRNADVFLKYLHRNSVNMPGMVTHIKAPEQQVKNILNELFQRENRVLHYWTMRKRRLDQCQQYVVFERSAKQALEWIHDNGEFYLSTHTSTGSSIQHTQELLKEHEEFQITAKQTKERVKLLIQLADGFCEKGHAHAAEIKKCVTAVDKRYRDFSLRMEKYRTSLEKALGISSDSNKSSKSLQLDIIPASIPGSEVKLRDAAHELNEEKRKSARRKEFIMAELIQTEKAYVRDLRECMDTYLWEMTSGVEEIPPGIVNKELIIFGNMQEIYEFHNNIFLKELEKYEQLPEDVGHCFVTWADKFQMYVTYCKNKPDSTQLILEHAGSYFDEIQQRHGLANSISSYLIKPVQRITKYQLLLKELLTCCEEGKGEIKDGLEVMLSVPKRANDAMHLSMLEGFDENIESQGELILQESFQVWDPKTLIRKGRERHLFLFEMSLVFSKEVKDSSGRSKYLYKSKLFTSELGVTEHVEGDPCKFALWVGRTPTSDNKIVLKASSIENKQDWIKHIREVIQERTIHLKGALKEPIHIPKTAPATRQKGRRDGEDLDSQGDGSSQPDTISIASRTSQNTLDSDKLSGGCELTVVIHDFTACNSNELTIRRGQTVEVLERPHDKPDWCLVRTTDRSPAAEGLVPCGSLCIAHSRSSMEMEGIFNHKDSLSVSSNDASPPASVASLQPHMIGAQSSPGPKRPGNTLRKWLTSPVRRLSSGKADGHVKKLAHKHKKSREVRKSADAGSQKDSDDSAATPQDETVEERGRNEGLSSGTLSKSSSSGMQSCGEEEGEEGADAVPLPPPMAIQQHSLLQPDSQDDKASSRLLVRPTSSETPSAAELVSAIEELVKSKMALEDRPSSLLVDQGDSSSPSFNPSDNSLLSSSSPIDEMEERKSSSLKRRHYVLQELVETERDYVRDLGYVVEGYMALMKEDGVPDDMKGKDKIVFGNIHQIYDWHRDFFLGELEKCLEDPEKLGSLFVKHERRLHMYIAYCQNKPKSEHIVSEYIDTFFEDLKQRLGHRLQLTDLLIKPVQRIMKYQLLLKDFLKYSKKASLDTSELERAVEVMCIVPRRCNDMMNVGRLQGFDGKIVAQGKLLLQDTFLVTDQDAGLLPRCRERRIFLFEQIVIFSEPLDKKKGFSMPGFLFKNSIKVSCLCLEENVENDPCKFALTSRTGDVVETFILHSSSPSVRQTWIHEINQILENQRNFLNALTSPIEYQRNHSGGGGGGGSGGSGGGGGSGGGGAPSGGSGHSGGPSSCGGAPSTSRSRPSRIPQPVRHHPPVLVSSAASSQAEADKMSGTSTPGPSLPPPGAAPEAGPSAPSRRPPGADAEGSEREAEPIPKMKVLESPRKGAANASGSSPDAPAKDARASLGTLPLGKPRAGAASPLNSPLSSAVPSLGKEPFPPSSPLQKGGSFWSSIPASPASRPGSFTFPGDSDSLQRQTPRHAAPGKDTDRMSTCSSASEQSVQSTQSNGSESSSSSNISTMLVTHDYTAVKEDEINVYQGEVVQILASNQQNMFLVFRAATDQCPAAEGWIPGFVLGHTSAVIVENPDGTLKKSTSWHTALRLRKKSEKKDKDGKREGKLENGYRKSREGLSNKVSVKLLNPNYIYDVPPEFVIPLSEVTCETGETVVLRCRVCGRPKASITWKGPEHNTLNNDGHYSISYSDLGEATLKIVGVTTEDDGIYTCIAVNDMGSASSSASLRVLGPGMDGIMVTWKDNFDSFYSEVAELGRGRFSVVKKCDQKGTKRAVATKFVNKKLMKRDQVTHELGILQSLQHPLLVGLLDTFETPTSYILVLEMADQGRLLDCVVRWGSLTEGKIRAHLGEVLEAVRYLHNCRIAHLDLKPENILVDESLAKPTIKLADFGDAVQLNTTYYIHQLLGNPEFAAPEIILGNPVSLTSDTWSVGVLTYVLLSGVSPFLDDSVEETCLNICRLDFSFPDDYFKGVSQKAKEFVCFLLQEDPAKRPSAALALQEQWLQAGNGRSTGVLDTSRLTSFIERRKHQNDVRPIRSIKNFLQSRLLPRV

SEQ ID NO: 13761 - protein, 227 aa, Homo sapiens
MPGCRISACGPGAQEGTAEQRSPPPPWDPMPSSQPPPPTPTLTPTPTPGQSPPLPDAAGASAGAAEDQELQRWRQGASGIAGLAGPGGGSGAAAGAGGRALELAEARRRLLEVEGRRRLVSELESRVLQLHRVFLAAELRLAHRAESLSRLSGGVAQAELYLAAHGSRLKKGPRRGRRGRPPALLASALGLGGCVPWGAGRLRRGHGPEPDSPFRRSPPRGPASPQR

SEQ ID NO: 13762 - protein, 50 aa, Homo sapiens
  SITE 1: note = misc_feature - Xaa can be any naturally occurring amino acid
XGRPPALLASALGLGGCVPWGAGRLRRGHGPEPDSPFRRSPPRGPASPQR

SEQ ID NO: 13763 - protein, 156 aa, Homo sapiens
MRLRMELGAPEEMGQVPPLDSRPSSPALYFTHDASLVHKSPDPFGAVAAQKFSLAHSMLAISGHLDSDDDSGSGSLVGIDNKIEQAMDLVKSHLMFAVREEVEVLKEQIRELAERNAALEQENGLLRALASPEQLAQLPSSGVPRLGPPAPNGPSV

SEQ ID NO: 13764 - protein, 395 aa, Homo sapiens
MSGGKKKSSFQITSVTTDYEGPGSPGASDPPTPQPPTGPPPRLPNGEPSPDPGGKGTPRNGSPPPGAPSSRFRVVKLPHGLGEPYRRGRWTCVDVYERDLEPHSFGGLLEGIRGASGGAGGRSLDSRLELASLGLGAPTPPSGLSQGPTSWLRPPPTSPGPQARSFTGGLGQLVVPSKAKAEKPPLSASSPQQRPPEPETGESAGTSRAATPLPSLRVEAEAGGSGARTPPLSRRKAVDMRLRMELGAPEEMGQVPPLDSRPSSPALYFTHDASLVHKSPDPFGAVAAQKFSLAHSMLAISGHLDSDDDSGSGSLVGIDNKIEQAMDLVKSHLMFAVREEVEVLKEQIRELAERNAALEQENGLLRALASPEQLAQLPSSGVPRLGPPAPNGPSV

SEQ ID NO: 13765 - protein, 168 aa, Homo sapiens
  SITE 1: note = misc_feature - Xaa can be any naturally occurring amino acid
XHCLLSACLAPARPCSARGALSPPGIPFTASLSIGGVSKDPFPLGMAQPGVSVKSLVSSYETRVVGMAPGLPRKRGCASSPCSPRGASPIRGTSGPPPHRGLGGPGQRPSTRRGMDKTLLSLILYCHSGSGSLVGIDNKIEQAMPSRHWAGDEAPTPLTLCLSRGPQD

SEQ ID NO: 13766 - protein, 211 aa, Homo sapiens
  SITE 1: note = misc_feature - Xaa can be any naturally occurring amino acid
XLLSACLAPARPCSARGALSPPGIPFTASLSIGGVSKDPFPLGMAQPGVSVKSLVSSYETRVVGMAPGLPRKRGCASSPCSPRGASPIRGTSGPPPHRGLGGPGQRPSTRRGMDKTLLSLILYCHSGSGSLVGIDNKIEQAMDLVKSHLMFAVREEVEVLKEQIRELAERNAALEQENGLLRALASPEQLAQLPSSGVPRLGPPAPNGPSV

SEQ ID NO: 13767 - protein, 138 aa, Homo sapiens
MTALFLMSMLFGLTCGQAMSFCIPTEYTMHIERRECAYCLTINTTICAGYCMTRDINGKLFLPKYALSQDVCTYRDFIYRTVEIPGCPLHVAPYFSYPVALSCKCGKCNTDYSDCIHEAIKTNYCTKPQKSYLVGFSV

SEQ ID NO: 13768 - protein, 138 aa, Homo sapiens; identical to SEQ ID NO: 13767

SEQ ID NO: 13769 - protein, 231 aa, Homo sapiens
MRPADLLQLVLLLDLPRDLGGMGCSSPPCECHQEEDFRVTCKDIQRIPSLPPSTQTLKLIETHLRTIPSHAFSNLPNISRIYVSIDVTLQQLESHSFYNLSKVTHIEIRNTRNLTYIDPDALKELPLLKFLGIFNTGLKMFPDLTKVYSTDIFFILEITDNPYMTSIPVNAFQGLCNETLTLKLYNNGFTSVQGYAFNGTKLDAVYLNKNKYLTVIDKDAFGGVYSGPSLL

SEQ ID NO: 13770 - protein, 764 aa, Homo sapiens
MRPADLLQLVLLLDLPRDLGGMGCSSPPCECHQEEDFRVTCKDIQRIPSLPPSTQTLKLIETHLRTIPSHAFSNLPNISRIYVSIDVTLQQLESHSFYNLSKVTHIEIRNTRNLTYIDPDALKELPLLKFLGIFNTGLKMFPDLTKVYSTDIFFILEITDNPYMTSIPVNAFQGLCNETLTLKLYNNGFTSVQGYAFNGTKLDAVYLNKNKYLTVIDKDAFGGVYSGPSLLDVSQTSVTALPSKGLEHLKELIARNTWTLKKLPLSLSFLHLTRADLSYPSHCCAFKNQKKIRGILESLMCNESSMQSLRQRKSVNALNSPLHQEYEENLGDSIVGYKEKSKFQDTHNNAHYYVFFEEQEDEIIGFGQELKNPQEETLQAFDSHYDYTICGDSEDMVCTPKSDEFNPCEDIMGYKFLRIVVWFVSLLALLGNVFVLLILLTSHYKLNVPRFLMCNLAFADFCMGMYLLLIASVDLYTHSEYYNHAIDWQTGPGCNTAGFFTVFASELSVYTLTVITLERWYAITFAMRLDRKIRLRHACAIMVGGWVCCFLLALLPLVGISSYAKVSICLPMDTETPLALAYIVFVLTLNIVAFVIVCCCYVKIYITVRNPQYNPGDKDTKIAKRMAVLIFTDFICMAPISFYALSAILNKPLITVSNSKILLVLFYPLNSCANPFLYAIFTKAFQRDVFILLSKFGICKRQAQAYRGQRVPPKNSTDIQVQKVTHEMRQGLHNMEDVYELIENSHLTPKKQGQISEEYMQTVL

SEQ ID NO: 13771 - protein, 764 aa, Homo sapiens; identical to SEQ ID NO: 13770

SEQ ID NO: 13772 - protein, 253 aa, Homo sapiens
MRPADLLQLVLLLDLPRDLGGMGCSSPPCECHQEEDFRVTCKDIQRIPSLPPSTQTLKLIETHLRTIPSHAFSNLPNISRIYVSIDVTLQQLESHSFYNLSKVTHIEIRNTRNLTYIDPDALKELPLLKFLGIFNTGLKMFPDLTKVYSTDIFFILEITDNPYMTSIPVNAFQGLCNETLTLKLYNNGFTSVQGYAFNGTKLDAVYLNKNKYLTVIDKDAFGGVYSGPSLLLPLGRKSLSFETQKAPRSSMPS

SEQ ID NO: 13773 - protein, 274 aa, Homo sapiens
MRPADLLQLVLLLDLPRDLGGMGCSSPPCECHQEEDFRVTCKDIQRIPSLPPSTQTLKLIETHLRTIPSHAFSNLPNISRIYVSIDVTLQQLESHSFYNLSKVTHIEIRNTRNLTYIDPDALKELPLLKFLGIFNTGLKMFPDLTKVYSTDIFFILEITDNPYMTSIPVNAFQGLCNETLTLKLYNNGFTSVQGYAFNGTKLDAVYLNKNKYLTVIDKDAFGGVYSGPSLLVENVAVSGKGFCKSLFSWLYRLPLGRKSLSFETQKAPRSSMPS

SEQ ID NO: 13774 - protein, 112 aa, Homo sapiens
MRPADLLQLVLLLDLPRDLGGMGCSSPPCECHQEEDFRVTCKDIQRIPSLPPSTQTLKLIETHLRTIPSHAFSNLPNISRIYVSIDVTLQQLESHSFYNLSKVTHITDTDAL

SEQ ID NO: 13775 - protein, 89 aa, Homo sapiens
MRPADLLQLVLLLDLPRDLGGMGCSSPPCECHQEEDFRVTCKDIQRIPSLPPSTQTLYWRRERKKVWELEIKFNIEGDILNPSQEERKS

SEQ ID NO: 13776 - protein, 399 aa, Homo sapiens
  SITE 1: note = misc_feature - Xaa can be any naturally occurring amino acid
XGQELKNPQEETLQAFDSHYDYTICGDSEDMVCTPKSDEFNPCEDIMGYKFLRIVVWFVSLLALLGNVFVLLILLTSHYKLNVPRFLMCNLAFADFCMGMYLLLIASVDLYTHSEYYNHAIDWQTGPGCNTAGFFTVFASELSVYTLTVITLERWYAITFAMRLDRKIRLRHACAIMVGGWVCCFLLALLPLVGISSYAKVSICLPMDTETPLALAYIVFVLTLNIVAFVIVCCCYVKIYITVRNPQYNPGDKDTKIAKRMAVLIFTDFICMAPISFYALSAILNKPLITVSNSKILLVLFYPLNSCANPFLYAIFTKAFQRDVFILLSKFGICKRQAQAYRGQRVPPKNSTDIQVQKVTHEMRQGLHNMEDVYELIENSHLTPKKQGQISEEYMQTVL

SEQ ID NO: 13777 - protein, 105 aa, Homo sapiens
MPWPLLLLLAVSGAQTTRPCFPGCQCEVETFGLFDSFSLTRVDCSGLGPHIMPVPIPLDTAHLDLSSNRLEMVNESVLAGPGYTTLAGLDLSHNLLTSISPTAFS

SEQ ID NO: 13778 - protein, 150 aa, Homo sapiens
MPWPLLLLLAVSGAQTTRPCFPGCQCEVETFGLFDSFSLTRVDCSGLGPHIMPVPIPLDTAHLDLSSNRLEMVNESVLAGPGYTTLAGLDLSHNLLTSISPTAFSRLRYLESLDLSHNGLTALPAESFTSSPLSDVNLSHNQLREVSVSA

SEQ ID NO: 13779 - protein, 353 aa, Homo sapiens
MPWPLLLLLAVSGAQTTRPCFPGCQCEVETFGLFDSFSLTRVDCSGLGPHIMPVPIPLDTAHLDLSSNRLEMVNESVLAGPGYTTLAGLDLSHNLLTSISPTAFSRLRYLESLDLSHNGLTALPAESFTSSPLSDVNLSHNQLREVSVSAFTTHSQGRALHVDLSHNLIHRLVPHPTRAGLPAPTIQSLNLAWNRLHAVPNLRDLPLRYLSLDGNPLAVIGPGAFAGLGGLTHLSLASLQRLPELAPSGFRELPGLQVLDLSGNPKLNWAGAEVFSGLSSLQELDLSGTNLVPLPEALLLHLPALQSVSVGQDVRCRRLVREGTYPRRPGSSPKVALHCVDTRDSAARGPTIL

SEQ ID NO: 13780 - protein, 353 aa, Homo sapiens; identical to SEQ ID NO: 13779

SEQ ID NO: 13781 - protein, 353 aa, Homo sapiens; identical to SEQ ID NO: 13779

SEQ ID NO: 13782 - protein, 63 aa, Homo sapiens
MFAMKTKAALAIWCPGYSETQINATQAMKKRRKRKVTTNKCLEQVSQLQGLWRRFNRPLLKQQ

SEQ ID NO: 13783 - protein, 159 aa, Homo sapiens
MFPFALLYVLSVSFRKIFILQLVGLVLTYDFTNCDFEKIKAAYLSTISKDLITYMSGTKSTEFNNTVSCSNRPHCLTEIQSLTFNPTAGCASLAKEMFAMKTKAALAIWCPGYSETQINATQAMKKRRKRKVTTNKCLEQVSQLQGLWRRFNRPLLKQQ

SEQ ID NO: 13784 - protein, 159 aa, Homo sapiens
MKCLGQSKKEEVSFRKIFILQLVGLVLTYDFTNCDFEKIKAAYLSTISKDLITYMSGTKSTEFNNTVSCSNRPHCLTEIQSLTFNPTAGCASLAKEMFAMKTKAALAIWCPGYSETQINATQAMKKRRKRKVTTNKCLEQVSQLQGLWRRFNRPLLKQQ

SEQ ID NO: 13785 - protein, 189 aa, Homo sapiens
MGQCGITSSKTVLVFLNLIFWFVIILLLVFVTEVVVVVLGYVYRAKVENEVDRSIQKVYKTYNGTNPDAASRAIDYVQRQLHCCGIHNYSDWENTDWFKETKNQSVPLSCCRETASNCNGSLAHPSDLYAEGCEALVVKKLQEIMMHVIWAALAFAAIQLLGMLCACIVLCRRSRDPAYELLITGGTYA

SEQ ID NO: 13786 - protein, 253 aa, Homo sapiens
MGQCGITSSKTVLVFLNLIFWGAAGILCYVGAYVFITYDDYDHFFEDVYTLIPAVVIIAVGALLFIIGLIGCCATIRESRCGLATFVIILLLVFVTEVVVVVLGYVYRAKVENEVDRSIQKVYKTYNGTNPDAASRAIDYVQRQLHCCGIHNYSDWENTDWFKETKNQSVPLSCCRETASNCNGSLAHPSDLYAEGCEALVVKKLQEIMMHVIWAALAFAAIQLLGMLCACIVLCRRSRDPAYELLITGGTYA

SEQ ID NO: 13787 - protein, 228 aa, Homo sapiens
MGQCGITSSKTVLVFLNLIFWGAAGILCYVGAYVFITYDDYDHFFEDVYTLIPAVVIIAVGALLFIIGLIGCCATIRESRCGLATVENEVDRSIQKVYKTYNGTNPDAASRAIDYVQRQLHCCGIHNYSDWENTDWFKETKNQSVPLSCCRETASNCNGSLAHPSDLYAEGCEALVVKKLQEIMMHVIWAALAFAAIQLLGMLCACIVLCRRSRDPAYELLITGGTYA

SEQ ID NO: 13788 - protein, 164 aa, Homo sapiens
MGQCGITSSKTVLVFLNLIFWVENEVDRSIQKVYKTYNGTNPDAASRAIDYVQRQLHCCGIHNYSDWENTDWFKETKNQSVPLSCCRETASNCNGSLAHPSDLYAEGCEALVVKKLQEIMMHVIWAALAFAAIQLLGMLCACIVLCRRSRDPAYELLITGGTYA

SEQ ID NO: 13789 - protein, 45 aa, Homo sapiens
MMHVIWAALAFAAIQLLGMLCACIVLCRRSRDPAYELLITGGTYA

SEQ ID NO: 13790 - protein, 45 aa, Homo sapiens; identical to SEQ ID NO: 13789

SEQ ID NO: 13791 - protein, 72 aa, Homo sapiens
MIILGLVFIFQFVISCSCLAINRSKQTDVINASWWVMSNKTRDELERSFDCCGLFNLTTLYQQDYDFCTAIC

SEQ ID NO: 13792 - protein, 86 aa, Homo sapiens
MIILGLVFIFQFVISCSCLAINRSKQTDVINASWWVMSNKTRDELERSFDCCGLFNLTTLYQQDYDFCTAICKSQSPTCQMCGEKF

SEQ ID NO: 13793 - protein, 126 aa, Homo sapiens
MVCGGFACSKNALCALNVVYMLVSLLLIGVAAWGKGLGLVSSIHIIGGVIAVGVFLLLIAVAGLICKSQSPTCQMCGEKFLKHSDEALKILGGVGLFFSFTEILGVWLAMRFRNQKDPRANPSAFL

SEQ ID NO: 13794 - protein, 128 aa, Homo sapiens
MVCGGFACSKNALCALNVVYMLVSLLLIGVAAWGKGLGLVSSIHIIGGVIAVGVFLLLIAVAGLVGAVNHHQVLLFFYMIILGLVFIFQFVISCSCLAINRSKQIILRCTASGLLGYLLPLGCLVNFP

SEQ ID NO: 13795 - protein, 113 aa, Homo sapiens
MVCGGFACSKNALCALNVVYMLVSLLLIGVAAWGKGLGLVSSIHIIGGVIAVGVFLLLIAVAGLVGAVNHHQVLLFFYMIILGLVFIFQFVISCSCLAINRSKQMSSMLLGGS

SEQ ID NO: 13796 - protein, 210 aa, Homo sapiens
MVCGGFACSKNALCALNVVYMLVSLLLIGVAAWGKGLGLVSSIHIIGGVIAVGVFLLLIAVAGLVGAVNHHQVLLFFYMIILGLVFIFQFVISCSCLAINRSKQTDVINASWWVMSNKTRDELERSFDCCGLFNLTTLYQQDYDFCTAICKSQSPTCQMCGEKFLKHSDEALKILGGVGLFFSFTEILGVWLAMRFRNQKDPRANPSAFL

SEQ ID NO: 13797 - protein, 127 aa, Homo sapiens
MVCGGFACSKNALCALNVVYMTDVINASWWVMSNKTRDELERSFDCCGLFNLTTLYQQDYDFCTAICKSQSPTCQMCGEKFLKHSDEALKILGGVGLFFSFTEILGVWLAMRFRNQKDPRANPSAFL

SEQ ID NO: 13798 - protein, 38 aa, Homo sapiens
MSALLSLCFVLPLAAPGHGTQGWEPCTACSSLKAWAEC

SEQ ID NO: 13799 - protein, 669 aa, Homo sapiens
MSALLSLCFVLPLAAPGHGTQGWEPCTDLRPLDILAEVVPSDGATSGIRIVQVHGARGLQLSVAAPRTMSFPASRIFSQCDLFPEEFSIVVTLRVPNLPPKRNEYLLTVVAEESDLLLLGLRLSPAQLHFLFLREDTAGAWQTRVSFRSPALVDGRWHTLVLAVSAGVFSLTTDCGLPVDIMADVPFPATLSVKGARFFVGSRRRAKGLFMGLVRQLVLLPGSDATPRLCPSRNAPLAVLSIPRVLQALTGKPEDNEVLKYPYETNIRVTLGPQPPCTEVEDAQFWFDASRKGLYLCVGNEWVSVLAAKERLDYVEEHQNLSTNSETLGIEVFRIPQVGLFVATANRKATSAVYKWTEEKFVSYQNIPTHQAQAWRHFTIGKKIFLAVANFEPDEKGQEFSVIYKWSHRKLKFTPYQSIATHSARDWEAFEVDGEHFLAVANHREGDNHNIDSVIYKWNPATRLFEANQTIATSGAYDWEFFSVGPYSFLVVANTFNGTSTKVHSHLYIRLLGSFQLFQSFPTFGAADWEVFQIGERIFLAVANSHSYDVEMQVQNDSYVINSVIYELNVTAQAFVKFQDILTCSALDWEFFSVGEDYFLVVANSFDGRTFSVNSIIYRWQGYEGFVAVHSLPTVGCRDWEAFSTTAGAYLIYSSAKEPLSRVLRLRTR

SEQ ID NO: 13800 - protein, 669 aa, Homo sapiens; identical to SEQ ID NO: 13799

SEQ ID NO: 13801 - protein, 601 aa, Homo sapiens
MSFPASRIFSQCDLFPEEFSIVVTLRVPNLPPKRNEYLLTVVAEESDLLLLGLRLSPAQLHFLFLREDTAGAWQTRVSFRSPALVDGRWHTLVLAVSAGVFSLTTDCGLPVDIMADVPFPATLSVKGARFFVGSRRRAKGLFMGLVRQLVLLPGSDATPRLCPSRNAPLAVLSIPRVLQALTGKPEDNEVLKYPYETNIRVTLGPQPPCTEVEDAQFWFDASRKGLYLCVGNEWVSVLAAKERLDYVEEHQNLSTNSETLGIEVFRIPQVGLFVATANRKATSAVYKWTEEKFVSYQNIPTHQAQAWRHFTIGKKIFLAVANFEPDEKGQEFSVIYKWSHRKLKFTPYQSIATHSARDWEAFEVDGEHFLAVANHREGDNHNIDSVIYKWNPATRLFEANQTIATSGAYDWEFFSVGPYSFLVVANTFNGTSTKVHSHLYIRLLGSFQLFQSFPTFGAADWEVFQIGERIFLAVANSHSYDVEMQVQNDSYVINSVIYELNVTAQAFVKFQDILTCSALDWEFFSVGEDYFLVVANSFDGRTFSVNSIIYRWQGYEGFVAVHSLPTVGCRDWEAFSTTAGAYLIYSSAKEPLSRVLRLRTR

SEQ ID NO: 13802 - protein, 123 aa, Homo sapiens
DIAVKWRRIADPDQPVLWLDQMPARSLSRGFNNHINLIRGQVINMRYLEYFEKILHFIKDRILVYHGANNPKGLLEVREALEKVHKVEDLLPIMKVTLASEWQSMFLEEKKTNSTFLKRTQNY

SEQ ID NO: 13803 - protein, 166 aa, Homo sapiens
MAPAGCCCCCCFWGGAVAAAGAARRVLLLLLLGVLSAGLRPGALATEHYSPLSLLKQELQHRQQQEAPAGGGGCSPQSGDWGDQYSAECGAIAYVLIGSGLYDEAIRHFSTMLQILSPLGRINEAVNDLTKAIQLQPSARLYRHRGTLYFISEDYATAHEDFQQSL

SEQ ID NO: 13804 - protein, 860 aa, Homo sapiens
MAPAGCCCCCCFWGGAVAAAGAARRVLLLLLLGVLSAGLRPGALATEHYSPLSLLKQELQHRQQQEAPAGGGGCSPQSGDWGDQYSAECGESSFLNFHDSDCEPKGSSPCDSLLSLNTEKILSQAKSIAEQKRFPFATDNDSTNEELAIAYVLIGSGLYDEAIRHFSTMLQEEPDLVSAIYGRGIAYGKKGLHDIKNAELALFELSRVITLEPDRPEVFEQRAEILSPLGRINEAVNDLTKAIQLQPSARLYRHRGTLYFISEDYATAHEDFQQSLELNKNQPIAMLYKGLTFFHRGLLKEAIESFKEALKQKVDFIDAYKSLGQAYRELGNFEAATESFQKALLLNQNHVQTLQLRGMMLYHHGSLQEALKNFKRCLQLEPYNEVCQYMKGLSHVAMGQFYEGIKAQTKVMLNDPLPGQKASPEYLKVKYLREYSRYLHAHLDTPLTEYNIDVDLPGSFKDHWAKNLPFLIEDYEEQPGLQPHIKDVLHQNFESYKPEVQELICVADRLGSLMQYETPGFLPNKRIHRAMGLAALEVMQAVQRTWTNSKVRMNGKTRLMQWRDMFDIAVKWRRIADPDQPVLWLDQMPARSLSRGFNNHINLIRGQVINMRYLEYFEKILHFIKDRILVYHGANNPKGLLEVREALEKVHKVEDLLPIMKQFNTKTKDGFTVNTKVPSLKDQGKEYDGFTITITGDKVGNILFSVETQTTEERTQLYHAEIDALYKDLTAKGKVLILSSEFGEADAVCNLILSLVYYFYNLMPLSRGSSVIAYSVIVGALMASGKEVAGKIPKGKLVDFEAMTAPGSEAFSKVAKSWMNLKSISPSYKTLPSVSETFPTLRSMIEVLNTDSSPRCLKKL

SEQ ID NO: 13805 - protein, 806 aa, Homo sapiens
MAPAGCCCCCCFWGGAVAAAGAARRVLLLLLLGVLSAGLRPGALATEHYSPLSLLKQELQHRQQQEAPAGGGGCSPQSGDWGDQYSAECGESSFLNFHDSDCEPKGSSPCDSLLSLNTEKILSQAKSIAEQKRFPFATDNDSTNEELAIAYVLIGSGLYDEAIRHFSTMLQILSPLGRINEAVNDLTKAIQLQPSARLYRHRGTLYFISEDYATAHEDFQQSLELNKNQPIAMLYKGLTFFHRGLLKEAIESFKEALKQKVDFIDAYKSLGQAYRELGNFEAATESFQKALLLNQNHVQTLQLRGMMLYHHGSLQEALKNFKRCLQLEPYNEVCQYMKGLSHVAMGQFYEGIKAQTKVMLNDPLPGQKASPEYLKVKYLREYSRYLHAHLDTPLTEYNIDVDLPGSFKDHWAKNLPFLIEDYEEQPGLQPHIKDVLHQNFESYKPEVQELICVADRLGSLMQYETPGFLPNKRIHRAMGLAALEVMQAVQRTWTNSKVRMNGKTRLMQWRDMFDIAVKWRRIADPDQPVLWLDQMPARSLSRGFNNHINLIRGQVINMRYLEYFEKILHFIKDRILVYHGANNPKGLLEVREALEKVHKVEDLLPIMKFNTKTKDGFTVNTKVPSLKDQGKEYDGFTITITGDKVGNILFSVETQTTEERTQLYHAEIDALYKDLTAKGKVLILSSEFGEADAVCNLILSLVYYFYNLMPLSRGSSVIAYSVIVGALMASGKEVAGKIPKGKLVDFEAMTAPGSEAFSKVAKSWMNLKSISPSYKTLPSVSETFPTLRSMIEVLNTDSSPRCLKKL

SEQ ID NO: 13806 - protein, 255 aa, Homo sapiens
MAPAGCCCCCCFWGGAVAAAGAARRVLLLLLLGVLSAGLRPGALATEHYSPLSLLKQELQHRQQQEAPAGGGGCSPQSGDWGDQYSAECGESSFLNFHDSDCEPKGSSPCDSLLSLNTEKILSQAKSIAEQKRFPFATDNDSTNEELAIAYVLIGSGLYDEAIRHFSTMLQILSPLGRINEAVNDLTKAIQLQPSARLYRHRGTLYFISENEVESCAVIRQEPRNQRLLKAEEKSDFEELWRPSMLKLLNPSKKL

SEQ ID NO: 13807 - protein, 150 aa, Homo sapiens
MAPAGCCCCCCFWGGAVAAAGAARRVLLLLLLGVLSAGLRPGALATEHYSPLSLLKQELQHRQQQEAPAGGGGCSPQSGDWGDQYSAECGESSFLNFHDSDCEPKGSSPCDSLLSLNTEKILSQAKSIAEQKRFPFATDNDSTNEELDIY

SEQ ID NO: 13808 - protein, 186 aa, Homo sapiens
  SITE 1: note = misc_feature - Xaa can be any naturally occurring amino acid
XWGGAVAAAGAARRVLLLLLLGVLSAGLRPGALATEHYSPLSLLKQELQHRQQQEAPAGGGGCSPQSGDWGDQYSAECGESSFLNFHDSDCEPKGSSPCDSLLSLNTEKILSQAKSIAEQKRFPFATDNDSTNEELAIAYVLIGSGLYDEAIRHFSTMLQEAIESFKEALKQKVDFIDAYKSLGQA

SEQ ID NO: 13809 - protein, 149 aa, Homo sapiens
GRGGSMFRLLSWSLGRGFLRAAGRRCRGCSARLLPGLAGGPGPEVQVPPSRVAPHGRGPGLLPLLAALAWFSRPAAAEEEEQQGADGAAAEDGADEAEAEIIQLLKRAKLSIMKDEPEEAELILHDALRLAYQTDNKKAITYTYDLINW

SEQ ID NO: 13810 - protein, 380 aa, Homo sapiens
MFRLLSWSLGRGFLRAAGRRCRGCSARLLPGLAGGPGPEVQVPPSRVAPHGRGPGLLPLLAALAWFSRPAAAEEEEQQGADGAAAEDGADEAEAEIIQLLKRAKLSIMKDEPEEAELILHDALRLAYQTDNKKAITYTYDLMANLAFIRGQLENAEQLFKATMSYLLGGGMKQEDNAIIEISLKLASIYAAQNRQEFAVAGYEFCISTLEEKIEREKELAEDIMSVEEKANTHLLLGMCLDACARYLLFSKQPSQAQRMYEKALQISEEIQGERHPQTIVLMSDLATTLDAQGRFDEAYIYMQRASDLARQINHPELHMVLSNLAAVLMHRERYTQAKEIYQEALKQAKLKKDEISVQHIREELAELSKKSRPLTNSVKL

SEQ ID NO: 13811 - protein, 99 aa, Homo sapiens
SKQPSQAQRMYEKALQISEEIQGERHPQTIVLMSDLATTLDAQGRFDEAYIYMQRASDLARQINHPELHMVLSNLAAVLMHRAATTVLGPSKEAKATLG

SEQ ID NO: 13812 - protein, 63 aa, Homo sapiens
  SITE 1: note = misc_feature - Xaa can be any naturally occurring amino acid
XGERHPQTIVLMSDLATTLDAQGRFDEAYIYMQRASDLARQINHPELHMVLSNLAAVLMHRGR

SEQ ID NO: 13813 - protein, 166 aa, Homo sapiens
  SITE 1: note = misc_feature - Xaa can be any naturally occurring amino acid
XQERVWPAVRRGRGGSMFRLLSWSLGRGFLRAAGRRCRGCSARLLPGLAGGPGPEVQVPPSRVAPHGRGPGLLPLLAALAWFSRPAAAEEEEQQGADGAAAEDGADEAEAEIIQLLKRAKVRRLRALRPAERGSLCERGLGVAAHYSLRLAEEWMEAPRVKLPRMS

SEQ ID NO: 13814 - protein, 172 aa, Homo sapiens
  SITE 1: note = misc_feature - Xaa can be any naturally occurring amino acid
XRRVVGGQERVWPAVRRGRGGSMFRLLSWSLGRGFLRAAGRRCRGCSARLLPGLAGGPGPEVQVPPSRVAPHGRGPGLLPLLAALAWFSRPAAAEEEEQQGADGAAAEDGADEAEAEIIQLLKRAKVRRLRALRPAERGSLCERGLGVAAHYSLRLAEEWMEAPRVKLPRMS

SEQ ID NO: 13815 - protein, 239 aa, Homo sapiens
MQRGALSPVLMLSAAPEPPPRPPPALSPPGSGPGSGSRHGSARPGPTPEPSGSLGAALDSSLRAAVAFKAEGQRCYREKKFREAIGKYHRALLQLKAAQGARPSGLPAPAPGPTSSPGPARLSEEQRRLVESTEVECYDSLTACLLQSELVNYERVREYCLKVLEKQQGNFKATYRAGIAFYHLGDYARALRYLQEARSREPTDTNVLRYIQLTQLKMNRCSLQREDSGAGSQTRDVIG

SEQ ID NO: 13816 - protein, 800 aa, Homo sapiens
MAAAASVTGRVTWAASPMRSLGLGRRLSLPGPRLDAVTAAVNPSLSDHGNGLGRGTRGSGCSGGSLVADWGGGAAAAAAVALALAPALSTMRRGSSESELAARWEAEAVAAAKAAAKAEAEATAETVAEQVRVDAGAAGEPECKAGEEQPKVLAPAPAQPSAAEEGNTQVLQRPPPTLPPSKPKPVQGLCPHGKPRDKGRSCKRSSGHGSGENGSQRPVTVDSSKARTSLDALKISIRQLKWKEFPFGRRLPCDIYWHGVSFHDNDIFSGQVNKFPGMTEMVRKITLSRAVRTMQNLFPEEYNFYPRSWILPDEFQLFVAQVQMVKDDDPSWKPTFIVKPDGGCQGDGIYLIKDPSDIRLAGTLQSRPAVVQEYICKPLLIDKLKFDIRLYVLLKSLDPLEIYIAKDGLSRFCTEPYQEPTPKNLHRIFMHLTNYSLNIHSGNFIHSDSASTGSKRTFSSILCRLSSKGVDIKKVWSDIISVVIKTVIALTPELKVFYQSDIPTGRPGPTCFQILGFDILLMKNLKPILLEVNANPSMRIEHEHELSPGVFENVPSLVDEEVKVAVIRDTLRLMDPLKKKRENQSQQLEKPFAGKEDALDGELTSAPDCNANPEAHLPSICLKQVFPKYAKQFNYLRLVDRMANLFIRFLGIKGTMKLGPTGFRTFIRSCKLSSSSLSMAAVDILYIDITRRWNSMTLDQRDSGMCLQAFVEAFFFLAQRKFKMLPLHEQVASLIDLCEYHLSLLDEKRLVCGRGVPSGGRPPHRGPPQEPSPSAQPAGDNPPPRTSCANKLSHPRHTLS

SEQ ID NO: 13817 - protein, 538 aa, Homo sapiens
MAAAASVTGRVTWAASPMRSLGLGRRLSLPGPRLDAVTAAVNPSLSDHGNGLGRGTRGSGCSGGSLVADWGGGAAAAAAVALALAPALSTMRRGSSESELAARWEAEAVAAAKAAAKAEAEATAETVAEQVRVDAGAAGEPECKAGEEQPKVLAPAPAQPSAAEEGNTQVLQRPPPTLPPSKPKPVQGLCPHGKPRDKGRSCKRSSGHGSGENGSQRPVTVDSSKARTSLDALKISIRQLKWKEFPFGRRLPCDIYWHGVSFHDNDIFSGQVNKFPGMTEMVRKITLSRAVRTMQNLFPEEYNFYPRSWILPDEFQLFVAQVQMVKDDDPSWKPTFIVKPDGGCQGDGIYLIKDPSDIRLAGTLQSRPAVVQEYICKPLLIDKLKFDIRLYVLLKSLDPLEIYIAKDGLSRFCTEPYQEPTPKNLHRIFMHLTNYSLNIHSGNFIHSDSASTGSKRTFSSILCRLSSKGVDIKKVWSDIISVVIKTVIALTPELKVFYQSDIPTGRPGPTCFQVTIASSQPAFPALTGLKRALWLRVG

SEQ ID NO: 13818 - protein, 239 aa, Homo sapiens
  SITE 1: note = misc_feature - Xaa can be any naturally occurring amino acid
XSDHGNGLGRGTRGSGCSGGSLVADWGGGAAAAAAVALALAPALSTMRRGSSESELAARWEAEAVAAAKAAAKAEAEATAETVAEQVRVDAGAAGEPECKAGEEQPKVLAPAPAQPSAAEEGNTQVLQRPPPTLPPSKPKPVQGLCPHGKPRDKGRSCKRSSGHGSGENGSQRPVTVDSSKARTSLDALKISIRQLKWKEFPFGRRLPCDIYWHGVSFHDNDIFSGQVNKFPGSNGERR

SEQ ID NO: 13819 - protein, 122 aa, Homo sapiens
  SITE 1: note = misc_feature - Xaa can be any naturally occurring amino acid
XSSGHGSGENGSQRPVTVDSSKARTSLDALKISIRQLKWKEFPFGRRLPCDIYWHGVSFHDNDIFSGQVNKFPGMTEMVRKITLSRAVRTMQNLFPEESTSANLSLSTSSSLIFVCMSYSSP

SEQ ID NO: 13820 - protein, 66 aa, Homo sapiens
  SITE 1: note = misc_feature - Xaa can be any naturally occurring amino acid
XVTVDSSKARTSLDALKISIRQLKWKEFPFGRRLPCDIYWHGVSFHDNDIFSGQVNKFPGSNGERR

SEQ ID NO: 13821 - protein, 185 aa, Homo sapiens
MASHRLLLLCLAGLVFVSEAGPTGTGESKCPLMVKVLDAVRGSPAINVAVHVFRKAADDTWEPFASGKTSESGELHGLTTEEEFVEGIYKVEIDTKSYWKALGISPFHEHAEVSIQTFESFETDGCHGNRIQTCSSWSELQTSGFHQNVDVVFTANDSGPRRYTIAALLSPYSYSTTAVVTNPKE

SEQ ID NO: 13822 - protein, 147 aa, Homo sapiens
MASHRLLLLCLAGLVFVSEAGPTGTGESKCPLMVKVLDAVRGSPAINVAVHVFRKAADDTWEPFASGKTSESGELHGLTTEEEFVEGIYKVEIDTKSYWKALGISPFHEHAEVVFTANDSGPRRYTIAALLSPYSYSTTAVVTNPKE

SEQ ID NO: 13823 - protein, 139 aa, Homo sapiens
MASHRLLLLCLAGLVFVSEAGPTGTGESKCPLMVKVLDAVRGSPAINVAVHVFRKAADDTWEPFASGKTSESGELHGLTTEEEFVEGIYKVEIDTKSYWKALGISPFHEHAEVVFTANDSGPRRYYSYSTTAVVTNPKE

SEQ ID NO: 13824 - protein, 75 aa, Homo sapiens
MKLHYVAVLTLAILMFLTWLPESLSCNKALCASDVSKCLIQELCQCRPGEGNCSCCKECMLCLGALWDECCDCVD

SEQ ID NO: 13825 - protein, 223 aa, Homo sapiens
MKLHYVAVLTLAILMFLTWLPESLSCNKALCASDVSKCLIQELCQCRPGEGNCSCCKECMLCLGALWDECCDCVGMCNPRNYSDTPPTSKSTVEELHEPIPSLFRALTEGDTQLNWNIVSFPVAEELSHHENLVSFLETVNQPHHQNVSVPSNNVHAPYSSDKEHMCTVVYFDDCMSIHQCKISCESMGASKYRWFHNACCECIGPECIDYGSKTVKCMNCMF

SEQ ID NO: 13826 - protein, 184 aa, Homo sapiens
MKLHYVAVLTLAILMFLTWLPESLSCNKALCASDVSKCLIQELCQCRPGEGNCSCCKECMLCLGALWDECCDCVGMCNPRNYSDTPPTSKSTVEELHEPIPSLFRALTEGDTQLNWNIVSFPVAEELSHHENLVSFLETVNQPHHQNVSVPSNNVHAPYSSDKGNCQQLTFSIPPPHVVCPCNL

SEQ ID NO: 13827 - protein, 56 aa, Homo sapiens
METRPRLGATCLLGFSFLLLVISSDGHNGLGKGFGDHIHWRTLEDGKKEAAARIHV

SEQ ID NO: 13828 - protein, 55 aa, Homo sapiens
METRPRLGATCLLGFSFLLLVISSDGHNGLGKGFGDHIHWRTLEDGKKEAAARPY

SEQ ID NO: 13829 - protein, 172 aa, Homo sapiens
METRPRLGATCLLGFSFLLLVISSDGHNGLGKGFGDHIHWRTLEDGKKEAAASGLPLMVIIHKSWCGACKALKPKFAESTEISELSHNFVMVNLEDEEEPKDEDFSPDGGYIPRILFLDPSGKVHPEIINENGNPSYKYFYVSAEQVVQGMKEAQERLTGDAFRKKHLEDEL

SEQ ID NO: 13830 - protein, 179 aa, Homo sapiens
MKNRRETRETPGNPQLAVAEESGRLWSEEQPAHPLQVGAVYLGEEELLHDPMGQDRAAEEANAVLGLDTQGDHMVMLSVIPGEAEDKVSSEPSGVTCGAGGAEDSRCNVRESLFSLDGAGAHFPDREEEYYTEPEVAESDAAPTEDSNNTESLKSPKVNCEERNITGLENFTLKILNMS

SEQ ID NO: 13831 - protein, 44 aa, Homo sapiens
MVPAAGRRPPRVMRLLGWCCRGKWSLMVRGAACSPSPGGGCVPG

SEQ ID NO: 13832 - protein, 155 aa, Homo sapiens
MVPAAGRRPPRVMRLLGWWQVLLWVLGLPVRGVEEESGRLWSEEQPAHPLQVGAVYLGEEELLHDPMGQDRAAEEANAVLGLDTQGDHMVMLSVIPGEAEDKVSSEPSGVTCGAGGAEDSRCNVRESLFSLDGAGAHFPDREEEYYTEPEVAESD

SEQ ID NO: 13833 - protein, 44 aa, Homo sapiens
MVPAAGRRPPRVMRLLGWWQVLLWVLGLPVRGVEGPYGFSEPKR

SEQ ID NO: 13834 - protein, 360 aa, Homo sapiens
MVPAAGRRPPRVMRLLGWWQVLLWVLGLPVRGVEVAEESGRLWSEEQPAHPLQVGAVYLGEEELLHDPMGQDRAAEEANAVLGLDTQGDHMVMLSVIPGEAEDKVSSEPSGVTCGAGGAEDSRCNVRESLFSLDGAGAHFPDREEEYYTEPEVAESDAAPTEDSNNTESLKSPKVNCEERNITGLENFTLKILNMSQDLMDFLNPNGSDCTLVLFYTPWCRFSASLAPHFNSLPRAFPALHFLALDASQHSSLSTRFGTVAVPNILLFQGAKPMARFNHTDRTLETLKIFIFNQTGIEAKKNVVVTQADQIGPLPSTLIKSVDWLLVFSLFFLISFIMYATIRTESIRWLIPGQEQEHVE

SEQ ID NO: 13835 - protein, 344 aa, Homo sapiens
  SITE 1: note = misc_feature - Xaa can be any naturally occurring amino acid
XFPGVSWMEAGQQRVVEKVAEESGRLWSEEQPAHPLQVGAVYLGEEELLHDPMGQDRAAEEANAVLGLDTQGDHMVMLSVIPGEAEDKVSSEPSGVTCGAGGAEDSRCNVRESLFSLDGAGAHFPDREEEYYTEPEVAESDAAPTEDSNNTESLKSPKVNCEERNITGLENFTLKILNMSQDLMDFLNPNGSDCTLVLFYTPWCRFSASLAPHFNSLPRAFPALHFLALDASQHSSLSTRFGTVAVPNILLFQGAKPMARFNHTDRTLETLKIFIFNQTGIEAKKNVVVTQADQIGPLPSTLIKSVDWLLVFSLFFLISFIMYATIRTESIRWLIPGQEQEHVE

SEQ ID NO: 13836 - protein, 115 aa, Homo sapiens
  SITE 1: note = misc_feature - Xaa can be any naturally occurring amino acid
XLALDASQHSRFGTVAVPNILLFQGAKPMARFNHTDRTLETLKIFIFNQTGIEAKKNVVVTQADQIGPLPSTLIKSVDWLLVFSLFFLISFIMYATIRTESIRWLIPGQEQEHVE

SEQ ID NO: 13837 - protein, 324 aa, Homo sapiens
MEDAKVYVAKVDCTAHSDVCSAQGVRGYPTLKLFKPGQEAVKYQGPRDFQTLENWMLQTLNEEPVTPEPEVEPPSAPELKQGLYELSASNFELHVAQGDHFIKFFAPWCGHCKALAPTWEQLALGLEHSETVKIGKVDCTQHYELCSGNQVRGYPTLLWFRDGKKVDQYKGKRDLESLREYVESQLQRTETGATETVTPSEAPVLAAEPEADKGTVLALTENNFDDTIAEGITFIKFYAPWCGHCKTLAPTWEELSKKEFPGLAGVKIAEVDCTAERNICSKYSVRGYPTLLLFRGGKKVSEHSGGRDLDSLHRFVLSQAKDEL

SEQ ID NO: 13838 - protein, 432 aa, Homo sapiens
MPARPGRLLPLLARPAALTALLLLLLGHGGGGRWGARAQEAAAAAADGPPAADGEDGQDPHSKHLYTADMFTHGIQSAAHFVMFFAPWCGHCQRLQPTWNDLGDKYNSMEDAKVYVAKVDCTAHSDVCSAQGVRGYPTLKLFKPGQEAVKYQGPRDFQTLENWMLQTLNEEPVTPEPEVEPPSAPELKQGLYELSASNFELHVAQGDHFIKFFAPWCGHCKALAPTWEQLALGLEHSETVKIGKVDCTQHYELCSGNQVRGYPTLLWFRDGKKVDQYKGKRDLESLREYVESQLQRTETGATETVTPSEAPVLAAEPEADKGTVLALTENNFDDTIAEGITFIKFYAPWCGHCKTLAPTWEELSKKEFPGLAGVKIAEVDCTAERNICSKYSVRGYPTLLLFRGGKKVSEHSGGRDLDSLHRFVLSQAKDEL

SEQ ID NO: 13839 - protein, 500 aa, Homo sapiens
MAAMAVALRGLGGRFRWRTQAVAGGVRGAARGAAAAQLGRKVAVVDYVEPSPQGTRWGLGGTCVNVGCIPKKLMHQAALLGGLIQDAPNYGWEVAQPVPHDWRKMAEAVQNHVKSLNWGHRVQLQDRKVKYFNIKASFVDEHTVCGVAKGGKEILLSADHIIIATGGRPRYPTHIEGALEYGITSDDIFWLKESPGKTLVVGASYVALECAGFLTGIGLDTTIMMRSIPLRGFDQQMSSMVIEHMASHGTRFLRGCAPSRVRRLPDGQLQVTWEDSTTGKEDTGTFDTVLWAIGRVPDTRSLNLEKAGVDTSPDTQKILVDSREATSVPHIYAIGDVVEGRPELTPIAIMAGRLLVQRLFGGSSDLMDYDNVPTTVFTPLEYGCVGLSEEEAVARHGQEHVEVYHAHYKPLEFTVAGRDASQCYVKMVCLREPPQLVLGLHFLGPNAGEVTQGFALGIKCGASYAQVMRTVGIHPTCSEEVVKLRISKRSGLDPTVTGCG

SEQ ID NO: 13840 - protein, 338 aa, Homo sapiens
MAAMAVALRGLGGRFRWRTQAVAGGVRGAARGAAAGQRDYDLLVVGGGSGGLACAKEAAQLGRKVAVVDYVEPSPQGTRWGLGGTCVNVGCIPKKLMHQAALLGGLIQDAPNYGWEVAQPVPHDWRKMAEAVQNHVKSLNWGHRVQLQDRKVKYFNIKASFVDEHTVCGVAKGGKEILLSADHIIIATGGRPRYPTHIEGALEYGITSDDIFWLKESPGKTLVVGASYVALECAGFLTGIGLDTTIMMRSIPLRGFDQQMSSMVIEHMASHGTRFLRGCAPSRVRRLPDGQLQVTWEDSTTGKEDTGTFDTVLWAIAPCISACLPTTVGHAGKNQRRD

SEQ ID NO: 13841 - protein, 523 aa, Homo sapiens
MAAMAVALRGLGGRFRWRTQAVAGGVRGAARGAAAGQRDYDLLVVGGGSGGLACAKEAAQLGRKVAVVDYVEPSPQGTRWGLGGTCVNVGCIPKKLMHQAALLGGLIQDAPNYGWEVAQPVPHDWRKMAEAVQNHVKSLNWGHRVQLQDRKVKYFNIKASFVDEHTVCGVAKGGKEILLSADHIIIATGGRPRYPTHIEGALEYGITSDDIFWLKESPGKTLVVGASYVALECAGFLTGIGLDTTIMMRSIPLRGFDQQMSSMVIEHMASHGTRFLRGCAPSRVRRLPDGQLQVTWEDSTTGKEDTGTFDTVLWAIGRVPDTRSLNLEKAGVDTSPDTQKILVDSREATSVPHIYAIGDVVEGRPELTPIAIMAGRLLVQRLFGGSSDLMDYDNVPTTVFTPLEYGCVGLSEEEAVARHGQEHVEVYHAHYKPLEFTVAGRDASQCYVKMVCLREPPQLVLGLHFLGPNAGEVTQGFALGIKCGASYAQVMRTVGIHPTCSEEVVKLRISKRSGLDPTVTGCG

SEQ ID NO: 13842 - protein, 463 aa, Homo sapiens
MAAMAVALRGLGGRFRWRTQAVAGGVRGAARGAAAGQRDYDLLVVGGGSGGLACAKEGTRWGLGGTCVNVGCIPKKLMHQAALLGGLIQDAPNYGWEVAQPVPHDWRKMAEAVQNHVKSLNWGHRVQLQDRKVKYFNIKASFVDEHTVCGVAKGGKEILLSADHIIIATGGRPRYPTHIEGALEYGITSDDIFWLKESPGKTLVVGASYVALECAGFLTGIGLDTTIMMRSIPLRGFDQQMSSMVIEHMASHGTRFLRGCAPSRVRRLPDGQLQVTWEDSTTGKEDTGTFDTVLWAIGRVPDTRSLNLEKAGVDTSPDTQKILVDSREATSVPHIYAIGDVVEGRPELTPIAIMAGRLLVQRLFGGSSDLMDYDNVPTTVFTPLEYGCVGLSEEEAVARHGQEHVEVYHAHYKPLEFTVAGRDASQCYVKMVCLREPPQLVLGLHFLGPNAGEVTQGFALGIK

SEQ ID NO: 13843 - protein, 522 aa, Homo sapiens
MAAMAVALRGLGGRFRWRTQAVAGGVRGAARGAAGQRDYDLLVVGGGSGGLACAKEAAQLGRKVAVVDYVEPSPQGTRWGLGGTCVNVGCIPKKLMHQAALLGGLIQDAPNYGWEVAQPVPHDWRKMAEAVQNHVKSLNWGHRVQLQDRKVKYFNIKASFVDEHTVCGVAKGGKEILLSADHIIIATGGRPRYPTHIEGALEYGITSDDIFWLKESPGKTLVVGASYVALECAGFLTGIGLDTTIMMRSIPLRGFDQQMSSMVIEHMASHGTRFLRGCAPSRVRRLPDGQLQVTWEDSTTGKEDTGTFDTVLWAIGRVPDTRSLNLEKAGVDTSPDTQKILVDSREATSVPHIYAIGDVVEGRPELTPIAIMAGRLLVQRLFGGSSDLMDYDNVPTTVFTPLEYGCVGLSEEEAVARHGQEHVEVYHAHYKPLEFTVAGRDASQCYVKMVCLREPPQLVLGLHFLGPNAGEVTQGFALGIKCGASYAQVMRTVGIHPTCSEEVVKLRISKRSGLDPTVTGCG

SEQ ID NO: 13844 - protein, 306 aa, Homo sapiens
MEAGQRDYDLLVVGGGSGGLACAKEAAQLGRKVAVVDYVEPSPQGTRWGLGGTCVNVGCIPKKLMHQAALLGGLIQDAPNYGWEVAQPVPHDWRKMAEAVQNHVKSLNWGHRVQLQDRKVKYFNIKASFVDEHTVCGVAKGGKEILLSADHIIIATGGRPRYPTHIEGALEYGITSDDIFWLKESPGKTLVVGASYVALECAGFLTGIGLDTTIMMRSIPLRGFDQQMSSMVIEHMASHGTRFLRGCAPSRVRRLPDGQLQVTWEDSTTGKEDTGTFDTVLWAIAPCISACLPTTVGHAGKNQRRD

SEQ ID NO: 13845 - protein, 493 aa, Homo sapiens
MEDQAGQRDYDLLVVGGGSGGLACAKEAAQLGRKVAVVDYVEPSPQGTRWGLGGTCVNVGCIPKKLMHQAALLGGLIQDAPNYGWEVAQPVPHDWRKMAEAVQNHVKSLNWGHRVQLQDRKVKYFNIKASFVDEHTVCGVAKGGKEILLSADHIIIATGGRPRYPTHIEGALEYGITSDDIFWLKESPGKTLVVGASYVALECAGFLTGIGLDTTIMMRSIPLRGFDQQMSSMVIEHMASHGTRFLRGCAPSRVRRLPDGQLQVTWEDSTTGKEDTGTFDTVLWAIGRVPDTRSLNLEKAGVDTSPDTQKILVDSREATSVPHIYAIGDVVEGRPELTPIAIMAGRLLVQRLFGGSSDLMDYDNVPTTVFTPLEYGCVGLSEEEAVARHGQEHVEVYHAHYKPLEFTVAGRDASQCYVKMVCLREPPQLVLGLHFLGPNAGEVTQGFALGIKCGASYAQVMRTVGIHPTCSEEVVKLRISKRSGLDPTVTGCG

SEQ ID NO: 13846 - protein, 427 aa, Homo sapiens
MHQAALLGGLIQDAPNYGWEVAQPVPHDWRKMAEAVQNHVKSLNWGHRVQLQDRKVKYFNIKASFVDEHTVCGVAKGGKEILLSADHIIIATGGRPRYPTHIEGALEYGITSDDIFWLKESPGKTLVVGASYVALECAGFLTGIGLDTTIMMRSIPLRGFDQQMSSMVIEHMASHGTRFLRGCAPSRVRRLPDGQLQVTWEDSTTGKEDTGTFDTVLWAIGRVPDTRSLNLEKAGVDTSPDTQKILVDSREATSVPHIYAIGDVVEGRPELTPIAIMAGRLLVQRLFGGSSDLMDYDNVPTTVFTPLEYGCVGLSEEEAVARHGQEHVEVYHAHYKPLEFTVAGRDASQCYVKMVCLREPPQLVLGLHFLGPNAGEVTQGFALGIKCGASYAQVMRTVGIHPTCSEEVVKLRISKRSGLDPTVTGCG

SEQ ID NO: 13847 - protein, 164 aa, Homo sapiens
MKTGRPELTPIAIMAGRLLVQRLFGGSSDLMDYDNVPTTVFTPLEYGCVGLSEEEAVARHGQEHVEVYHAHYKPLEFTVAGRDASQCYVKMVCLREPPQLVLGLHFLGPNAGEVTQGFALGIKCGASYAQVMRTVGIHPTCSEEVVKLRISKRSGLDPTVTGCG

SEQ ID NO: 13848 - protein, 179 aa, Homo sapiens
MKTVAGALLSLVMGQPSEGRPELTPIAIMAGRLLVQRLFGGSSDLMDYDNVPTTVFTPLEYGCVGLSEEEAVARHGQEHVEVYHAHYKPLEFTVAGRDASQCYVKMVCLREPPQLVLGLHFLGPNAGEVTQGFALGIKCGASYAQVMRTVGIHPTCSEEVVKLRISKRSGLDPTVTGCG

SEQ ID NO: 13849 - protein, 211 aa, Homo sapiens
MPLRRTSSRGNAGRPELTPIAIMAGRLLVQRLFGGSSDLMDYDNVPTTVFTPLEYGCVGLSEEEAVARHGQEHVEVYHAHYKPLEFTVAGRDASQCYVKMVCLREPPQLVLGLHFLGPNAGEVTQGFALGIKCGASYAQVMRTVGIHPTCSEEVVKLRISKRSGLDPTVTGCGMAAGQVWGASTLSWSACEMVSVERKCWTGGPCAPQGWL

SEQ ID NO: 13850 - protein, 361 aa, Homo sapiens
QQMSSMVIEHMASHGTRFLRGCAPSRVRRLPDGQLQVTWEDSTTGKEDTGTFDTVLWAIGRVPDTRSLNLEKAGVDTSPDTQKILVDSREATSVPHIYAIGDVVEGRPELTPIAIMAGRLLVQRLFGGSSDLMDYDNVPTTVFTPLEYGCVGLSEEEAVARHGQEHVEVYHAHYKPLEFTVAGRDASQCYVKMVCLREPPQLVLGLHFLGPNAGEVTQGFALGIKCGASYAQVMRTVGIHPTCSEEVVKLRISKRSGLDPTVTGCGMAAGQVWGASTLSWSACEMVSVERKCWTGGPCAPQGWLRGLSTSPLHLSASAAGHPPPGSWCQMMTTWVETYPVGTHVRAPWHFCNANKEGTFSE

SEQ ID NO: 13851 - protein, 171 aa, Homo sapiens
  SITE 1: note = misc_feature - Xaa can be any naturally occurring amino acid
XGVAKGGKEILLSADHIIIATGGRPRYPTHIEGALEYGITSDDIFWLKESPGKTLVVGASYVALECAGFLTGIGLDTTIMMRSIPLRGFDQQMSSMVIEHMASHGTRFLRGCAPSRVRRLPDGQLQVTWEDSTTGKEDTGTFDTVLWAIGLPHPAGCQAGWPLPSAPREQP

SEQ ID NO: 13852 - protein, 247 aa, Homo sapiens
MAQVPPPASGERHAGTEDGPIRRNPAGNVARPMVQRLPEPQDVAQCLEVGLFDTPPFYSNSTNSFRNTVEGYSDPTGKYDPAVRSLHNLAHLFLNGTGGQTHLSPNDPIFVLLHTFTDAVFDEWLRRYNADISTFPLENAPIGHNRQYNMVPFWPPVTNTEMFVTAPDNLGYTYEIQWPSREFSVPEIIAIAVVGALLLVALIFGTASYLIRARRSMDEANQPLLTDQYQCYAEEYEKLQNPNQSVV

SEQ ID NO: 13853 - protein, 102 aa, Homo sapiens
MSAPKLLSLGCIFFPLLLFQQARAQFPRQCATVEALRSGMCCPDLSPVSGPGTDRCGSSSGRGRCEAVTADSRPHSPQYPHDGRDDREVWPLRFFNRTCHCN

SEQ ID NO: 13854 - protein, 537 aa, Homo sapiens
MSAPKLLSLGCIFFPLLLFQQARAQFPRQCATVEALRSGMCCPDLSPVSGPGTDRCGSSSGRGRCEAVTADSRPHSPQYPHDGRDDREVWPLRFFNRTCHCNGNFSGHNCGTCRPGWRGAACDQRVLIVRRNLLDLSKEEKNHFVRALDMAKRTTHPLFVIATRRSEEILGPDGNTPQFENISIYNYFVWTHYYSVKKTFLGVGQESFGEVDFSHEGPAFLTWHRYHLLRLEKDMQEMLQEPSFSLPYWNFATGKNVCDICTDDLMGSRSNFDSTLISPNSVFSQWRVVCDSLEDYDTLGTLCNSTEDGPIRRNPAGNVARPMVQRLPEPQDVAQCLEVGLFDTPPFYSNSTNSFRNTVEGYSDPTGKYDPAVRSLHNLAHLFLNGTGGQTHLSPNDPIFVLLHTFTDAVFDEWLRRYNADISTFPLENAPIGHNRQYNMVPFWPPVTNTEMFVTAPDNLGYTYEIQWPSREFSVPEIIAIAVVGALLLVALIFGTASYLIRARRSMDEANQPLLTDQYQCYAEEYEKLQNPNQSVV

SEQ ID NO: 13855 - protein, 43 aa, Homo sapiens
GGMINWNRLFPPLRQRQNVNYQGGRQSEPAAPPLEVSEEQTNE

SEQ ID NO: 13856 - protein, 309 aa, Homo sapiens
MCFFFSLQEEFLDKHTLMRVLSSGGKLGSRGEGAQLCCWMLLFSWRVSGGQQTRRLCRRAFCWSPVPSPSCSPSSCLTARSSLCMTFTQSRTTSSLAPVFALFVPFYCSIPRVQVAQILGPLSITNKTLIYILGLQLFTSGSYIWIVAISGLMSGLCYDSKMFQVHQVLCIPSWMAKFFSWTLEPIFSSSEPTSEARIGMGATLDIQRQQRMELLDRQLMFSQFAQGRRQRQQQGGMINWNRLFPPLRQRQNVNYQGGRQSEPAAPPLEVSEEQVARLMEMGFSRGDALEALRASNNDLNVATNFLLQH

SEQ ID NO: 13857 - protein, 344 aa, Homo sapiens
MFTSTGSSGLYKAPLSKSLLLVPSALSLLLALLLPHCQKLFVYDLHAVKNDFQIWRLICGRIICLDLKDTFCSSLLIYNFRIFERRYGSRKFASFLLGSWVLSALFDFLLIEAMQYFFGITAASNLPSGFLAPVFALFVPFYCSIPRVQVAQILGPLSITNKTLIYILGLQLFTSGSYIWIVAISGLMSGLCYDSKMFQVHQVLCIPSWMAKFFSWTLEPIFSSSEPTSEARIGMGATLDIQRQQRMELLDRQLMFSQFAQGRRQRQQQGGMINWNRLFPPLRQRQNVNYQGGRQSEPAAPPLEVSEEQVARLMEMGFSRGDALEALRASNNDLNVATNFLLQH

SEQ ID NO: 13858 - protein, 204 aa, Homo sapiens
MFTSTGSSGLYKAPLSKSLLLVPSALSLLLALLLPHCQKLFVYDLHAVKNDFQMSGLCYDSKMFQVHQVLCIPSWMAKFFSWTLEPIFSSSEPTSEARIGMGATLDIQRQQRMELLDRQLMFSQFAQGRRQRQQQGGMINWNRLFPPLRQRQNVNYQGGRQSEPAAPPLEVSEEQVARLMEMGFSRGDALEALRASNNDLNVAT

SEQ ID NO: 13859 - protein, 135 aa, Homo sapiens
MGTKPRRPPRPHLVSPDKAPLSKSLLLVPSALSLLLALLLPHCQKLFVYDLHAVKNDFQIWRLICGRIICLDLKDTFCSSLLIYNFRIFERRYGSRKFASFLLGSWVLSALFDFLLIEAMQYFFGITAASNLPSG

SEQ ID NO: 13860 - protein, 212 aa, Homo sapiens
MKLLTLQPPGMLWLMERGGLGKPRGPRHRGLLRVRLGRFISRLLLWEPLGGGQAWGSGEGTQSLPRMGQPRISPWEAVGAPPGRGAHPISPLFPSQMCTPANTPATPPNFPDALTMFSRLKASESFHSGGSGSPMAATATSPPPHFPHAATSSSAASSWPTAASPPGGPQHHQPQPPLWTPTPPSPASDWPPLAPQQATSEPRAHPAMEAER

SEQ ID NO: 13861 - protein, 52 aa, Homo sapiens
MMCTPANTPATPPNFPDALTMFSRLKASESFHSGGSGSPMAATATSPPPHFP

SEQ ID NO: 13862 - protein, 117 aa, Homo sapiens
MMCTPANTPATPPNFPDALTMFSRLKASESFHSGGSGSPMAATATSPPPHFPHAATSSSAASSWPTAASPPGGPQHHQPQPPLWTPTPPSPASDWPPLAPQQATSEPRAHPAMEAER

SEQ ID NO: 13863 - protein, 67 aa, Homo sapiens
MSVNMDELKHQRCCSLQRKGLWETPGLFPPPPSACLLGLPACLPCTWGYPHPLPFPLLTKEKNEFQT

SEQ ID NO: 13864 - protein, 156 aa, Homo sapiens
MSVNMDELKHQVMINQFVLTAGCAADQAKQLLQAAHWQFEMCTPANTPATPPNFPDALTMFSRLKASESFHSGGSGSPMAATATSPPPHFPHAATSSSAASSWPTAASPPGGPQHHQPQPPLWTPTPPSPASDWPPLAPQQATSEPRAHPAMEAER

SEQ ID NO: 13865 - protein, 94 aa, Homo sapiens
MSVNMDELKHQVMINQFVLTAGCAADQAKQLLQAAHWQFESSQGHPQPQRSLGTRAAAGPAGAWRVSRGLSSCRQPSAPFSRRPTSPTATITTR

SEQ ID NO: 13866 - protein, 152 aa, Homo sapiens
MSVNMDELKHQVMINQFVLTAGCAADQAKQLLQAAHWQFETALSAFFQETNIPYSHHHHQMASESFHSGGSGSPMAATATSPPPHFPHAATSSSAASSWPTAASPPGGPQHHQPQPPLWTPTPPSPASDWPPLAPQQATSEPRAHPAMEAER

SEQ ID NO: 13867 - protein, 177 aa, Homo sapiens
MSVNMDELKHQVMINQFVLTAGCAADQAKQLLQAAHWQFETALSAFFQETNIPYSHHHHQMMCTPANTPATPPNFPDALTMFSRLKASESFHSGGSGSPMAATATSPPPHFPHAATSSSAASSWPTAASPPGGPQHHQPQPPLWTPTPPSPASDWPPLAPQQATSEPRAHPAMEAER

SEQ ID NO: 13868 - protein, 122 aa, Homo sapiens
MSVNMDELKHQVMINQFVLTAGCAADQAKQLLQAAHWQFEVRGAGAGRGPGPRAECVPRGRRAGADGVDACRLCAPSGPQTRPAFPTAVPGVRIPRARGGRRQPSAPFSRRPTSPTATITTR

SEQ ID NO: 13869 - protein, 117 aa, Homo sapiens
HNRIPYQSPVSSSESAPGTIMNGHGGGRSQQTLDTPKTTGPPSALPSVSSLPSTTSCTALLPSTSQHTGDLTSSPLSQLSSMPVWRAPLPTSPQPPSPRQRPPSQVPHPQAPACPVA

SEQ ID NO: 13870 - protein, 412 aa, Homo sapiens
MMTSVSSDHCRGAREKPQISAAQSTQPQKQVVQATAEQMRLAQVIFDKNDSDFEAKVKQLMEVTGKNQDECIVALHDCNGDVNKAINILLEGNSDTTSWETVGCKKKNFAKENSENKENREKKSEKESSRGRGNNNRKGRGGNRGREFRGEENGIDCNQVDKPSDRGKRARGRELASNTHNIAQDLSNKSSYGLKGAWKNSVEEWTTEDWTEDLSETKVFTASSAPAENHILPGQSIDLVALLQKPVPHSQASEANSFETSQQQGFGQALVFTNSQHNNQMAPGTGSSTAVNSCSPQSLSSVLGSGFGELAPPKMANITSSQILDQLKAPSLGQFTTTPSTQQNSTSHPTTTTSWDLKPPTSQSSVLSHLDFKSQPEPSPVLSQLSQRQQHQSQAVTVPPPGLESFPSQAKL

SEQ ID NO: 13871 - protein, 1119 aa, Homo sapiens
MMTSVSSDHCRGAREKPQISAAQSTQPQKQVVQATAEQMRLAQVIFDKNDSDFEAKVKQLMEVTGKNQDECIVALHDCNGDVNKAINILLEGNSDTTSWETVGCKKKNFAKENSENKENREKKSEKESSRGRGNNNRKGRGGNRGREFRGEENGIDCNQVDKPSDRGKRARGRGFGRGRGRGAGRFSTQGMGTFNPADYSDSTSTDVCGTKLVVWEAAQNGADEGTELASNTHNIAQDLSNKSSYGLKGAWKNSVEEWTTEDWTEDLSETKVFTASSAPAENHILPGQSIDLVALLQKPVPHSQASEANSFETSQQQGFGQALVFTNSQHNNQMAPGTGSSTAVNSCSPQSLSSVLGSGFGELAPPKMANITSSQILDQLKAPSLGQFTTTPSTQQNSTSHPTTTTSWDLKPPTSQSSVLSHLDFKSQPEPSPVLSQLSQRQQHQSQAVTVPPPGLESFPSQAKLRESTPGDSPSTVNKLLQLPSTTIENISVSVHQPQPKHIKLAKRRIPPASKIPASAVEMPGSADVTGLNVQFGALEFGSEPSLSEFGSAPSSENSNQIPISLYSKSLSEPLNTSLSMTSAVQNSTYTTSVITSCSLTSSSLNSASPVAMSSSYDQSSVHNRIPYQSPVSSSESAPGTIMNGHGGGRSQQTLDTPKTTGPPSALPSVSSLPSTTSCTALLPSTSQHTGDLTSSPLSQLSSSLSSHQSSLSAHAALSSSTSHTHASVESASSHQSSATFSTAATSVSSSASSGASLSSSMNTANSLCLGGTPASASSSSSRAAPLVTSGKAPPNLPQGVPPLLHNQYLVGPGGLLPAYPIYGYDELQMLQSRLPVDYYGIPFAAPTALASRDGSLANNPYPGDVTKFGRGDSASPAPATTPAQPQQSQSQTHHTAQQPFVNPALPPGYSYTGLPYYTGMPSAFQYGPTMFVPPASAKQHGVNLSTPTPPFQQASGYGQHGYSTGYDDLTQGTAAGDYSKGGYAGSSQAPNKSAGSGPGKGVSVSSSTTGLPDMTGSVYNKTQTFDKQGFHAGTPPPFSLPSVLGSTGPLASGAAPGYAPPPFLHILPAHQQPHSQLLHHHLPQDAQSGSGQRSQPSSLQPKSQASKPAYGNSPYWTN

SEQ ID NO: 13872 - protein, 1119 aa, Homo sapiens; identical to SEQ ID NO: 13871

SEQ ID NO: 13873 - protein, 358 aa, Homo sapiens
MNTANSLCLGGTPASASSSSSRAAPLVTSGKAPPNLPQGVPPLLHNQYLVGPGGLLPAYPIYGYDELQMLQSRLPVDYYGIPFAAPTALASRDGSLANNPYPGDVTKFGRGDSASPAPATTPAQPQQSQSQTHHTAQQPFVNPALPPGYSYTGLPYYTGMPSAFQYGPTMFVPPASAKQHGVNLSTPTPPFQQASGYGQHGYSTGYDDLTQGTAAGDYSKGGYAGSSQAPNKSAGSGPGKGVSVSSSTTGLPDMTGSVYNKTQTFDKQGFHAGTPPPFSLPSVLGSTGPLASGAAPGYAPPPFLHILPAHQQPHSQLLHHHLPQDAQSGSGQRSQPSSLQPKSQASKPAYGNSPYWTN

SEQ ID NO: 13874 - protein, 176 aa, Homo sapiens
MRLAQVIFDKNDSDFEAKVKQLMEVTGKNQDECIVALHDCNGDVNKAINILLEGNSDTTSWETVGCKKKNFAKENSENKENREKKSEKESSRGRGNNNRKGRGGNRGREFRGEENGIDCNQVDKPSDRGKRARGRELASNTHNIAQDLSNKSSYGLKGAWKNSVEEWTTEDWTEDH

SEQ ID NO: 13875 - protein, 278 aa, Homo sapiens
  SITE 1: note = misc_feature - Xaa can be any naturally occurring amino acid
XEKESSRGRGNNNRKGRGGNRGREFRGEENGIDCNQVDKPSDRGKRARGRGFGRGRGRGAGRFSTQGMGTFNPADYSDSTSTDVCGTKLVVWEAAQNGADEGTGAWKNSVEEWTTEDWTEDLSETKVFTASSAPAENHILPGQSIDLVALLQKPVPHSQASEANSFETSQQQGFGQALVFTNSQHNNQMAPGTGSSTAVNSCSPQSLSSVLGSGFGELAPPKMANITSSQILDQLKAPSLGQFTTTPSTQQNSTSHPTTTTSWDLKPPTSQSSVLSHL

SEQ ID NO: 13876 - protein, 270 aa, Homo sapiens
MASRGVVGIFFLSAVPLVCLELRRGIPDIGIKDFLLLCGRILLLLALLTLTISVTTSWLNSFKSPQVYLKEEEEKNEKRQKLVRKKQQEAQGEKASRYIENVLKPHQEMKLRKLEERFYQMTGEAWKLSSGHKLGGDEGTSQTSFETSNREAAKSQNLPKPLTEFPSPAEQPTCKEIPDLPEEPSQTAEEVVTVALRCPSGNVLRRRFLKSYSSQVLFDWMTRIGYHISLYSLSTSFPRRPLAVEGGQSLEDIGITVDTVLILEEKEQTN

SEQ ID NO: 13877 - protein, 229 aa, Homo sapiens
MASRGVVGIFFLSAVPLVCLELRRGIPDIGIKDFLLLCGRILLLLALLTLTISVTTSWLNSFKSPQVYLKEEEEKNEKRQKLVRKKQQEAQGEKGDEGTSQTSFETSNREAAKSQNLPKPLTEFPSPAEQPTCKEIPDLPEEPSQTAEEVVTVALRCPSGNVLRRRFLKSYSSQVLFDWMTRIGYHISLYSLSTSFPRRPLAVEGGQSLEDIGITVDTVLILEEKEQTN

SEQ ID NO: 13878 - protein, 42 aa, Homo sapiens
MASRGVVGIFFLSAVPLVCLELRRGIPDIGKCDFFPSTVTAG

SEQ ID NO: 13879 - protein, 233 aa, Homo sapiens
MASRGVVGIFFLSAVPLVCLELRRGIPDIVYLKEEEEKNEKRQKLVRKKQQEAQGEKASRYIENVLKPHQEMKLRKLEERFYQMTGEAWKLSSGHKLGGDEGTSQTSFETSNREAAKSQNLPKPLTEFPSPAEQPTCKEIPDLPEEPSQTAEEVVTVALRCPSGNVLRRRFLKSYSSQVLFDWMTRIGYHISLYSLSTSFPRRPLAVEGGQSLEDIGITVDTVLILEEKEQTN

SEQ ID NO: 13880 - protein, 248 aa, Homo sapiens
MCQREKRWQLGVLTQTVGPWPRPVAYLSKQLDGVFKGWPPCLRALAATALLVQEADKLTLGQNRNIKAPHAVVTLMNTKGHHWLMSARLTKYQSLLCENPRITIEVCNTLNPATLFPVSESPVEHDCVEVLDSVYSSRPDLRDQPWASVDWELYVDGSSFINPQGERFAGYAVVTLDTVVEARSLPQGTSAQKAELIALIRALELSEGIKDFLLLCGRILLLLALLTLTISVTTSWLNSFKSPQVYLK

SEQ ID NO: 13881 - protein, 310 aa, Homo sapiens
MLYSGTWRTVGIRCPRKKAQICQQQECCIERPPLRLRGFGAALTTTPRLHRPCPPTSGADFTSRNLFPPGIKDFLLLCGRILLLLALLTLTISVTTSWLNSFKSPQVYLKEEEEKNEKRQKLVRKKQQEAQGEKASRYIENVLKPHQEMKLRKLEERFYQMTGEAWKLSSGHKLGGDEGTSQTSFETSNREAAKSQNLPKPLTEFPSPAEQPTCKEIPDLPEEPSQTAEEVVTVALRCPSGNVLRRRFLKSYSSQVLFDWMTRIGYHISLYSLSTSFPRRPLAVEGGQSLEDIGITVDTVLILEEKEQTN

SEQ ID NO: 13882 - protein, 94 aa, Homo sapiens
  SITE 1: note = misc_feature - Xaa can be any naturally occurring amino acid
XIKDFLLLCGRILLLLALLTLTISVTTSWLNSFKSPQVYLKEEEEKNEKRQKLVRKKQQEAQGEKASRYIENVLKPHQEMKLRKLEERFYQMTG

SEQ ID NO: 13883 - protein, 138 aa, Homo sapiens
MTWRQAVLLSCFSAVVLLSMLREGTSVSVGTMQMAGEEASEDAKQKIFMQESDASNFLKRRGKRSPKSRDEVNVENRQKLRVDELRREYYEEQRNEFENFVEEQNDEQEERSREAVEQWRQWHYDGLHPSYLYNRHHT

SEQ ID NO: 13884 - protein, 116 aa, Homo sapiens
MTWRQAVLLSCFSAVVLLSNAKQKIFMQESDASNFLKRRGKRSPKSRDEVNVENRQKLRVDELRREYYEEQRNEFENFVEEQNDEQEERSREAVEQWRQWHYDGLHPSYLYNRHHT

SEQ ID NO: 13885 - protein, 124 aa, Homo sapiens
MRQAGRAALLAALLLLVQLCPGSSQRSPEAAGVQDPSLRWSPGARNQGGGARALLLLLAERFPRRAGPGRLGLGTAGERPRRDNPSLSIDLTFHLLRTLLELARTQSQRERAEQNRIIFDSVGK

SEQ ID NO: 13886 - protein, 112 aa, Homo sapiens
MTRCALLLLMVLMLGRVLVVPVTPIPTFQLRPQNSPQTTPRPAASESPSAAPTWPWAAQSHCSPTRHPGSRIVLSLDVPIGLLQILLEQARARAAREQATTNARILARVGHC

SEQ ID NO: 13887 - protein, 161 aa, Homo sapiens
MLMPVHFLLLLLLLLGGPRTGLPHKFYKAKPIFSCLNTALSEAEKGQWEDASLLSKRSFHYLRSRDASSGEEEEGKEKKTFPISGARGGARGTRYRYVSQAQPRGKPRQDTAKSPHRTKFTLSLDVPTNIMNLLFNIAKAKNLRAQAAANAHLMAQIGRKK

SEQ ID NO: 13888 - protein, 1516 aa, Homo sapiens
MAPAKATNVVRLLLGSTALWLSQLGSGTVAASKSVTAHLAAKWPETPLLLEASEFMAEESNEKFWQFLETVQELAIYKQTESDYSYYNLILKKAGQFLDNLHINLLKFAFSIRAYSPAIQMFQQIAADEPPPDGCNAFVVIHKKHTCKINEIKKLLKKAASRTRPYLFKGDHKFPTNKENLPVVILYAEMGTRTFSAFHKVLSEKAQNEEILYVLRHYIQKPSSRKMYLSGYGVELAIKSTEYKALDDTQVKTVTNTTVEDETETNEVQGFLFGKLKEIYSDLRDNLTAFQKYLIESNKQMMPLKVWELQDLSFQAASQIMSAPVYDSIKLMKDISQNFPIKARSLTRIAVNQHMREEIKENQKDLQVRFKIQPGDARLFINGLRVDMDVYDAFSILDMLKLEGKMMNGLRNLGINGEDMSKFLKLNSHIWEYTYVLDIRHSSIMWINDLENDDLYITWPTSCQKLLKPVFPGSVPSIRRNFHNLVLFIDPAQEYTLDFIKLADVFYSHEVPLRIGFVFILNTDDEVDGANDAGVALWRAFNYIAEEFDISEAFISIVHMYQKVKKDQNILTVDNVKSVLQNTFPHANIWDILGIHSKYDEERKAGASFYKMTGLGPLPQALYNGEPFKHEEMNIKELKMAVLQRMMDASVYLQREVFLGTLNDRTNAIDFLMDRNNVVPRINTLILRTNQQYLNLISTSVTADVEDFSTFFFLDSQDKSAVIAKNMYYLTQDDESIISAVTLWIIADFDKPSGRKLLFNALKHMKTSVHSRLGIIYNPTSKINEENTAISRGILAAFLTQKNMFLRSFLGQLAKEEIATAIYSGDKIKTFLIEGMDKNAFEKKYNTVGVNIFRTHQLFCQDVLKLRPGEMGIVSNGRFLGPLDEDFYAEDFYLLEKITFSNLGEKIKGIVENMGINANNMSDFIMKVDALMSSVPKRASRYDVTFLRENHSVIKTNPQENDMFFNVIAIVDPLTREAQKMAQLLVVLGKIINMKIKLFMNCRGRLSEAPLESFYRFVLEPELMSGANDVSSLGPVAKFLDIPESPLLILNMITPEGWLVETVHSNCDLDNIHLKDTEKTVTAEYELEYLLLEGQCFDKVTEQPPRGLQFTLGTKNKPAVVDTIVMAHHGYFQLKANPGAWILRLHQGKSEDIYQIVGHEGTDSQADLEDIIVVLNSFKSKILKVKVKKETDKIKEDILTDEDEKTKGLWDSIKSFTVSLHKENKKEKDVLNIFSVASGHLYERFLRIMMLSVLRNTKTPVKFWLLKNYLSPTFKEVIPHMAKEYGFRYELVQYRWPRWLRQQTERQRIIWGYKILFLDVLFPLAVDKIIFVDADQIVRHDLKELRDFDLDGAPYGYTPFCDSRREMDGYRFWKTGYWASHLLRRKYHISALYVVDLKKFRRIGAGDRLRSQYQALSQDPNSLSNLDQDLPNNMIYQVAIKSLPQDWLWCETWCDDESKQRAKTIDLCNNPKTKESKLKAAARIVPEWVEYDAEIRQLLDHLENKKQDTILTHDEL

SEQ ID NO: 13889 - protein, 278 aa, Homo sapiens
MAPAKATNVVRLLLGSTALWLSQLGSGTVAASKSVTAHLAAKWPETPLLLEASEFMAEESNEKFWQFLETVQELAIYKQTESDYSYYNLILKKAGQFLDNLHINLLKFAFSIRAYSPAIQMFQQIAADEPPPDGCNAFVVIHKKHTCKINEIKKLLKKAASRTRPYLFKGDHKFPTNKENLPVVILYAEMGTRTFSAFHKVLSEKAQNEEILYVLRHYIQKPSSRKMYLSGYGVELAIKSTEYKALDDTQVKTVTNTTVEDETETNEVQGFLFGKLKS

SEQ ID NO: 13890 - protein, 280 aa, Homo sapiens
MAPAKATNVVRLLLGSTALWLSQLGSGTVAASKSVTAHLAAKWPETPLLLEASEFMAEESNEKFWQFLETVQELAIYKQTESDYSYYNLILKKAGQFLDNLHINLLKFAFSIRAYSPAIQMFQQIAADEPPPDGCNAFVVIHKKHTCKINEIKKLLKKAASRTRPYLFKGDHKFPTNKENLPVVILYAEMGTRTFSAFHKVLSEKAQNEEILYVLRHYIQKPSSRKMYLSGYGVELAIKSTEYKALDDTQVKTVTNTTVEDETETNEVQGFLFGKLKLVY

SEQ ID NO: 13891 - protein, 372 aa, Homo sapiens
MAPAKATNVVRLLLGSTALWLSQLGSGTVAASKSVTAHLAAKWPETPLLLEASEFMAEESNEKFWQFLETVQELAIYKQTESDYSYYNLILKKAGQFLDNLHINLLKFAFSIRAYSPAIQMFQQIAADEPPPDGCNAFVVIHKKHTCKINEIKKLLKKAASRTRPYLFKGDHKFPTNKENLPVVILYAEMGTRTFSAFHKVLSEKAQNEEILYVLRHYIQKPSSRKMYLSGYGVELAIKSTEYKALDDTQVKTVTNTTVEDETETNEVQGFLFGKLKEIYSDLRDNLTAFQKYLIESNKQMMPLKVWELQDLSFQAASQIMSAPVYDSIKLMKDISQNFPIKARLRMNILICLFQSTLNVKNLRSRHLYNKT

SEQ ID NO: 13892 - protein, 280 aa, Homo sapiens [sequence omitted]

SEQ ID NO: 13893 - protein, 278 aa, Homo sapiens; identical to SEQ ID NO: 13889

SEQ ID NO: 13894 - protein, 530 aa, Homo sapiens
MARAGWTSPVPLCVCLLLTCGFAEAGKLLVVPMDGSHWFTMQSVVEKLILRGHEVVVVMPEVSWQLERSLNCTVKTYSTSYTLEDQNREFMVFAHAQWKAQAQSIFSLLMSSSSGFLDLFFSHCRSLFNDRKLVEYLKESSFDAVFLDPFDTCGLIVAKYFSLPSVVFTRGIFCHHLEEGAQCPAPLSYVPNDLLGFSDAMTFKERVWNHIVHLEDHLFCQYLFRNALEIASEILQTPVTAYDLYSHTSIWLLRTDFVLDYPKPVMPNMIFIGGINCHQGKPLPMEFEAYINASGEHGIVVFSLGSMVSEIPEKKAMAIADALGKIPQTVLWRYTGTRPSNLANNTILVKWLPQNDLLGHPMTRAFITHAGSHGVYESICNGVPMVMMPLFGDQMDNAKRMETKGAGVTLNVLEMTSEDLENALKAVINDKSYKENIMRLSSLHKDRPVEPLDLAVFWVEFVMRHKGAPHLRPAAHDLTWYQYHSLDVIGFLLAVVLTVAFITFKCCAYGYRKCLGKKGRVKKAHKSKTH

SEQ ID NO: 13895 - protein, 441 aa, Homo sapiens
MARAGWTSPVPLCVCLLLTCGFAEAGKLLVVPMDGSHWFTMQSVVEKLILRGHEVVVVMPEVSWQLERSLNCTVKTYSTSYTLEDQNREFMVFAHAQWKAQAQSIFSLLMSSSSGFLDLFFSHCRSLFNDRKLVEYLKESSFDAVFLDPFDTCGLIVAKYFSLPSVVFTRGIFCHHLEEGAQCPAPLSYVPNDLLGFSDAMTFKERVWNHIVHLEDHLFCQYLFRNALEIASEILQTPVTAYDLYSHTSIWLLRTDFVLDYPKPVMPNMIFIGGINCHQGKPLPMEFEAYINASGEHGIVVFSLGSMVSEIPEKKAMAIADALGKIPQTVLWRYTGTRPSNLANNTILVKWLPQNDLLGHPMTRAFITHAGSHGVYESICNGVPMVMMPLFGDQMDNAKRMETKGAGVTLNVLEMTSEDLENALKAVINDKRKKQQSGRQM

SEQ ID NO: 13896 - protein, 158 aa, Homo sapiens
MLNNLLLFSLQISLIGTTLGGNVLIWPMEGSHWLNVKIIIDELIKKEHNVTVLVASGALFITPTSNPSLTFEIYKVPFGKERIEGVIKDFVLTWLENRPSPSTIWRFYQEMAKVIKDFHMVSQEICDGVLKNQQLMAKLKKSKFEVLVSDPVFPCGDI

SEQ ID NO: 13897 - protein, 693 aa, Homo sapiens
MLNNLLLFSLQISLIGTTLGGNVLIWPMEGSHWLNVKIIIDELIKKEHNVTVLVASGALFITPTSNPSLTFEIYKVPFGKERIEGVIKDFVLTWLENRPSPSTIWRFYQEMAKVIKDFHMVSQEICDGVLKNQQLMAKLKKSKFEVLVSDPVFPCGDIVALKLGIPFMYSLRFSPASTVEKHCGKVPYPPSYVPAVLSELTDQMSFTDRIRNFISYHLQDYMFETLWKSWDSYYSKALDGSHWLNIKIILEELIQRNHNVTVLASSATLFINSNPDSPVNFEVIPVSYKKSNIDSLIEHMIMLWIDHRPTPLTIWAFYKELGKLLDTFFQINIQLCDGVLKNPKLMARLQKGGFDVLVADPVTICGDLVALKLGIPFMYTLRFSPASTVERHCGKIPAPVSYVPAALSELTDQMTFGERIKNTISYSLQDYIFQSYWGEWNSYYSKILGRPTTLCETMGKAEIWLIRTYWDFEFPRPYLPNFEFVGGLHCKPAKPLPKVLWRYKGKKPATLGNNTQLFDWIPQNDLLGHPKTKAFITHGGTNGIYEAIYHGVPMVGVPMFADQPDNIAHMKAKGAAVEVNLNTMTSVDLLSALRTVINEPSYKENAMRLSRIHHDQPVKPLDRAVFWIEFVMRHKGAKHLRVAAHDLTWFQYHSLDVIGFLLVCVTTAIFLVIQCCLFSCQKFGKIGKKKKRE

SEQ ID NO: 13898 - protein, 527 aa, Homo sapiens
MLNNLLLFSLQISLIGTTLGGNVLIWPMEGSHWLNVKIIIDELIKKEHNVTVLVASGALFITPTSNPSLTFEIYKVPFGKERIEGVIKDFVLTWLENRPSPSTIWRFYQEMAKVIKDFHMVSQEICDGVLKNQQLMAKLKKSKFEVLVSDPVFPCGDIVALKLGIPFMYSLRFSPASTVEKHCGKVPYPPSYVPAVLSELTDQMSFTDRIRNFISYHLQDYMFETLWKSWDSYYSKALGGLLLCCPGWSAVADLGSLQPLLPGFKRFSRLSLHCSWDYRLPAGRPTTLCETMGKAEIWLIRTYWDFEFPRPYLPNFEFVGGLHCKPAKPLPKVLWRYKGKKPATLGNNTQLFDWIPQNDLLGHPKTKAFITHGGTNGIYEAIYHGVPMVGVPMFADQPDNIAHMKAKGAAVEVNLNTMTSVDLLSALRTVINEPSYKENAMRLSRIHHDQPVKPLDRAVFWIEFVMRHKGAKHLRVAAHDLTWFQYHSLDVIGFLLVCVTTAIFLVIQCCLFSCQKFGKIGKKKKRE

SEQ ID NO: 13899 - protein, 483 aa, Homo sapiens
MLNNLLLFSLQISLIGTTLGGNVLIWPMEGSHWLNVKIIIDELIKKEHNVTVLVASGALFITPTSNPSLTFEIYKVPFGKERIEGVIKDFVLTWLENRPSPSTIWRFYQEMAKVIKDFHMVSQEICDGVLKNQQLMAKLKKSKFEVLVSDPVFPCGDIVALKLGIPFMYSLRFSPASTVEKHCGKVPYPPSYVPAVLSELTDQMSFTDRIRNFISYHLQDYMFETLWKSWDSYYSKALGRPTTLCETMGKAEIWLIRTYWDFEFPRPYLPNFEFVGGLHCKPAKPLPKVLWRYKGKKPATLGNNTQLFDWIPQNDLLGHPKTKAFITHGGTNGIYEAIYHGVPMVGVPMFADQPDNIAHMKAKGAAVEVNLNTMTSVDLLSALRTVINEPSYKENAMRLSRIHHDQPVKPLDRAVFWIEFVMRHKGAKHLRVAAHDLTWFQYHSLDVIGFLLVCVTTAIFLVIQCCLFSCQKFGKIGKKKKRE

SEQ ID NO: 13900 - protein, 527 aa, Homo sapiens
MLNNLLLFSLQISLIGTTLGGNVLIWPMEGSHWLNVKIIIDELIKKEHNVTVLVASGALFITPTSNPSLTFEIYKVPFGKERIEGVIKDFVLTWLENRPSPSTIWRFYQEMAKVIKDFHMVSQEICDGVLKNQQLMAKLKKSKFEVLVSDPVFPCGDIVALKLGIPFMYSLRFSPASTVEKHCGKVPYPPSYVPAVLSELTDQMSFTDRIRNFISYHLQDYMFETLWKSWDSYYSKALGRPTTLCETMGKAEIWLIRTYWDFEFPRPYLPNFEFVGGLHCKPAKPLPKEMEEFIQSSGKNGVVVFSLGSMVKNLTEEKANLIASALAQIPQKVLWRYKGKKPATLGNNTQLFDWIPQNDLLGHPKTKAFITHGGTNGIYEAIYHGVPMVGVPMFADQPDNIAHMKAKGAAVEVNLNTMTSVDLLSALRTVINEPSYKENAMRLSRIHHDQPVKPLDRAVFWIEFVMRHKGAKHLRVAAHDLTWFQYHSLDVIGFLLVCVTTAIFLVIQCCLFSCQKFGKIGKKKKRE

SEQ ID NO: 13901 - protein, 529 aa, Homo sapiens
MTLKWTSVLLLIHLSCYFSSGSCGKVLVWAAEYSHWMNMKTILKELVQRGHEVTVLASSASILFDPNDASTLKFEVYPTSLTKTEFENIIMQQVKRWSDIRKDSFWLYFSQEQEILWELYDIFRNFCKDVVSNKKVMKKLQESRFDIVFADAVFPCGELLAALLNIRFVYSLRFTPGYTIERHSGGLIFPPSYIPIVMSKLSDQMTFMERVKNMIYVLYFDFWFQMSDMKKWDQFYSEVLGRPTTLFETMGKADIWLMRNSWSFQFPHPFLPNVDFVGGFHCKPAKPLPKEMEEFVQSSGENGVVVFSLGSVISNMTAERANVIATALAKIPQKVLWRFDGNKPDALGLNTRLYKWIPQNDLLGHPKTRAFITHGGANGIYEAIYHGIPMVGIPLFFDQPDNIAHMKAKGAAVRLDFNTMSSTDLLNALKTVINDPLYKENIMKLSRIQHDQPVKPLDRAVFWIEFVMPHKGAKHLRVAAHDLTWFQYHSLDVIGFLLACVATVIFIITKFCLFCFWKFARKGKKGKRD

SEQ ID NO: 13902 - protein, 529 aa, Homo sapiens
MALKWTSVLLLIHLGCYFSSGSCGKVLVWTGEYSHWMNMKTILKELVQRGHEVTVLASSASILFDPNDAFTLKLEVYPTSLTKTEFENIIMQQVKRWSDIQKDSFWLYFSQEQEILWEFHDIFRNFCKDVVSNKKVMKKLQESRFDIIFADAFFPCGELLAALLNIPFVYSLCFTPGYTIERHSGGLIFPPSYIPVVMSKLSDQMTFMERVKNMIYVLYFDFWFQMCDMKKWDQFYSEVLGRPTTLFETMGKADIWLMRNSWSFQFPHPFLPNIDFVGGLHCKPAKPLPKEMEEFVQSSGENGVVVFSLGSVISNMTAERANVIATALAKIPQKVLWRFDGNKPDALGLNTRLYKWIPQNDLLGLPKTRAFITHGGANGIYEAIYHGIPMVGIPLFWDQPDNIAHMKAKGAAVRLDFHTMSSTDLLNALKTVINDPSYKENVMKLSIIQHDQPVKPLHRAVFWIEFVMCHKGAKHLRVAARDLTWFQYHSLDVIGFLLACVATVIFVVTKFCLFCFWKFARKGKKGKRD

SEQ ID NO: 13903 - protein, 335 aa, Homo sapiens
MALKWTSVLLLIHLGCYFSSGSCGKVLVWTGEYSHWMNMKTILKELVQRGHEVTVLASSASILFDPNDAFTLKLEVYPTSLTKTEFENIIMQQVKRWSDIQKDSFWLYFSQEQEILWEFHDIFRNFCKDVVSNKKVMKKLQESRFDIIFADAFFPCGELLAALLNIPFVYSLCFTPGYTIERHSGGLIFPPSYIPVVMSKLSDQMTFMERVKNMIYVLYFDFWFQMCDMKKWDQFYSEVLGRPTTLFETMGKADIWLMRNSWSFQFPHPFLPNIDFVGGLHCKPAKPLPKEMEEFVQSSGENGVVVFSLGSVISNMTAERANVIATALAKIPQKI

SEQ ID NO: 13904 - protein, 54 aa, Homo sapiens
MSMKWTSALLLIQLSCYFSSGSCGKVLVWPTEFSHWMNIKTILDELVQRGHEVT

SEQ ID NO: 13905 - protein, 528 aa, Homo sapiens
MSMKWTSALLLIQLSCYFSSGSCGKVLVWPTEFSHWMNIKTILDELVQRGHEVTVLASSASISFDPNSPSTLKFEVYPVSLTKTEFEDIIKQLVKRWAELPKDTFWSYFSQVQEIMWTFNDILRKFCKDIVSNKKLMKKLQESRFDVVLADAVFPFGELLAELLKIPFVYSLRFSPGYAIEKHSGGLLFPPSYVPVVMSELSDQMTFIERVKNMIYVLYFEFWFQIFDMKKWDQFYSEVLGRPTTLSETMAKADIWLIRNYWDFQFPHPLLPNVEFVGGLHCKPAKPLPKEMEEFVQSSGENGVVVFSLGSMVSNTSEERANVIASALAKIPQKVLWRFDGNKPDTLGLNTRLYKWIPQNDLLGHPKTRAFITHGGANGIYEAIYHGIPMVGVPLFADQPDNIAHMKAKGAAVSLDFHTMSSTDLLNALKTVINDPLYKENAMKLSRIHHDQPVKPLDRAVFWIEFVMRHKGAKHLRVAAHDLTWFQYHSLDVTGFLLACVATVIFIITKCLFCVWKFVRTGKKGKRD

SEQ ID NO: 13906 - protein, 369 aa, Homo sapiens
MSMKWTSALLLIQLSCYFSSGSCGKVLVWPTEFSHWMNIKTILDELVQRGHEVTVLASSASISFDPNSPSTLKFEVYPVSLTKTEFEDIIKQLVKRWAELPKDTFWSYFSQVQEIMWTFNDILRKFCKDIVSNKKLMKKLQESRFDVVLADAVFPFGELLAELLKIPFVYSLRFSPGYAIEKHSGGLLFPPSYVPVVMSELSDQMTFIERVKNMIYVLYFEFWFQIFDMKKWDQFYSEVLGRPTTLSETMAKADIWLIRNYWDFQFPHPLLPNVEFVGGLHCKPAKPLPKEMEEFVQSSGENGVVVFSLGSMVSNTSEERANVIASALAKIPQKVLWRFDGNKPDTLGLNTRLYKWIPQNDLLDIKRML

SEQ ID NO: 13907 - protein, 369 aa, Homo sapiens [sequence omitted]

SEQ ID NO: 13908 - protein, 156 aa, Homo sapiens
MGKADVWLIRNSWNFQFPYPLLPNVDFVGGLHCKPAKPLPKEMEDFVQSSGENGVVVFSLGSMVSNMTEERANVIASALAQIPQKVLWRFDGNKPDTLGLNTRLYKWIPQNDLLGHPKTRAFITHGGANGIYEAIYHGIPMVGIPLFADQPDNIAH

SEQ ID NO: 13909 - protein, 529 aa, Homo sapiens
MSVKWTSVILLIQLSFCFSSGNCGKVLVWAAEYSHWMNIKTILDELIQRGHEVTVLASSASILFDPNNSSALKIEIYPTSLTKTELENFIMQQIKRWSDLPKDTFWLYFSQVQEIMSIFGDITRKFCKDVVSNKKFMKKVQESRFDVIFADAIFPCSELLAELFNIPFVYSLSFSPGYTFEKHSGGFIFPPSYVPVVMSELTDQMTFMERVKNMIYVLYFDFWFEIFDMKKWDQFYSEVLGRPTTLSETMGKADVWLIRNSWNFQFPYPLLPNVDFVGGLHCKPAKPLPKEMEDFVQSSGENGVVVFSLGSMVSNMTEERANVIASALAQIPQKVLWRFDGNKPDTLGLNTRLYKWIPQNDLLGHPKTRAFITHGGANGIYEAIYHGIPMVGIPLFADQPDNIAHMKARGAAVRVDFNTMSSTDLLNALKRVINDPSYKENVMKLSRIQHDQPVKPLDRAVFWIEFVMRHKGAKHLRVAAHDLTWFQYHSLDVIGFLLVCVATVIFIVTKCCLFCFWKFARKAKKGKND

SEQ ID NO: 13910 - protein, 369 aa, Homo sapiens
MSVKWTSVILLIQLSFCFSSGNCGKVLVWAAEYSHWMNIKTILDELIQRGHEVTVLASSASILFDPNNSSALKIEIYPTSLTKTELENFIMQQIKRWSDLPKDTFWLYFSQVQEIMSIFGDITRKFCKDVVSNKKFMKKVQESRFDVIFADAIFPCSELLAELFNIPFVYSLSFSPGYTFEKHSGGFIFPPSYVPVVMSELTDQMTFMERVKNMIYVLYFDFWFEIFDMKKWDQFYSEVLGRPTTLSETMGKADVWLIRNSWNFQFPYPLLPNVDFVGGLHCKPAKPLPKEMEDFVQSSGENGVVVFSLGSMVSNMTEERANVIASALAQIPQKVLWRFDGNKPDTLGLNTRLYKWIPQNDLLDIKRML

SEQ ID NO: 13911 - protein, 335 aa, Homo sapiens
MSVKWTSVILLIQLSFCFSSGNCGKVLVWAAEYSHWMNIKTILDELIQRGHEVTVLASSASILFDPNNSSALKIEIYPTSLTKTELENFIMQQIKRWSDLPKDTFWLYFSQVQEIMSIFGDITRKFCKDVVSNKKFMKKVQESRFDVIFADAIFPCSELLAELFNIPFVYSLSFSPGYTFEKHSGGFIFPPSYVPVVMSELTDQMTFMERVKNMIYVLYFDFWFEIFDMKKWDQFYSEVLGRPTTLSETMGKADVWLIRNSWNFQFPYPLLPNVDFVGGLHCKPAKPLPKEMEDFVQSSGENGVVVFSLGSMVSNMTEERANVIASALAQIPQKI

SEQ ID NO: 13912 - protein, 252 aa, Homo sapiens
MLHQSGKFLIPDIKEEEKSYQVIRWFSPEDHQKRIKKHFDSYIETALDGRKESEALVKLMEIFGTQCSYLLSRKDIMDSLKNENYDLVFVEAFDFCSFLIAEKLVKPFVAILPTTFGSLDFGLPSPLSYVPVFPSLLTDHMDFWGRVKNFLMFFSFSRSQWDMQSTFDNTIKEHFPEGSRPVLSHLLLKAELWFVNSDFAFDFARPLLPNTVYIGGLMEKPIKPVPQNGQPALFTTPSLFSSGVYPEPLRWL

SEQ ID NO: 13913 - protein, 252 aa, Homo sapiens; identical to SEQ ID NO: 13912

SEQ ID NO: 13914 - protein, 402 aa, Homo sapiens
MVGQRVLLLVAFLLSGVLLSEAAKILTISTLDIKEEEKSYQVIRWFSPEDHQKRIKKHFDSYIETALDGRKESEALVKLMEIFGTQCSYLLSRKDIMDSLKNENYDLVFVEAFDFCSFLIAEKLVKPFVAILPTTFGSLDFGLPSPLSYVPVFPSLLTDHMDFWGRVKNFLMFFSFSRSQWDMQSTFDNTIKEHFPEGSRPVLSHLLLKAELWFVNSDFAFDFARPLLPNTVYIGGLMEKPIKPVPQDLDNFIANFGDAGFVLVAFGSMLNTHQSQEVLKKMHNAFAHLPQGVIWTCQSSHWPRDVHLATNVKIVDWLPQSDLLAHPSIRLFVTHGGQNSVMEAIRHGVPMVGLPVNGDQHGNMVRVVAKNYGVSIRLNQVTADTLTLTMKQVIEDKRYVAL

SEQ ID NO: 13915 - protein, 57 aa, Homo sapiens
MVGQRVLLLVAFLLSGVLLSEAAKILTISTLGECLAGEFPDRRVPDPRTARAPANGD

SEQ ID NO: 13916 - protein, 523 aa, Homo sapiens
MVGQRVLLLVAFLLSGVLLSEAAKILTISTLGGSHYLLLDRVSQILQEHGHNVTMLHQSGKFLIPDIKEEEKSYQVIRWFSPEDHQKRIKKHFDSYIETALDGRKESEALVKLMEIFGTQCSYLLSRKDIMDSLKNENYDLVFVEAFDFCSFLIAEKLVKPFVAILPTTFGSLDFGLPSPLSYVPVFPSLLTDHMDFWGRVKNFLMFFSFSRSQWDMQSTFDNTIKEHFPEGSRPVLSHLLLKAELWFVNSDFAFDFARPLLPNTVYIGGLMEKPIKPVPQDLDNFIANFGDAGFVLVAFGSMLNTHQSQEVLKKMHNAFAHLPQGVIWTCQSSHWPRDVHLATNVKIVDWLPQSDLLAHPSIRLFVTHGGQNSVMEAIRHGVPMVGLPVNGDQHGNMVRVVAKNYGVSIRLNQVTADTLTLTMKQVIEDKRYKSAVVAASVILHSQPLSPAQRLVGWIDHILQTGGATHLKPYAFQQPWHEQYLIDVFVFLLGLTLGTMWLCGKLLGVVARWLRGARKVKKT

SEQ ID NO: 13917 - protein, 436 aa, Homo sapiens
MVGQRVLLLVAFLLSGVLLSEAAKILTISTLGGSHYLLLDRVSQILQEHGHNVTMLHQSGKFLIPDIKEEEKSYQVIRWFSPEDHQKRIKKHFDSYIETALDGRKESEALVKLMEIFGTQCSYLLSRKDIMDSLKNENYDLVFVEAFDFCSFLIAEKLVKPFVAILPTTFGSLDFGLPSPLSYVPVFPSLLTDHMDFWGRVKNFLMFFSFSRSQWDMQSTFDNTIKEHFPEGSRPVLSHLLLKAELWFVNSDFAFDFARPLLPNTVYIGGLMEKPIKPVPQDLDNFIANFGDAGFVLVAFGSMLNTHQSQEVLKKMHNAFAHLPQGVIWTCQSSHWPRDVHLATNVKIVDWLPQSDLLAHPSIRLFVTHGGQNSVMEAIRHGVPMVGLPVNGDQHGNMVRVVAKNYGVSIRLNQVTADTLTLTMKQVIEDKRYVAL

SEQ ID NO: 13918 - protein, 489 aa, Homo sapiens
MAGQRVLLLVGFLLPGVLLSEAAKILTISTVDFKKEEKSYQVISWLAPEDHQREFKKSFDFFLEETLGGRGKFENLLNVLEYLALQCSHFLNRKDIMDSLKNENFDMVIVETFDYCPFLIAEKLGKPFVAILSTSFGSLEFGLPIPLSYVPVFRSLLTDHMDFWGRVKNFLMFFSFCRRQQHMQSTFDNTIKEHFTEGSRPVLSHLLLKAELWFINSDFAFDFARPLLPNTVYVGGLMEKPIKPVPQDLENFIAKFGDSGFVLVTLGSMVNTCQNPEIFKEMNNAFAHLPQGVIWKCQCSHWPKDVHLAANVKIVDWLPQSDLLAHPSIRLFVTHGGQNSIMEAIQHGVPMVGIPLFGDQPENMVRVEAKKFGVSIQLKKLKAETLALKMKQIMEDKRYKSAAVAASVILRSHPLSPTQRLVGWIDHVLQTGGATHLKPYVFQQPWHEQYLLDVFVFLLGLTLGTLWLCGKLLGMAVWWLRGARKVKET

SEQ ID NO: 13919 - protein, 138 aa, Homo sapiens
MAGQRVLLLVGFLLPGVLLSEAAKILTISTVGGSHYLLMDRVSQILQDHGHNVTMLNHKRGPFMPDFKKEEKSYQVISWLAPEDHQREFKKSFDFFLEETLGGRGKFENLLNVLEYLALQCSHFLNRKDIMDSLKNEN

SEQ ID NO: 13920 - protein, 523 aa, Homo sapiens
MAGQRVLLLVGFLLPGVLLSEAAKILTISTVGGSHYLLMDRVSQILQDHGHNVTMLNHKRGPFMPDFKKEEKSYQVISWLAPEDHQREFKKSFDFFLEETLGGRGKFENLLNVLEYLALQCSHFLNRKDIMDSLKNENFDMVIVETFDYCPFLIAEKLGKPFVAILSTSFGSLEFGLPIPLSYVPVFRSLLTDHMDFWGRVKNFLMFFSFCRRQQHMQSTFDNTIKEHFTEGSRPVLSHLLLKAELWFINSDFAFDFARPLLPNTVYVGGLMEKPIKPVPQDLENFIAKFGDSGFVLVTLGSMVNTCQNPEIFKEMNNAFAHLPQGVIWKCQCSHWPKDVHLAANVKIVDWLPQSDLLAHPSIRLFVTHGGQNSIMEAIQHGVPMVGIPLFGDQPENMVRVEAKKFGVSIQLKKLKAETLALKMKQIMEDKRYKSAAVAASVILRSHPLSPTQRLVGWIDHVLQTGGATHLKPYVFQQPWHEQYLLDVFVFLLGLTLGTLWLCGKLLGMAVWWLRGARKVKET

SEQ ID NO: 13921 - protein, 120 aa, Homo sapiens
MAGQRVLLLVGFLLPGVLLSEAAKILTISTVGGSHYLLMDRVSQILQDHGHNVTMLNHKRGPFMPDFKKEEKSYQVISWLAPEDHQREFKKSFDFFLEETLGGRTWRTSLPSLGTLVLSL

SEQ ID NO: 13922 - protein, 141 aa, Homo sapiens
MKSYTPYFILLWSAVGIAKAAKIIIVPPIMFESHMYIFKTLASALHERGHHTVFLLSEGRDIAPSNHYSLQRYPGIFNSTTSDAFLQSKMRNIFSGRLTAIELFDILDHYTKNCDLMVGNHALIQGLKKEKFDLLLVDPND

SEQ ID NO: 13923 - protein, 541 aa, Homo sapiens
MKSYTPYFILLWSAVGIAKAAKIIIVPPIMFESHMYIFKTLASALHERGHHTVFLLSEGRDIAPSNHYSLQRYPGIFNSTTSDAFLQSKMRNIFSGRLTAIELFDILDHYTKNCDLMVGNHALIQGLKKEKFDLLLVDPNDMCGFVIAHLLGVKYAVFSTGLWYPAEVGAPAPLAYVPEFNSLLTDRMNLLQRMKNTGVYLISRLGVSFLVLPKYERIMQKYNLLPEKSMYDLVHGSSLWMLCTDVALEFPRPTLPNVVYVGGILTKPASPLPEDLQRWVNGANEHGFVLVSFGAGVKYLSEDIANKLAGALGRLPQKVIWRFSGPKPKNLGNNTKLIEWLPQNDLLGHSKIKAFLSHGGLNSIFETIYHGVPVVGIPLFGDHYDTMTRVQAKGMGILLEWKTVTEKELYEALVKVINNPSYRQRAQKLSEIHKDQPGHPVNRTIYWIDYIIRHNGAHHLRAAVHQISFCQYFLLDIAFVLLLGAALLYFLLSWVTKFIYRKIKSLWSRNKHSTVNGHYHNGILNGKYKRNGHIKHEKKVK

SEQ ID NO: 13924 - protein, 541 aa, Homo sapiens; identical to SEQ ID NO: 13923

SEQ ID NO: 13925 - protein, 244 aa, Homo sapiens
MAAAASPAILPRLAILPYLLFDWSGTGRADAHSLWYNFTIIHLPRHGQQWCEVQSQVDQKNFLSYDCGSDKVLSMGHLEEQLYATDAWGKQLEMLREVGQRLRLELADTELEDFTPSGPLTLQVRMSCECEADGYIRGSWQFSFDGRKFLLFDSNNRKWTVVHAGARRMKEKWEKDSGLTTFFKMVSMRDCKSWLRDFLMHRKKRLEPTAPPTMAPGLAQPKAIATTLSPWSFLIILCFILPGI

SEQ ID NO: 13926 - protein, 244 aa, Homo sapiens; identical to SEQ ID NO: 13925

SEQ ID NO: 13927 - protein, 29 aa, Homo sapiens
MGQPSLTWMLMVVVASWFITTAATDTSEA

SEQ ID NO: 13928 - protein, 673 aa, Homo sapiens
MGQPSLTWMLMVVVASWFITTAATDTSEARTKYNCPARWSWRTPQRGGDTEQGPDEDFTSQGRWCSECHSNATCTEDEAVTTCTCQEGFTGDGLTCVDLDECAIPGAHNCSANSSCVNTPGSFSCVCPEGFRLSPGLGCTDVDECAEPGLSHCHALATCVNVVGSYLCVCPAGYRGDGWHCECSPGSCGPGLDCVPEGDALVCADPCQAHRTLDEYWRSTEYGEGYACDTDLRGWYRFVGQGGARMAETCVPVLRCNTAAPMWLNGTHPSSDEGIVSRKACAHWSGHCCLWDASVQVKACAGGYYVYNLTAPPECHLAYCTDPSSVEGTCEECSIDEDCKSNNGRWHCQCKQDFNITDISLLEHRLECGANDMKVSLGKCQLKSLGFDKVFMYLSDSRCSGFNDRDNRDWVSVVTPARDGPCGTVLTRNETHATYSNTLYLADEIIIRDLNIKINFACSYPLDMKVSLKTALQPMVSALNIRVGGTGMFTVRMALFQTPSYTQPYQGSSVTLSTEAFLYVGTMLDGGDLSRFALLMTNCYATPSSNATDPLKYFIIQDRCPHTRDSTIQVVENGESSQGRFSVQMFRFAGNYDLVYLHCEVYLCDTMNEKCKPTCSGTRFRSGSVIDQSRVLNLGPITRKGVQATVSRAFSSLGLLKVWLPLLLSATLTLTFQ

SEQ ID NO: 13929 - protein, 161 aa, Homo sapiens
MGQPSLTWMLMVVVASWFITTAATDTSEARTKYNCPARWSWRTPQRGGDTEQGPDEDFTSQGSRKHKMCKEREGQQVHRKSYQRWCSECHSNATCTEDEAVTTCTCQEGFTGDGLTCVDLDECAIPGAHNCSANSSCVNTPGSFSCVCPEGFRLSPGLGCT

SEQ ID NO: 13930 - protein, 161 aa, Homo sapiens
MGQPSLTWMLMVVVASWFITTAATDTSEARTKYNCPARWSWRTPQRGGDTEQGWCSECHSNATCTEDEAVTTCTCQEGFTGDGLTCVDLDECAIPGAHNCSANSSCVNTPGSFSCVCPEGFRLSPGLGCTDVDECAEPGLSHCHALATCVNVVGSYLCVCP

SEQ ID NO: 13931 - protein, 86 aa, Homo sapiens
MGQPSLTWMLMVVVASWFITTAATDTSEARWCSECHSNATCTEDEAVTTCTCQEGFTGDGLTCVDLDECAIPGAHNCSANSSCVNT

SEQ ID NO: 13932 - protein, 88 aa, Homo sapiens
MGQPSLTWMLMVVVASWFITTAATDTSEARWCSECHSNATCTEDEAVTTCTCQEGFTGDGLTCVDLDECAIPGAHNCSANSSCVNTPG

SEQ ID NO: 13933 - protein, 103 aa, Homo sapiens
MGQPSLTWMLMVVVASWFITTAATDTSEARWCSECHSNATCTEDEAVTTCTCQEGFTGDGLTCVDLDECAIPGAHNCSANSSCVNTPGSFSCVCPEGFRLSPG

SEQ ID NO: 13934 - protein, 125 aa, Homo sapiens
MGQPSLTWMLMVVVASWFITTAATDTSEARWCSECHSNATCTEDEAVTTCTCQEGFTGDGLTCVDLDECAIPGAHNCSANSSCVNTPGSFSCVCPEGFRLSPGLGCTDVDECAEPGLSHCHALAT

SEQ ID NO: 13935 - protein, 640 aa, Homo sapiens
MGQPSLTWMLMVVVASWFITTAATDTSEARWCSECHSNATCTEDEAVTTCTCQEGFTGDGLTCVDLDECAIPGAHNCSANSSCVNTPGSFSCVCPEGFRLSPGLGCTDVDECAEPGLSHCHALATCVNVVGSYLCVCPAGYRGDGWHCECSPGSCGPGLDCVPEGDALVCADPCQAHRTLDEYWRSTEYGEGYACDTDLRGWYRFVGQGGARMAETCVPVLRCNTAAPMWLNGTHPSSDEGIVSRKACAHWSGHCCLWDASVQVKACAGGYYVYNLTAPPECHLAYCTDPSSVEGTCEECSIDEDCKSNNGRWHCQCKQDFNITDISLLEHRLECGANDMKVSLGKCQLKSLGFDKVFMYLSDSRCSGFNDRDNRDWVSVVTPARDGPCGTVLTRNETHATYSNTLYLADEIIIRDLNIKINFACSYPLDMKVSLKTALQPMVSALNIRVGGTGMFTVRMALFQTPSYTQPYQGSSVTLSTEAFLYVGTMLDGGDLSRFALLMTNCYATPSSNATDPLKYFIIQDRCPHTRDSTIQVVENGESSQGRFSVQMFRFAGNYDLVYLHCEVYLCDTMNEKCKPTCSGTRFRSGSVIDQSRVLNLGPITRKGVQATVSRAFSSLGLLKVWLPLLLSATLTLTFQ

SEQ ID NO: 13936 - protein, 640 aa, Homo sapiens; identical to SEQ ID NO: 13935

SEQ ID NO: 13937 - protein, 689 aa, Homo sapiens
MRHIMTRLTLPFWLQDTRHQRQREKFKGPTRLSFGQVLSRPEVAGRAERMGQPSLTWMLMVVVASWFITTAATDTSEARWCSECHSNATCTEDEAVTTCTCQEGFTGDGLTCVDLDECAIPGAHNCSANSSCVNTPGSFSCVCPEGFRLSPGLGCTDVDECAEPGLSHCHALATCVNVVGSYLCVCPAGYRGDGWHCECSPGSCGPGLDCVPEGDALVCADPCQAHRTLDEYWRSTEYGEGYACDTDLRGWYRFVGQGGARMAETCVPVLRCNTAAPMWLNGTHPSSDEGIVSRKACAHWSGHCCLWDASVQVKACAGGYYVYNLTAPPECHLAYCTDPSSVEGTCEECSIDEDCKSNNGRWHCQCKQDFNITDISLLEHRLECGANDMKVSLGKCQLKSLGFDKVFMYLSDSRCSGFNDRDNRDWVSVVTPARDGPCGTVLTRNETHATYSNTLYLADEIIIRDLNIKINFACSYPLDMKVSLKTALQPMVSALNIRVGGTGMFTVRMALFQTPSYTQPYQGSSVTLSTEAFLYVGTMLDGGDLSRFALLMTNCYATPSSNATDPLKYFIIQDRCPHTRDSTIQVVENGESSQGRFSVQMFRFAGNYDLVYLHCEVYLCDTMNEKCKPTCSGTRFRSGSVIDQSRVLNLGPITRKGVQATVSRAFSSLGLLKVWLPLLLSATLTLTFQ

SEQ ID NO: 13938 - protein, 138 aa, Homo sapiens
MRHIMTRLTLPFWLQVLSRPEVAGRAERMGQPSLTWMLMVVVASWFITTAATDTSEARWCSECHSNATCTEDEAVTTCTCQEGFTGDGLTCVDLDECAIPGAHNCSANSSCVNTPGSFSCVCPEGFRLSPGLGCTDVD

SEQ ID NO: 13939 - protein, 890 aa, Homo sapiens
DDDFFHELPETFPSDPPEPLPHFLIEPEEAYIVKNKPVNLYCKASPATQIYFKCNSEWVHQKDHIVDERVDETSGLIVREVSIEISRQQVEELFGPEDYWCQCVAWSSAGTTKSRKAYVRIAYLRKTFEQEPLGKEVSLEQEVLLQCRPPEGIPVAEVEWLKNEDIIDPVEDRNFYITIDHNLIIKQARLSDTANYTCVAKNIVAKRKSTTATVIVYVNGGWSTWTEWSVCNSRCGRGYQKRTRTCTNPAPLNGGAFCEGQSVQKIACTTLCPVDGRWTPWSKWSTCGTECTHWRRRECTAPAPKNGGKDCDGLVLQSKNCTDGLCMQTAPDSDDVALYVGIVIAVIVCLAISVVVALFVYRKNHRDFESDIIDSSALNGGFQPVNIKAARQDLLAVPPDLTSAAAMYRGPVYALHDVSDKIPMTNSPILDPLPNLKIKVYNTSGAVTPQDDLSEFTSKLSPQMTQSLLENEALSLKNQSLARQTDPSCTAFGSFNSLGGHLIVPNSGVSLLIPAGAIPQGRVYEMYVTVHRKETMRPPMDDSQTLLTPVVSCGPPGALLTRPVVLTMHHCADPNTEDWKILLKNQAAQGQWEDVVVVGEENFTTPCYIQLDAEACHILTENLSTYALVGHSTTKAAAKRLKLAIFGPLCCSSLEYSIRVYCLDDTQDALKEILHLERQMGGQLLEEPKALHFKGSTHNLRLSIHDIAHSLWKSKLLAKYQEIPFYHVWSGSQRNLHCTFTLERFSLNTVELVCKLCVRQVEGEGQIFQLNCTVSEEPTGIDLPLLDPANTITTVTGPSAFSIPLPIRQKLCSSLDAPQTRGHDWRMLAHKLNLDRYLNYFATKSSPTGVILDLWEAQNFPDGNLSMLAAVLEEMGRHETVVSLAAEGQY

SEQ ID NO: 13940 - protein, 931 aa, Homo sapiens
MRKGLRATAARCGLGLGYLLQMLVLPALALLSASGTGSAAQDDDFFHELPETFPSDPPEPLPHFLIEPEEAYIVKNKPVNLYCKASPATQIYFKCNSEWVHQKDHIVDERVDETSGLIVREVSIEISRQQVEELFGPEDYWCQCVAWSSAGTTKSRKAYVRIAYLRKTFEQEPLGKEVSLEQEVLLQCRPPEGIPVAEVEWLKNEDIIDPVEDRNFYITIDHNLIIKQARLSDTANYTCVAKNIVAKRKSTTATVIVYVNGGWSTWTEWSVCNSRCGRGYQKRTRTCTNPAPLNGGAFCEGQSVQKIACTTLCPVDGRWTPWSKWSTCGTECTHWRRRECTAPAPKNGGKDCDGLVLQSKNCTDGLCMQTAPDSDDVALYVGIVIAVIVCLAISVVVALFVYRKNHRDFESDIIDSSALNGGFQPVNIKAARQDLLAVPPDLTSAAAMYRGPVYALHDVSDKIPMTNSPILDPLPNLKIKVYNTSGAVTPQDDLSEFTSKLSPQMTQSLLENEALSLKNQSLARQTDPSCTAFGSFNSLGGHLIVPNSGVSLLIPAGAIPQGRVYEMYVTVHRKETMRPPMDDSQTLLTPVVSCGPPGALLTRPVVLTMHHCADPNTEDWKILLKNQAAQGQWEDVVVVGEENFTTPCYIQLDAEACHILTENLSTYALVGHSTTKAAAKRLKLAIFGPLCCSSLEYSIRVYCLDDTQDALKEILHLERQMGGQLLEEPKALHFKGSTHNLRLSIHDIAHSLWKSKLLAKYQEIPFYHVWSGSQRNLHCTFTLERFSLNTVELVCKLCVRQVEGEGQIFQLNCTVSEEPTGIDLPLLDPANTITTVTGPSAFSIPLPIRQKLCSSLDAPQTRGHDWRMLAHKLNLDRYLNYFATKSSPTGVILDLWEAQNFPDGNLSMLAAVLEEMGRHETVVSLAAEGQY

SEQ ID NO: 13941 - protein, 260 aa, Homo sapiens
MRKGLRATAARCGLGLGYLLQMLVLPALALLSASGTGSAAQDDDFFHELPETFPSDPPEPLPHFLIEPEEAYIVKNKPVNLYCKASPATQIYFKCNSEWVHQKDHIVDERVDETSGLIVREVSIEISRQQVEELFGPEDYWCQCVAWSSAGTTKSRKAYVRIAYLRKTFEQEPLGKEVSLEQEVLLQCRPPEGIPVAEVEWLKNEDIIDPVEDRNFYITIDHNLIIKQARLSDTANYTCVAKNIVAKRKSTTATVIVYGP

SEQ ID NO: 13942 - protein, 597 aa, Homo sapiens
MRKGLRATAARCGLGLGYLLQMLVLPALALLSASGTGSAAQDDDFFHELPETFPSDPPEPLPHFLIEPEEAYIVKNKPVNLYCKASPATQIYFKCNSEWVHQKDHIVDERVDETSGLIVREVSIEISRQQVEELFGPEDYWCQCVAWSSAGTTKSRKAYVRIAYLRKTFEQEPLGKEVSLEQEVLLQCRPPEGIPVAEVEWLKNEDIIDPVEDRNFYITIDHNLIIKQARLSDTANYTCVAKNIVAKRKSTTATVIVYVNGGWSTWTEWSVCNSRCGRGYQKRTRTCTNPAPLNGGAFCEGQSVQKIACTTLCPVDGRWTPWSKWSTCGTECTHWRRRECTAPAPKNGGKDCDGLVLQSKNCTDGLCMQSFIYPISTEQRTQNEYGFSSAPDSDDVALYVGIVIAVIVCLAISVVVALFVYRKNHRDFESDIIDSSALNGGFQPVNIKAARQDLLAVPPDLTSAAAMYRGPVYALHDVSDKIPMTNSPILDPLPNLKIKVYNTSGAVTPQDDLSEFTSKLSPQMTQSLLENEALSLKNQSLARQTDPSCTAFGSFNSLGGHLIVPNSGVSLLIPAGAIPQGRVYEMYVTVHRKETMR

SEQ ID NO: 13943 - protein, 745 aa, Homo sapiens
MRKGLRATAARCGLGLGYLLQMLVLPALALLSASGTGSAAQDDDFFHELPETFPSDPPEPLPHFLIEPEEAYIVKNKPVNLYCKASPATQIYFKCNSEWVHQKDHIVDERVDETSGLIVREVSIEISRQQVEELFGPEDYWCQCVAWSSAGTTKSRKAYVRIAYLRKTFEQEPLGKEVSLEQEVLLQCRPPEGIPVAEVEWLKNEDIIDPVEDRNFYITIDHNLIIKQARLSDTANYTCVAKNIVAKRKSTTATVIVYVNGGWSTWTEWSVCNSRCGRGYQKRTRTCTNPAPLNGGAFCEGQSVQKIACTTLCPVDGRWTPWSKWSTCGTECTHWRRRECTAPAPKNGGKDCDGLVLQSKNCTDGLCMQSFIYPISTEQRTQNEYGFSSAPDSDDVALYVGIVIAVIVCLAISVVVALFVYRKNHRDFESDIIDSSALNGGFQPVNIKAARQDLLAVPPDLTSAAAMYRGPVYALHDVSDKIPMTNSPILDPLPNLKIKVYNTSGAVTPQDDLSEFTSKLSPQMTQSLLENEALSLKNQSLARQTDPSCTAFGSFNSLGGHLIVPNSGVSLLIPAGAIPQGRVYEMYVTVHRKETMRPPMDDSQTLLTPVVSCGPPGALLTRPVVLTMHHCADPNTEDWKILLKNQAAQGQWEDVVVVGEENFTTPCYIQLDAEACHILTENLSTYALVGHSTTKAAAKRLKLAIFGPLCCSSLEYSIRVYCLDDTQDALKEILHLERQMGGQLL

SEQ ID NO: 13944 - protein, 265 aa, Homo sapiens
MGLPWGQPHLGLQMLLLALNCLRPSLSLELVPYTPQITAWDLEGKVTATTFSLEQPRCVFDGLASASDTVWLVVAFSNASRGFQNPETLADIPASPQLLTDGHYMTLPLSPDQLPCGDPMAGSGGAPVLRVGHDHGCHQQPFCNAPLPGPGPYREDPRIHRHLARAAKWQHDRHYLHPLFSGRPPTLGLLGSLYHALLQPVVAGGGPGAAADRLLHGQALHDPPHPTQRGRHTAGGLQAWPGPPPQPQPLAWPLCMGLGEMGRWE

SEQ ID NO: 13945 - protein, 276 aa, Homo sapiens
MGLPWGQPHLGLQMLLLALNCLRPSLSLELVPYTPQITAWDLEGKVTATTFSLEQPRCVFDGLASASDTVWLVVAFSNASRGFQNPETLADIPASPQLLTDGHYMTLPLSPDQLPCGDPMAGSGGAPVLRVGHDHGCHQQPFCNAPLPGPGPYRVKFLLMDTRGSPRAETKWSDPITLHQGKTPGSIDTWPGRRSGSMIVITSILSSLAGLLLLAFLAASTMRFSSLWWPEEAPEQLRIGSFMGKRYMTHHIPPREAATLPVGCKPGLDPLPSLSP

SEQ ID NO: 13946 - protein, 320 aa, Homo sapiens
MGLPWGQPHLGLQMLLLALNCLRPSLSLGEWGSWMDASSQTQGAGGPAGVIGPWAPAPLRLGEAAPGTPTPVSVAHLLSPVATELVPYTPQITAWDLEGKVTATTFSLEQPRCVFDGLASASDTVWLVVAFSNASRGFQNPETLADIPASPQLLTDGHYMTLPLSPDQLPCGDPMAGSGGAPVLRVGHDHGCHQQPFCNAPLPGPGPYREDPRIHRHLARAAKWQHDRHYLHPLFSGRPPTLGLLGSLYHALLQPVVAGGGPGAAADRLLHGQALHDPPHPTQRGRHTAGGLQAWPGPPPQPQPLAWPLCMGLGEMGRWE

SEQ ID NO: 13947 - protein, 920 aa, Homo sapiens
MATVAANPAAAAAAVAAAAAVTEDREPQHEELPGLDSQWRQIENGESGRERPLRAGESWFLVEKHWYKQWEAYVQGGDQDSSTFPGCINNATLFQDEINWRLKEGLVEGEDYVLLPAAAWHYLVSWYGLEHGQPPIERKVIELPNIQKVEVYPVELLLVRHNDLGKSHTVQFSHTDSIGLVLRTARERFLVEPQEDTRLWAKNSEGSLDRLYDTHITVLDAALETGQLIIMETRKKDGTWPSAQLHVMNNNMSEEDEDFKGQPGICGLTNLGNTCFMNSALQCLSNVPQLTEYFLNNCYLEELNFRNPLGMKGEIAEAYADLVKQAWSGHHRSIVPHVFKNKVGHFASQFLGYQQHDSQELLSFLLDGLHEDLNRVKKKEYVELCDAAGRPDQEVAQEAWQNHKRRNDSVIVDTFHGLFKSTLVCPDCGNVSVTFDPFCYLSVPLPISHKRVLEVFFIPMDPRRKPEQHRLVVPKKGKISDLCVALSKHTGISPERMMVADVFSHRFYKLYQLEEPLSSILDRDDIFVYEVSGRIEAIEGSREDIVVPVYLRERTPARDYNNSYYGLMLFGHPLLVSVPRDRFTWEGLYNVLMYRLSRYVTKPNSDDEDDGDEKEDDEEDKDDVPGPSTGGSLRDPEPEQAGPSSGVTNRCPFLLDNCLGTSQWPPRRRRKQLFTLQTVNSNGTSDRTTSPEEVHAQPYIAIDWEPEMKKRYYDEVEAEGYVKHDCVGYVMKKAPVRLQECIELFTTVETLEKENPWYCPSCKQHQLATKKLDLWMLPEILIIHLKRFSYTKFSREKLDTLVEFPIRDLDFSEFVIQPQNESNPELYKYDLIAVSNHYGGMRDGHYTTFACNKDSGQWHYFDDNSVSPVNENQIESKAAYVLFYQRQDVARRLLSPAGSSGAPASPACSSPPSSEFMDVN

SEQ ID NO: 13948 - protein, 963 aa, Homo sapiens
MAVAPRLFGGLCFRFRDQNPEVAVEGRLPISHSCVGCRRERTAMATVAANPAAAAAAVAAAAAVTEDREPQHEELPGLDSQWRQIENGESGRERPLRAGESWFLVEKHWYKQWEAYVQGGDQDSSTFPGCINNATLFQDEINWRLKEGLVEGEDYVLLPAAAWHYLVSWYGLEHGQPPIERKVIELPNIQKVEVYPVELLLVRHNDLGKSHTVQFSHTDSIGLVLRTARERFLVEPQEDTRLWAKNSEGSLDRLYDTHITVLDAALETGQLIIMETRKKDGTWPSAQLHVMNNNMSEEDEDFKGQPGICGLTNLGNTCFMNSALQCLSNVPQLTEYFLNNCYLEELNFRNPLGMKGEIAEAYADLVKQAWSGHHRSIVPHVFKNKVGHFASQFLGYQQHDSQELLSFLLDGLHEDLNRVKKKEYVELCDAAGRPDQEVAQEAWQNHKRRNDSVIVDTFHGLFKSTLVCPDCGNVSVTFDPFCYLSVPLPISHKRVLEVFFIPMDPRRKPEQHRLVVPKKGKISDLCVALSKHTGISPERMMVADVFSHRFYKLYQLEEPLSSILDRDDIFVYEVSGRIEAIEGSREDIVVPVYLRERTPARDYNNSYYGLMLFGHPLLVSVPRDRFTWEGLYNVLMYRLSRYVTKPNSDDEDDGDEKEDDEEDKDDVPGPSTGGSLRDPEPEQAGPSSGVTNRCPFLLDNCLGTSQWPPRRRRKQLFTLQTVNSNGTSDRTTSPEEVHAQPYIAIDWEPEMKKRYYDEVEAEGYVKHDCVGYVMKKAPVRLQECIELFTTVETLEKENPWYCPSCKQHQLATKKLDLWMLPEILIIHLKRFSYTKFSREKLDTLVEFPIRDLDFSEFVIQPQNESNPELYKYDLIAVSNHYGGMRDGHYTTFACNKDSGQWHYFDDNSVSPVNENQIESKAAYVLFYQRQDVARRLLSPAGSSGAPASPACSSPPSSEFMDVN

SEQ ID NO: 13949 - protein, 49 aa, Homo sapiens
METRKKDGTWPSAQLHVMNNNMSEEDEDFKGQPGICGLTNLGNTCFMNS

SEQ ID NO: 13950 - protein, 140 aa, Homo sapiens
METRKKDGTWPSAQLHVMNNNMSEEDEDFKGQPGICGLTNLGNTCFMNSALQCLSNVPQLTEYFLNNCYLEELNFRNPLGMKGEIAEAYADLVKQAWSGHHRSIVPHVFKNKVGHFASQFLGYQQHDSQELLSFLLDGLH

SEQ ID NO: 13951 - protein, 494 aa, Homo sapiens
MPLYSVTVKWGKEKFEGVELNTDEPPMVFKAQLFALTGVQPARQKVMVKGGTLKDDDWGNIKIKNGMTLLMMGSADALPEEPSAKTVFVEDMTEEQLASAMELPCGLTNLGNTCYMNATVQCIRSVPELKDALKRYAGALRASGEMASAQYITAALRDLFDSMDKTSSSIPPIILLQFLHMAFPQFAEKGEQGQYLQQDANECWIQMMRVLQQKLEAIEDDSVKETDSSSASAATPSKKKSLIDQFFGVEFETTMKCTESEEEEVTKGKENQLQLSCFINQEVKYLFTGLKLRLQEEITKQSPTLQRNALYIKSSKISRLPAYLTIQMVRFFYKEKESVNAKVLKDVKFPLMLDMYELCTPELQEKMVSFRSKFKDLEDKKVNQQPNTSDKKSSPQKEVKYEPFSFADDIGSNNCGYYDLQAVLTHQGRSSSSGHYVSWVKRKQDEWIKFDDDKVSIVTPEDILRLSGGGDWHIAYVLLYGPRRVEIMEEESEQ

SEQ ID NO: 13952 - protein, 459 aa, Homo sapiens
MPLYSVTVKWGKEKFEGVELNTDEPPMVFKAQLFALTGVQPARQKVMVKGGTLKDDDWGNIKIKNMELPCGLTNLGNTCYMNATVQCIRSVPELKDALKRYAGALRASGEMASAQYITAALRDLFDSMDKTSSSIPPIILLQFLHMAFPQFAEKGEQGQYLQQDANECWIQMMRVLQQKLEAIEDDSVKETDSSSASAATPSKKKSLIDQFFGVEFETTMKCTESEEEEVTKGKENQLQLSCFINQEVKYLFTGLKLRLQEEITKQSPTLQRNALYIKSSKISRLPAYLTIQMVRFFYKEKESVNAKVLKDVKFPLMLDMYELCTPELQEKMVSFRSKFKDLEDKKVNQQPNTSDKKSSPQKEVKYEPFSFADDIGSNNCGYYDLQAVLTHQGRSSSSGHYVSWVKRKQDEWIKFDDDKVSIVTPEDILRLSGGGDWHIAYVLLYGPRRVEIMEEESEQ

SEQ ID NO: 13953 - protein, 483 aa, Homo sapiens
MPLYSVTVKWGKEKFEGVELNTDEPPMVFKAQLFALTGVQPARQKVMVKGGTLKGMTLLMMGSADALPEEPSAKTVFVEDMTEEQLASAMELPCGLTNLGNTCYMNATVQCIRSVPELKDALKRYAGALRASGEMASAQYITAALRDLFDSMDKTSSSIPPIILLQFLHMAFPQFAEKGEQGQYLQQDANECWIQMMRVLQQKLEAIEDDSVKETDSSSASAATPSKKKSLIDQFFGVEFETTMKCTESEEEEVTKGKENQLQLSCFINQEVKYLFTGLKLRLQEEITKQSPTLQRNALYIKSSKISRLPAYLTIQMVRFFYKEKESVNAKVLKDVKFPLMLDMYELCTPELQEKMVSFRSKFKDLEDKKVNQQPNTSDKKSSPQKEVKYEPFSFADDIGSNNCGYYDLQAVLTHQGRSSSSGHYVSWVKRKQDEWIKFDDDKVSIVTPEDILRLSGGGDWHIAYVLLYGPRRVEIMEEESEQ

SEQ ID NO: 13954 - protein, 448 aa, Homo sapiens
MPLYSVTVKWGKEKFEGVELNTDEPPMVFKAQLFALTGVQPARQKVMVKGGTLKMELPCGLTNLGNTCYMNATVQCIRSVPELKDALKRYAGALRASGEMASAQYITAALRDLFDSMDKTSSSIPPIILLQFLHMAFPQFAEKGEQGQYLQQDANECWIQMMRVLQQKLEAIEDDSVKETDSSSASAATPSKKKSLIDQFFGVEFETTMKCTESEEEEVTKGKENQLQLSCFINQEVKYLFTGLKLRLQEEITKQSPTLQRNALYIKSSKISRLPAYLTIQMVRFFYKEKESVNAKVLKDVKFPLMLDMYELCTPELQEKMVSFRSKFKDLEDKKVNQQPNTSDKKSSPQKEVKYEPFSFADDIGSNNCGYYDLQAVLTHQGRSSSSGHYVSWVKRKQDEWIKFDDDKVSIVTPEDILRLSGGGDWHIAYVLLYGPRRVEIMEEESEQ

SEQ ID NO: 13955 - protein, 20 aa, Homo sapiens
MVFKAQLFALTGVQPARQKV

SEQ ID NO: 13956 - protein, 28 aa, Homo sapiens
MVFKAQLFALTGVQPARQKVMVKGGTLK

SEQ ID NO: 13957 - protein, 33 aa, Homo sapiens
  SITE 1: note = misc_feature - Xaa can be any naturally occurring amino acid
XALTGVQPARQKVMVKGGTLKDFHEITFFKNRE

SEQ ID NO: 13958 - protein, 106 aa, Homo sapiens
HWTAYLRNKVDTYVEFPLRGLDMKCYLLEPENSGPESCLYDLAAVVVHHGSGVGSGHYTAYATHEGRWFHFNDSTVTLTDEETVVKAKAYILFYVEHQAKAGSDKL

SEQ ID NO: 13959 - protein, 56 aa, Homo sapiens
MECPHLSSSVCIAPDSAKFPNGSPSSWCCSAFKCLSGVTVLCPQRVLYVAQAGLEL

SEQ ID NO: 13960 - protein, 56 aa, Homo sapiens; identical to SEQ ID NO: 13959

SEQ ID NO: 13961 - protein, 132 aa, Homo sapiens
MECPHLSSSVCIAPDSAKFPNGSPSSWCCSEMEFHHFTKAGLELLDSSNLPASASQSVGTTVCRSNKSPWVCLTCSSVHCGRYVNGHAKKHYEDAQVPLTNHKKSEKQDKVQHTVCMDCSSYSTYCYRCDDF

SEQ ID NO: 13962 - protein, 79 aa, Homo sapiens
MECPHLSSSVCIAPDSAKFPNGSPSSWCCSGAINSRTPMNSCATFWTTYTWNFRAVSTVFPAQQFCRRILLCLQVTSVA

SEQ ID NO: 13963 - protein, 55 aa, Homo sapiens
MECPHLSSSVCIAPDSAKFPNGSPSSWCCSVCRSNKSPWVCLTCSSVHCGRIWGT

SEQ ID NO: 13964 - protein, 520 aa, Homo sapiens
MECPHLSSSVCIAPDSAKFPNGSPSSWCCSVCRSNKSPWVCLTCSSVHCGRYVNGHAKKHYEDAQVPLTNHKKSEKQDKVQHTVCMDCSSYSTYCYRCDDFVVNDTKLGLVQKVREHLQNLENSAFTADRHKKRKLLENSTLNSKLLKVNGSTTAICATGLRNLGNTCFMNAILQSLSNIEQFCCYFKELPAVELRNGKTAGRRTYHTRSQGDNNVSLVEEFRKTLCALWQGSQTAFSPESLFYVVWKIMPNFRGYQQQDAHEFMRYLLDHLHLELQGGFNGVSRSAILQENSTLSASNKCCINGASTVVTAIFGGILQNEVNCLICGTESRKFDPFLDLSLDIPSQFRSKRSKNQENGPVCSLRDCLRSFTDLEELDETELYMCHKCKKKQKSTKKFWIQKLPKVLCLHLKRFHWTAYLRNKVDTYVEFPLRGLDMKCYLLEPENSGPESCLYDLAAVVVHHGSGVGSGHYTAYATHEGRWFHFNDSTVTLTDEETVVKAKAYILFYVEHQAKAGSDKL

SEQ ID NO: 13965 - protein, 133 aa, Homo sapiens
MECPHLSSSVCIAPDSAKFPNGSPSSWCCSVCRSNKSPWVCLTCSSVHCGSYRCDDFVVNDTKLGLVQKVREHLQNLENSAFTADRHKKRKLLENSTLNSKLLKVNGSTTAICATGLRNLGNTCFMNAILQSL

SEQ ID NO: 13966 - protein, 476 aa, Homo sapiens
MECPHLSSSVCIAPDSAKFPNGSPSSWCCSVCRSNKSPWVCLTCSSVHCGSYRCDDFVVNDTKLGLVQKVREHLQNLENSAFTADRHKKRKLLENSTLNSKLLKVNGSTTAICATGLRNLGNTCFMNAILQSLSNIEQFCCYFKELPAVELRNGKTAGRRTYHTRSQGDNNVSLVEEFRKTLCALWQGSQTAFSPESLFYVVWKIMPNFRGYQQQDAHEFMRYLLDHLHLELQGGFNGVSRSAILQENSTLSASNKCCINGASTVVTAIFGGILQNEVNCLICGTESRKFDPFLDLSLDIPSQFRSKRSKNQENGPVCSLRDCLRSFTDLEELDETELYMCHKCKKKQKSTKKFWIQKLPKVLCLHLKRFHWTAYLRNKVDTYVEFPLRGLDMKCYLLEPENSGPESCLYDLAAVVVHHGSGVGSGHYTAYATHEGRWFHFNDSTVTLTDEETVVKAKAYILFYVEHQAKAGSDKL

SEQ ID NO: 13967 - protein, 431 aa, Homo sapiens
MENTEGYRCDDFVVNDTKLGLVQKVREHLQNLENSAFTADRHKKRKLLENSTLNSKLLKVNGSTTAICATGLRNLGNTCFMNAILQSLSNIEQFCCYFKELPAVELRNGKTAGRRTYHTRSQGDNNVSLVEEFRKTLCALWQGSQTAFSPESLFYVVWKIMPNFRGYQQQDAHEFMRYLLDHLHLELQGGFNGVSRSAILQENSTLSASNKCCINGASTVVTAIFGGILQNEVNCLICGTESRKFDPFLDLSLDIPSQFRSKRSKNQENGPVCSLRDCLRSFTDLEELDETELYMCHKCKKKQKSTKKFWIQKLPKVLCLHLKRFHWTAYLRNKVDTYVEFPLRGLDMKCYLLEPENSGPESCLYDLAAVVVHHGSGVGSGHYTAYATHEGRWFHFNDSTVTLTDEETVVKAKAYILFYVEHQAKAGSDKL

SEQ ID NO: 13968 - protein, 503 aa, Homo sapiens
MMQLVYCVFFFLLVCRSNKSPWVCLTCSSVHCGRYVNGHAKKHYEDAQVPLTNHKKSEKQDKVQHTVCMDCSSYSTYCYRCDDFVVNDTKLGLVQKVREHLQNLENSAFTADRHKKRKLLENSTLNSKLLKVNGSTTAICATGLRNLGNTCFMNAILQSLSNIEQFCCYFKELPAVELRNGKTAGRRTYHTRSQGDNNVSLVEEFRKTLCALWQGSQTAFSPESLFYVVWKIMPNFRGYQQQDAHEFMRYLLDHLHLELQGGFNGVSRSAILQENSTLSASNKCCINGASTVVTAIFGGILQNEVNCLICGTESRKFDPFLDLSLDIPSQFRSKRSKNQENGPVCSLRDCLRSFTDLEELDETELYMCHKCKKKQKSTKKFWIQKLPKVLCLHLKRFHWTAYLRNKVDTYVEFPLRGLDMKCYLLEPENSGPESCLYDLAAVVVHHGSGVGSGHYTAYATHEGRWFHFNDSTVTLTDEETVVKAKAYILFYVEHQAKAGSDKL

SEQ ID NO: 13969 - protein, 39 aa, Homo sapiens
MQSPPHLAVCRSNKSPWVCLTCSSVHCGRYVNGHAKKHY

SEQ ID NO: 13970 - protein, 126 aa, Homo sapiens
MQSPPHLAVCRSNKSPWVCLTCSSVHCGRYVNGHAKKHYEDAQVPLTNHKKSEKQDKVQHTVCMDCSSYSTYCYRCDDFVVNDTKLGLVQKVREHLQNLENSAFTADRHKKRKLLENSTLNSKLLK

SEQ ID NO: 13971 - protein, 498 aa, Homo sapiens
MQSPPHLAVCRSNKSPWVCLTCSSVHCGRYVNGHAKKHYEDAQVPLTNHKKSEKQDKVQHTVCMDCSSYSTYCYRCDDFVVNDTKLGLVQKVREHLQNLENSAFTADRHKKRKLLENSTLNSKLLKVNGSTTAICATGLRNLGNTCFMNAILQSLSNIEQFCCYFKELPAVELRNGKTAGRRTYHTRSQGDNNVSLVEEFRKTLCALWQGSQTAFSPESLFYVVWKIMPNFRGYQQQDAHEFMRYLLDHLHLELQGGFNGVSRSAILQENSTLSASNKCCINGASTVVTAIFGGILQNEVNCLICGTESRKFDPFLDLSLDIPSQFRSKRSKNQENGPVCSLRDCLRSFTDLEELDETELYMCHKCKKKQKSTKKFWIQKLPKVLCLHLKRFHWTAYLRNKVDTYVEFPLRGLDMKCYLLEPENSGPESCLYDLAAVVVHHGSGVGSGHYTAYATHEGRWFHFNDSTVTLTDEETVVKAKAYILFYVEHQAKAGSDKL

SEQ ID NO: 13972 - protein, 443 aa, Homo sapiens
  SITE 1: note = misc_feature - Xaa can be any naturally occurring amino acid
XKVQHTVCMDCSSYSTYCYRCDDFVVNDTKLGLVQKVREHLQNLENSAFTADRHKKRKLLENSTLNSKLLKVNGSTTAICATGLRNLGNTCFMNAILQSLSNIEQFCCYFKELPAVELRNGKTAGRRTYHTRSQGDNNVSLVEEFRKTLCALWQGSQTAFSPESLFYVVWKIMPNFRGYQQQDAHEFMRYLLDHLHLELQGGFNGVSRSAILQENSTLSASNKCCINGASTVVTAIFGGILQNEVNCLICGTESRKFDPFLDLSLDIPSQFRSKRSKNQENGPVCSLRDCLRSFTDLEELDETELYMCHKCKKKQKSTKKFWIQKLPKVLCLHLKRFHWTAYLRNKVDTYVEFPLRGLDMKCYLLEPENSGPESCLYDLAAVVVHHGSGVGSGHYTAYATHEGRWFHFNDSTVTLTDEETVVKAKAYILFYVEHQAKAGSDKL

SEQ ID NO: 13973 - protein, 6 aa, Homo sapiens
  SITE 1: note = misc_feature - Xaa can be any naturally occurring amino acid
XSYSTY

SEQ ID NO: 13974 - protein, 211 aa, Homo sapiens
KNADHLLHLKTKGPENIICSCISPCGSWIAYSTVSRFFLYRLNYEHDNISLKRVSKMPAFLRSALQILFSEDSTKLFVASNQGALHIVQLSGGSFKHLHAFQPQSGTVEAMCLLAVSPDGNWLAASGTSAGVHVYNVKQLKLHCTVPAYNFPVTAMAIAPNTNNLVIAHSDQQPLLFMDLLDERTLVAVERPLDDIIAQLPPPIKKKKFGT

SEQ ID NO: 13975 - protein, 182 aa, Homo sapiens
MASVDLSYCSFLHLLLLCSPILACPPLNGIRCVAYNNQSNRLAVSRTDGTVEIYNLSANYFQEKFFPGHESRATEALCWAEGQRLFSAGLNGEIMEYDLQALNIKYAMDAFGGPIWSMAASPSGSQLLVGCEDGSVKLFQITPDKIQFERNFDRQKSRILSLSWHPSGTHIAAGSIDYISVF

SEQ ID NO: 13976 - protein, 79 aa, Homo sapiens
MEYDLQALNIKYAMDAFGGPIWSMAASPSGSQLLVGCEDGSVKLFQITPDKIQFERNFDRQKSRILSLSWHPSGTHIAA

SEQ ID NO: 13977 - protein, 143 aa, Homo sapiens
MEYDLQALNIKYAMDAFGGPIWSMAASPSGSQLLVGCEDGSVKLFQITPDKIQFERNFDRQKSRILSLSWHPSGTHIAAGSIDYISVFDVKSGSAVHKMIVDRQYMGVSKRKCIVWGVAFLSDGTIISVDSAGKVQFWDSATG

SEQ ID NO: 13978 - protein, 148 aa, Homo sapiens
MGEFKVHRVRFFNYVPSGIRCVAYNNQSNRLAVSRTDGTVEIYNLSANYFQEKFFPGHESRATEALCWAEGQRLFSAGLNGEIMEYDLQALNIKYAMDAFGGPIWSMAASPSGSQLLVGCEDGSVKLFQITPDKIQFERNFDRQKSRI

SEQ ID NO: 13979 - protein, 571 aa, Homo sapiens
MGEFKVHRVRFFNYVPSGIRCVAYNNQSNRLAVSRTDGTVEIYNLSANYFQEKFFPGHESRATEALCWAEGQRLFSAGLNGEIMEYDLQALNIKYAMDAFGGPIWSMAASPSGSQLLVGCEDGSVKLFQITPDKIQFERNFDRQKSRILSLSWHPSGTHIAAGSIDYISVFDVKSGSAVHKMIVDRQYMGVSKRKCIVWGVAFLSDGTIISVDSAGKVQFWDSATGTLVKSHLIANADVQSIAVADQEDSFVVGTAEGTVFHFQLVPVTSNSSEKQWVRTKPFQHHTHDVRTVAHSPTALISGGTDTHLVFRPLMEKVEVKNYDAALRKITFPHRCLISCSKKRQLLLFQFAHHLELWRLGSTVATGTVEAMCLLAVSPDGNWLAASGTSAGVHVYNVKQLKLHCTVPAYNFPVTAMAIAPNTNNLVIAHSDQQVFEYSIPDKQYTDWSRTVQKQGFHHLWLQRDTPITHISFHPKRPMHILLHDAYMFCIIDKSLPLPNDKTLLYNPFPPTNESDVIRRRTAHAFKISKIYKPLLFMDLLDERTLVAVERPLDDIIAQLPPPIKKKKFGT

SEQ ID NO: 13980 - protein, 686 aa, Homo sapiens
MGEFKVHRVRFFNYVPSGIRCVAYNNQSNRLAVSRTDGTVEIYNLSANYFQEKFFPGHESRATEALCWAEGQRLFSAGLNGEIMEYDLQALNIKYAMDAFGGPIWSMAASPSGSQLLVGCEDGSVKLFQITPDKIQFERNFDRQKSRILSLSWHPSGTHIAAGSIDYISVFDVKSGSAVHKMIVDRQYMGVSKRKCIVWGVAFLSDGTIISVDSAGKVQFWDSATGTLVKSHLIANADVQSIAVADQEDSFVVGTAEGTVFHFQLVPVTSNSSEKQWVRTKPFQHHTHDVRTVAHSPTALISGGTDTHLVFRPLMEKVEVKNYDAALRKITFPHRCLISCSKKRQLLLFQFAHHLELWRLGSTVATGKNGDTLPLSKNADHLLHLKTKGPENIICSCISPCGSWIAYSTVSRFFLYRLNYEHDNISLKRVSKMPAFLRSALQILFSEDSTKLFVASNQGALHIVQLSGGSFKHLHAFQPQSGTVEAMCLLAVSPDGNWLAASGTSAGVHVYNVKQLKLHCTVPAYNFPVTAMAIAPNTNNLVIAHSDQQVFEYSIPDKQYTDWSRTVQKQGFHHLWLQRDTPITHISFHPKRPMHILLHDAYMFCIIDKSLPLPNDKTLLYNPFPPTNESDVIRRRTAHAFKISKIYKPLLFMDLLDERTLVAVERPLDDIIAQLPPPIKKKKFGT

SEQ ID NO: 13981 - protein, 625 aa, Homo sapiens
MGEFKVHRVRFFNYVPSGIRCVAYNNQSNRLAVSRTDGTVEIYNLSANYFQEKFFPGHESRATEALCWAEGQRLFSAGLNGEIMEYDLQALNIKYAMDAFGGPIWSMAASPSGSQLLVGCEDGSVKLFQITPDKIQFERNFDRQKSRILSLSWHPSGTHIAAGSIDYISVFDVKSGSAVHKMIVDRQYMGVSKRKCIVWGVAFLSDGTIISVDSAGKVQFWDSATGTLVKSHLIANADVQSIAVADQEDSFVVGTAEGTVFHFQLVPVTSNSSEKQWVRTKPFQHHTHDVRTVAHSPTALISGGTDTHLVFRPLMEKVEVKNYDAALRKITFPHRCLISCSKKRQLLLFQFAHHLELWRLGSTVATGKNGDTLPLSKNADHLLHLKTKGPENIICSCISPCGSWIAYSTVSRFFLYRLNYEHDNISLKRVSKMPAFLRSALQILFSEDSTKLFVASNQGALHIVQLSGGSFKHLHAFQPQSGTVEAMCLLAVSPDGNWLAASGTSAGVHVYNVKQLKLHCTVPAYNFPVTAMAIAPNTNNLVIAHSDQQVFEYSIPDKQYTDWSRTVQKQGFHHLWLQRDTPITHISFHPKRPMHILLHDAYMFCIIDKSLVSSSLLPPKSSSES

SEQ ID NO: 13982 - protein, 198 aa, Homo sapiens
MVFLQFFPGHESRATEALCWAEGQRLFSAGLNGEIMEYDLQALNIKYAMDAFGGPIWSMAASPSGSQLLVGCEDGSVKLFQITPDKIQFERNFDRQKSRILSLSWHPSGTHIAAGSIDYISVFDVKSGSAVHKMIVDRQYMGVSKRKCIVWGVAFLSDGTIISVDSAGKVQFWDSATGTLVKSHLIANADVQSIAVAD

SEQ ID NO: 13983 - protein, 700 aa, Homo sapiens
RSTSGAEPESARARGAGAERGEHREGERGAAGIRCVAYNNQSNRLAVSRTDGTVEIYNLSANYFQEKFFPGHESRATEALCWAEGQRLFSAGLNGEIMEYDLQALNIKYAMDAFGGPIWSMAASPSGSQLLVGCEDGSVKLFQITPDKIQFERNFDRQKSRILSLSWHPSGTHIAAGSIDYISVFDVKSGSAVHKMIVDRQYMGVSKRKCIVWGVAFLSDGTIISVDSAGKVQFWDSATGTLVKSHLIANADVQSIAVADQEDSFVVGTAEGTVFHFQLVPVTSNSSEKQWVRTKPFQHHTHDVRTVAHSPTALISGGTDTHLVFRPLMEKVEVKNYDAALRKITFPHRCLISCSKKRQLLLFQFAHHLELWRLGSTVATGKNGDTLPLSKNADHLLHLKTKGPENIICSCISPCGSWIAYSTVSRFFLYRLNYEHDNISLKRVSKMPAFLRSALQILFSEDSTKLFVASNQGALHIVQLSGGSFKHLHAFQPQSGTVEAMCLLAVSPDGNWLAASGTSAGVHVYNVKQLKLHCTVPAYNFPVTAMAIAPNTNNLVIAHSDQQVFEYSIPDKQYTDWSRTVQKQGFHHLWLQRDTPITHISFHPKRPMHILLHDAYMFCIIDKSLPLPNDKTLLYNPFPPTNESDVIRRRTAHAFKISKIYKPLLFMDLLDERTLVAVERPLDDIIAQLPPPIKKKKFGT

SEQ ID NO: 13984 - protein, 139 aa, Homo sapiens
METNVFHLMLCVTSARTHKSTSLCFGHFNSYPSLPLIHDLLLEISFQLSAPHEDARLTPEELERASLLQILPEMLGAERGDILRKADSSTNIFNPRGNLRKFQDFSGQDPNILLSHLLARIWKPYKKRETPDCFWKYCV

SEQ ID NO: 13985 - protein, 139 aa, Homo sapiens
MYKLASCCLLFIGFLNPLLSLPLLDSREISFQLSAPHEDARLTPEELERASLLQILPEMLGAERGDILRKADSSTNIFNPRGNLRKFQDFSGQDPNILLSHLLARIWKPYKKQRRKLRQDLRLWKKEPGLRIFKNYVWV

SEQ ID NO: 13986 - protein, 124 aa, Homo sapiens
MYKLASCCLLFIGFLNPLLSLPLLDSREISFQLSAPHEDARLTPEELERASLLQILPEMLGAERGDILRKADSSTNIFNPRGNLRKFQDFSGQDPNILLSHLLARIWKPYKKRETPDCFWKYCV

SEQ ID NO: 13987 - protein, 38 aa, Homo sapiens
MNKILSSTVCFGLLTLLSVLSFLQSVHGRPYLTQGNEI

SEQ ID NO: 13988 - protein, 81 aa, Homo sapiens
MNKILSSTVCFGLLTLLSVLSFLQSVHGRPYLTQGNEIFPDKKYTNREELLLALLNKNFDFQRPFNTAGKAKRTASGGEGF

SEQ ID NO: 13989 - protein, 81 aa, Homo sapiens; identical to SEQ ID NO: 13988

SEQ ID NO: 13990 - protein, 119 aa, Homo sapiens
MNKILSSTVCFGLLTLLSVLSFLQSVHGRPYLTQGNEIFPDKKYTNREELLLALLNKNFDFQRPFNTDLALPNKLEELNQLEKLKEQLVEEKDSETSYAVDGLFSSHPSKRACFWKYCV

SEQ ID NO: 13991 - protein, 119 aa, Homo sapiens; identical to SEQ ID NO: 13990

SEQ ID NO: 13992 - protein, 132 aa, Homo sapiens
MNKILSSTVCFGLLTLLSVLSFLQSVHGRPYLTQGNEIFPDKKYTNREELLLALLNKNFDFQRPFNTDLALPNKLEELNQLEKLKEQLVEEKDSETSYAVDGLFSSHPSKRALSSRTLIQLNCLQHCQNRRG

SEQ ID NO: 13993 - protein, 1240 aa, Homo sapiens
MKSCAVSLTTAAVAFGDEAKKMAEGKASRESEEESVSLTVEEREALGGMDSRLFGFVRLHEDGARTKTLLGKAVRCYESLILKAEGKVESDFFCQLGHFNLLLEDYSKALSAYQRYYSLQADYWKNAAFLYGLGLVYFYYNAFHWAIKAFQDVLYVDPSFCRAKEIHLRLGLMFKVNTDYKSSLKHFQLALIDCNPCTLSNAEIQFHIAHLYETQRKYHSAKEAYEQLLQTENLPAQVKATVLQQLGWMHHNMDLVGDKATKESYAIQYLQKSLEADPNSGQSWYFLGRCYSSIGKVQDAFISYRQSIDKSEASADTWCSIGVLYQQQNQPMDALQAYICAVQLDHGHAAAWMDLGTLYESCNQPQDAIKCYLNAARSKRCSNTSTLAARIKFLQNGSDNWNGGQSLSHHPVQQVYSLCLTPQKLQHLEQLRANRDNLNPAQKHQLEQLESQFVLMQQMRHKEVAQVRTTGIHNGAITDSSLPTNSVSNRQPHGALTRVSSVSQPGVRPACVEKLLSSGAFSAGCIPCGTSKILGSTDTILLGSNCIAGSESNGNVPYLQQNTHTLPHNHTDLNSSTEEPWRKQLSNSAQGLHKSQSSCLSGPNEEQPLFSTGSAQYHQATSTGIKKANEHLTLPSNSVPQGDADSHLSCHTATSGGQQGIMFTKESKPSKNRSLVPETSRHTGDTSNGCADVKGLSNHVHQLIADAVSSPNHGDSPNLLIADNPQLSALLIGKANGNVGTGTCDKVNNIHPAVHTKTDHSVASSPSSAISTATPSPKSTEQRSINSVTSLNSPHSGLHTVNGEGLGKSQSSTKVDLPLASHRSTSQILPSMSVSICPSSTEVLKACRNPGKNGLSNSCILLDKCPPPRPPTSPYPPLPKDKLNPPTPSIYLENKRDAFFPPLHQFCTNPKNPVTVIRGLAGALKLDLGLFSTKTLVEANNEHMVEVRTQLLQPADENWDPTGTKKIWRCESNRSHTTIAKYAQYQASSFQESLREENEKRTQHKDHSDNESTSSENSGRRRKGPFKTIKFGTNIDLSDNKKWKLQLHELTKLPAFARVVSAGNLLTHVGHTILGMNTVQLYMKVPGSRTPGHQENNNFCSVNINIGPGDCEWFVVPEDYWGVLNDFCEKNNLNFLMSSWWPNLEDLYEANVPVYRFIQRPGDLVWINAGTVHWVQAVGWCNNIAWNVGPLTACQYKLAVERYEWNKLKSVKSPVPMVHLSWNMARNIKVSDPKLFEMIK

SEQ ID NO: 13994 - protein, 1079 aa, Homo sapiens
MKSCAVSLTTAAVAFGDEAKKMAEGKASRESEEESVSLTVEEREALGGMDSRLFGFVRLHEDGARTKTLLGKAVRCYESLILKAEGKVESDFFCQLGHFNLLLEDYSKALSAYQRYYSLQADYWKNAAFLYGLGLVYFYYNAFHWAIKAFQDVLYVDPSFCRAKEIHLRLGLMFKVNTDYKSSLKHFQLALIDCNPCTLSNAEIQFHIAHLYETQRKYHSAKEAYEQLLQTENLPAQVKATVLQQLGWMHHNMDLVGDKATKESYAIQYLQKSLEADPNSGQSWYFLGRCYSSIGKVQDAFISYRQSIDKSEASADTWCSIGVLYQQQNQPMDALQAYICAVQLDHGHAAAWMDLGTLYESCNQPQDAIKCYLNAARSKRCSNTSTLAARIKFLQNGSDNWNGGQSLSHHPVQQVYSLCLTPQKLQHLEQLRANRDNLNPAQKHQLEQLESQFVLMQQMRHKEVAQVRTTGIHNGAITDSSLPTNSVSNRQPHGALTRVSSVSQPGVRPACVEKLLSSGAFSAGCIPCGTSKILGSTDTILLGSNCIAGSESNGNVPYLQQNTHTLPHNHTDLNSSTEEPWRKQLSNSAQGLHKSQSSCLSGPNEEQPLFSTGSAQYHQATSTGIKKANEHLTLPSNSVPQGDADSHLSCHTATSGGQQGIMFTKESKPSKNRSLVPETSRHTGDTSNGCADVKGLSNHVHQLIADAVSSPNHGDSPNLLIADNPQLSALLIGKANGNVGTGTCDKVNNIHPAVHTKTDHSVASSPSSAISTATPSPKSTEQRSINSVTSLNSPHSGLHTVNGEGLGKSQSSTKVDLPLASHRSTSQILPSMSVSICPSSTEVLKACRNPGKNGLSNSCILLDKCPPPRPPTSPYPPLPKDKLNPPTPSIYLENKRDAFFPPLHQFCTNPKNPVTVIRGLAGALKLDLGLFSTKTLVEANNEHMVEVRTQLLQPADENWDPTGTKKIWRCESNRSHTTIAKYAQYQASSFQESLRAGMQWCDLSSLQPPPPGFKRFSHLSLPNSWNYRHLPSCPTNFCIFVETGFHHVGQACLELLTSGGLLASASQSAGITGVSHHAR

SEQ ID NO: 13995 - protein, 1347 aa, Homo sapiens
MKSCAVSLTTAAVAFGDEAKKMAEGKASRESEEESVSLTVEEREALGGMDSRLFGFVRLHEDGARTKTLLGKAVRCYESLILKAEGKVESDFFCQLGHFNLLLEDYSKALSAYQRYYSLQADYWKNAAFLYGLGLVYFYYNAFHWAIKAFQDVLYVDPSFCRAKEIHLRLGLMFKVNTDYKSSLKHFQLALIDCNPCTLSNAEIQFHIAHLYETQRKYHSAKEAYEQLLQTENLPAQVKATVLQQLGWMHHNMDLVGDKATKESYAIQYLQKSLEADPNSGQSWYFLGRCYSSIGKVQDAFISYRQSIDKSEASADTWCSIGVLYQQQNQPMDALQAYICAVQLDHGHAAAWMDLGTLYESCNQPQDAIKCYLNAARSKRCSNTSTLAARIKFLQNGSDNWNGGQSLSHHPVQQVYSLCLTPQKLQHLEQLRANRDNLNPAQKHQLEQLESQFVLMQQMRHKEVAQVRTTGIHNGAITDSSLPTNSVSNRQPHGALTRVSSVSQPGVRPACVEKLLSSGAFSAGCIPCGTSKILGSTDTILLGSNCIAGSESNGNVPYLQQNTHTLPHNHTDLNSSTEEPWRKQLSNSAQGLHKSQSSCLSGPNEEQPLFSTGSAQYHQATSTGIKKANEHLTLPSNSVPQGDADSHLSCHTATSGGQQGIMFTKESKPSKNRSLVPETSRHTGDTSNGCADVKGLSNHVHQLIADAVSSPNHGDSPNLLIADNPQLSALLIGKANGNVGTGTCDKVNNIHPAVHTKTDHSVASSPSSAISTATPSPKSTEQRSINSVTSLNSPHSGLHTVNGEGLGKSQSSTKVDLPLASHRSTSQILPSMSVSICPSSTEVLKACRNPGKNGLSNSCILLDKCPPPRPPTSPYPPLPKDKLNPPTPSIYLENKRDAFFPPLHQFCTNPKNPVTVIRGLAGALKLDLGLFSTKTLVEANNEHMVEVRTQLLQPADENWDPTGTKKIWRCESNRSHTTIAKYAQYQASSFQESLREENEKRTQHKDHSDNESTSSENSGRRRKGPFKTIKFGTNIDLSDNKKWKLQLHELTKLPAFARVVSAGNLLTHVGHTILGMNTVQLYMKVPGSRTPGHQENNNFCSVNINIGPGDCEWFVVPEDYWGVLNDFCEKNNLNFLMSSWWPNLEDLYEANVPVYRFIQRPGDLVWINAGTVHWVQAVGWCNNIAWNVGPLTACQYKLAVERYEWNKLKSVKSPVPMVHLSWNMARNIKVSDPKLFEMIKYCLLKILKQYQTLREALVAAGKEVIWHGRTNDEPAHYCSICEVEVFNLLFVTNESNTQKTYIVHCHDCARKTSKSLENFVVLEQYKMEDLIQVYDQFTLALSLSSSS

SEQ ID NO: 13996 - protein, 1392 aa, Homo sapiens
MKSCAVSLTTAAVAFGDEAKKMAEGKASRESEEESVSLTVEEREALGGMDSRLFGFVRLHEDGARTKTLLGKAVRCYESLILKAEGKVESDFFCQLGHFNLLLEDYSKALSAYQRYYSLQADYWKNAAFLYGLGLVYFYYNAFHWAIKAFQDVLYVDPSFCRAKEIHLRLGLMFKVNTDYKSSLKHFQLALIDCNPCTLSNAEIQFHIAHLYETQRKYHSAKEAYEQLLQTENLPAQVKATVLQQLGWMHHNMDLVGDKATKESYAIQYLQKSLEADPNSGQSWYFLGRCYSSIGKVQDAFISYRQSIDKSEASADTWCSIGVLYQQQNQPMDALQAYICAVQLDHGHAAAWMDLGTLYESCNQPQDAIKCYLNAARSKRCSNTSTLAARIKFLQAQLCNLPQSSLQNKTKLLPSIEEAWSLPIPAELTSRQGAMNTAQQNGSDNWNGGQSLSHHPVQQVYSLCLTPQKLQHLEQLRANRDNLNPAQKHQLEQLESQFVLMQQMRHKEVAQVRTTGIHNGAITDSSLPTNSVSNRQPHGALTRVSSVSQPGVRPACVEKLLSSGAFSAGCIPCGTSKILGSTDTILLGSNCIAGSESNGNVPYLQQNTHTLPHNHTDLNSSTEEPWRKQLSNSAQGLHKSQSSCLSGPNEEQPLFSTGSAQYHQATSTGIKKANEHLTLPSNSVPQGDADSHLSCHTATSGGQQGIMFTKESKPSKNRSLVPETSRHTGDTSNGCADVKGLSNHVHQLIADAVSSPNHGDSPNLLIADNPQLSALLIGKANGNVGTGTCDKVNNIHPAVHTKTDHSVASSPSSAISTATPSPKSTEQRSINSVTSLNSPHSGLHTVNGEGLGKSQSSTKVDLPLASHRSTSQILPSMSVSICPSSTEVLKACRNPGKNGLSNSCILLDKCPPPRPPTSPYPPLPKDKLNPPTPSIYLENKRDAFFPPLHQFCTNPKNPVTVIRGLAGALKLDLGLFSTKTLVEANNEHMVEVRTQLLQPADENWDPTGTKKIWRCESNRSHTTIAKYAQYQASSFQESLREENEKRTQHKDHSDNESTSSENSGRRRKGPFKTIKFGTNIDLSDNKKWKLQLHELTKLPAFARVVSAGNLLTHVGHTILGMNTVQLYMKVPGSRTPGHQENNNFCSVNINIGPGDCEWFVVPEDYWGVLNDFCEKNNLNFLMSSWWPNLEDLYEANVPVYRFIQRPGDLVWINAGTVHWVQAVGWCNNIAWNVGPLTACQYKLAVERYEWNKLKSVKSPVPMVHLSWNMARNIKVSDPKLFEMIKYCLLKILKQYQTLREALVAAGKEVIWHGRTNDEPAHYCSICEVEVFNLLFVTNESNTQKTYIVHCHDCARKTSKSLENFVVLEQYKMEDLIQVYDQFTLALSLSSSS

SEQ ID NO: 13997 - protein, 1389 aa, Homo sapiens
MKSCAVSLTTAAVAFGDEAKKMAEGKASRESEEESVSLTVEEREALGGMDSRLFGFVRLHEDGARTKTLLGKAVRCYESLILKAEGKVESDFFCQLGHFNLLLEDYSKALSAYQRYYSLQADYWKNAAFLYGLGLVYFYYNAFHWAIKAFQDVLYVDPSFCRAKEIHLRLGLMFKVNTDYKSSLKHFQLALIDCNPCTLSNAEIQFHIAHLYETQRKYHSAKEAYEQLLQTENLPAQVKATVLQQLGWMHHNMDLVGDKATKESYAIQYLQKSLEADPNSGQSWYFLGSVLYQQQNQPMDALQAYICAVQLDHGHAAAWMDLGTLYESCNQPQDAIKCYLNAARSKRCSNTSTLAARIKFLQAQLCNLPQSSLQNKTKLLPSIEEAWSLPIPAELTSRQGAMNTAQQQSLSLHMITSSQVEGLSSPAKKKRTSSPTKNGSDNWNGGQSLSHHPVQQVYSLCLTPQKLQHLEQLRANRDNLNPAQKHQLEQLESQFVLMQQMRHKEVAQVRTTGIHNGAITDSSLPTNSVSNRQPHGALTRVSSVSQPGVRPACVEKLLSSGAFSAGCIPCGTSKILGSTDTILLGSNCIAGSESNGNVPYLQQNTHTLPHNHTDLNSSTEEPWRKQLSNSAQGLHKSQSSCLSGPNEEQPLFSTGSAQYHQATSTGIKKANEHLTLPSNSVPQGDADSHLSCHTATSGGQQGIMFTKESKPSKNRSLVPETSRHTGDTSNGCADVKGLSNHVHQLIADAVSSPNHGDSPNLLIADNPQLSALLIGKANGNVGTGTCDKVNNIHPAVHTKTDHSVASSPSSAISTATPSPKSTEQRSINSVTSLNSPHSGLHTVNGEGLGKSQSSTKVDLPLASHRSTSQILPSMSVSICPSSTEVLKACRNPGKNGLSNSCILLDKCPPPRPPTSPYPPLPKDKLNPPTPSIYLENKRDAFFPPLHQFCTNPKNPVTVIRGLAGALKLDLGLFSTKTLVEANNEHMVEVRTQLLQPADENWDPTGTKKIWRCESNRSHTTIAKYAQYQASSFQESLREENEKRTQHKDHSDNESTSSENSGRRRKGPFKTIKFGTNIDLSDNKKWKLQLHELTKLPAFARVVSAGNLLTHVGHTILGMNTVQLYMKVPGSRTPGHQENNNFCSVNINIGPGDCEWFVVPEDYWGVLNDFCEKNNLNFLMSSWWPNLEDLYEANVPVYRFIQRPGDLVWINAGTVHWVQAVGWCNNIAWNVGPLTACQYKLAVERYEWNKLKSVKSPVPMVHLSWNMARNIKVSDPKLFEMIKYCLLKILKQYQTLREALVAAGKEVIWHGRTNDEPAHYCSICEVEVFNLLFVTNESNTQKTYIVHCHDCARKTSKSLENFVVLEQYKMEDLIQVYDQFTLALSLSSSS

SEQ ID NO: 13998 - protein, 1335 aa, Homo sapiens
MKSCAVSLTTAAVAFGDEAKKMAEGKASRESEEESVSLTVEEREALGGMDSRLFGFVRLHEDGARTKTLLGKAVRCYESLILKAEGKVESDFFCQLGHFNLLLEDYSKALSAYQRYYSLQADYWKNAAFLYGLGLVYFYYNAFHWAIKAFQDVLYVDPSFCRAKEIHLRLGLMFKVNTDYKSSLKHFQLALIDCNPCTLSNAEIQFHIAHLYETQRKYHSAKEAYEQLLQTENLPAQVKATVLQQLGWMHHNMDLVGDKATKESYAIQYLQKSLEADPNSGQSWYFLGRCYSSIGKVQDAFISYRQSIDKSEASADTWCSIGVLYQQQNQPMDALQAYICAVQLDHGHAAAWMDLGTLYESCNQPQDAIKCYLNAARSKRCSNTSTLAARIKFLQAQLCNLPQSSLQNKTKLLPSIEEAWSLPIPAELTSRQGAMNTAQQNGSDNWNGGQSLSHHPVQQVYSLCLTPQKLQHLEQLRANRDNLNPAQKHQLEQLESQFVLMQQMRHKEVAQVRTTGIHNGAITDSSLPTNSVSNRQPHGALTRVSSVSQPGVRPACVEKLLSSGAFSAGCIPCGTSKILGSTDTILLGSNCIAGSESNGNVPYLQQNTHTLPHNHTDLNSSTEEPWRKQLSNSAQGLHKSQSSCLSGPNEEQPLFSTGSAQYHQATSTGIKKANEHLTLPSNSVPQGDADSHLSCHTATSGGQQGIMFTKESKPSKNRSLVPETSRHTGDTSNGCADVKGLSNHVHQLIADAVSSPNHGDSPNLLIADNPQLSALLIGKANGNVGTGTCDKVNNIHPAVHTKTDHSVASSPSSAISTATPSPKSTEQRSINSVTSLNSPHSGLHTVNGEGLGKSQSSTKVDLPLASHRSTSQILPSMSVSICPSSTEVLKACRNPGKNGLSNSCILLDKCPPPRPPTSPYPPLPKDKLNPPTPSIYLENKRDAFFPPLHQFCTNPKNPVTVIRGLAGALKLDLGLFSTKTLVEANNEHMVEVRTQLLQPADENWDPTGTKKIWRCESNRSHTTIAKYAQYQASSFQESLREENEKRTQHKDHSDNESTSSENSGRRRKGPFKTIKFGTNIDLSDNKKWKLQLHELTKLPAFARVVSAGNLLTHVGHTILGMNTVQLYMKVPGSRTPGHQENNNFCSVNINIGPGDCEWFVVPEDYWGVLNDFCEKNNLNFLMSSWWPNLEDLYEANVPVYRFIQRPGDLVWINAGTVHWVQAVGWCNNIAWNVGPLTACQYKLAVERYEWNKLKSVKSPVPMVHLSWNMARNIKVSDPKLFEMIKYCLLKILKQYQTLREALVAAGKEVIWHGRTNDEPAHYCSICEALSLSSSS

SEQ ID NO: 13999 - protein, 1444 aa, Homo sapiens
MKSCAVSLTTAAVAFGDEAKKMAEGKASRESEEESVSLTVEEREALGGMDSRLFGFVRLHEDGARTKTLLGKAVRCYESLILKAEGKVESDFFCQLGHFNLLLEDYSKALSAYQRYYSLQADYWKNAAFLYGLGLVYFYYNAFHWAIKAFQDVLYVDPSFCRAKEIHLRLGLMFKVNTDYKSSLKHFQLALIDCNPCTLSNAEIQFHIAHLYETQRKYHSAKEAYEQLLQTENLPAQVKATVLQQLGWMHHNMDLVGDKATKESYAIQYLQKSLEADPNSGQSWYFLGRCYSSIGKVQDAFISYRQSIDKSEASADTWCSIGVLYQQQNQPMDALQAYICAVQLDHGHAAAWMDLGTLYESCNQPQDAIKCYLNAARSKRCSNTSTLAARIKFLQAQLCNLPQSSLQNKTKLLPSIEEAWSLPIPAELTSRQGAMNTAQQAYRAHDPNTEHVLNHSQTPILQQSLSLHMITSSQVEGLSSPAKKKRTSSPTKNGSDNWNGGQSLSHHPVQQVYSLCLTPQKLQHLEQLRANRDNLNPAQKHQLEQLESQFVLMQQMRHKEVAQVRTTGIHNGAITDSSLPTNSVSNRQPHGALTRVSSVSQPGVRPACVEKLLSSGAFSAGCIPCGTSKILGSTDTILLGSNCIAGSESNGNVPYLQQNTHTLPHNHTDLNSSTEEPWRKQLSNSAQGLHKSQSSCLSGPNEEQPLFSTGSAQYHQATSTGIKKANEHLTLPSNSVPQGDADSHLSCHTATSGGQQGIMFTKESKPSKNRSLVPETSRHTGDTSNGCADVKGLSNHVHQLIADAVSSPNHGDSPNLLIADNPQLSALLIGKANGNVGTGTCDKVNNIHPAVHTKTDHSVASSPSSAISTATPSPKSTEQRSINSVTSLNSPHSGLHTVNGEGLGKSQSSTKVDLPLASHRSTSQILPSMSVSICPSSTEVLKACRNPGKNGLSNSCILLDKCPPPRPPTSPYPPLPKDKLNPPTPSIYLENKRDAFFPPLHQFCTNPKNPVTVIRGLAGALKLDLGLFSTKTLVEANNEHMVEVRTQLLQPADENWDPTGTKKIWRCESNRSHTTIAKYAQYQASSFQESLREENEKRTQHKDHSDNESTSSENSGRRRKGPFKTIKFGTNIDLSDNKKWKLQLHELTKLPAFARVVSAGNLLTHVGHTILGMNTVQLYMKVPGSRTPGHQENNNFCSVNINIGPGDCEWFVVPEDYWGVLNDFCEKNNLNFLMSSWWPNLEDLYEANVPVYRFIQRPGDLVWINAGTVHWVQAVGWCNNIAWNVGPLTACQYKLAVERYEWNKLKSVKSPVPMVHLSWNMARNIKVSDPKLFEMIKYCLLKILKQYQTLREALVAAGKEVIWHGRTNDEPAHYCSICEVEVFNLLFVTNESNTQKTYIVHCHDCARKTSKSLENFVVLEQYKMEDLIQVYDQFTLALSLSSSS

SEQ ID NO: 14000 - protein, 1363 aa, Homo sapiens
MKSCAVSLTTAAVAFGDEAKKMAEGKASRESEEESVSLTVEEREALGGMDSRLFGFVRLHEDGARTKTLLGKAVRCYESLILKAEGKVESDFFCQLGHFNLLLEDYSKALSAYQRYYSLQADYWKNAAFLYGLGLVYFYYNAFHWAIKAFQDVLYVDPSFCRAKEIHLRLGLMFKVNTDYKSSLKHFQLALIDCNPCTLSNAEIQFHIAHLYETQRKYHSAKEAYEQLLQTENLPAQVKATVLQQLGWMHHNMDLVGDKATKESYAIQYLQKSLEADPNSGQSWYFLGRCYSSIGKVQDAFISYRQSIDKSEASADTWCSIGVLYQQQNQPMDALQAYICAVQLDHGHAAAWMDLGTLYESCNQPQDAIKCYLNAARSKRCSNTSTLAARIKFLQNGSDNWNGGQSLSHHPVQQVYSLCLTPQKLQHLEQLRANRDNLNPAQKHQLEQLESQFVLMQQMRHKEVAQVRTTGIHNGAITDSSLPTNSVSNRQPHGALTRVSSVSQPGVRPACVEKLLSSGAFSAGCIPCGTSKILGSTDTILLGSNCIAGSESNGNVPYLQQNTHTLPHNHTDLNSSTEEPWRKQLSNSAQAYLGHLTGFIQDNCNKGLHKSQSSCLSGPNEEQPLFSTGSAQYHQATSTGIKKANEHLTLPSNSVPQGDADSHLSCHTATSGGQQGIMFTKESKPSKNRSLVPETSRHTGDTSNGCADVKGLSNHVHQLIADAVSSPNHGDSPNLLIADNPQLSALLIGKANGNVGTGTCDKVNNIHPAVHTKTDHSVASSPSSAISTATPSPKSTEQRSINSVTSLNSPHSGLHTVNGEGLGKSQSSTKVDLPLASHRSTSQILPSMSVSICPSSTEVLKACRNPGKNGLSNSCILLDKCPPPRPPTSPYPPLPKDKLNPPTPSIYLENKRDAFFPPLHQFCTNPKNPVTVIRGLAGALKLDLGLFSTKTLVEANNEHMVEVRTQLLQPADENWDPTGTKKIWRCESNRSHTTIAKYAQYQASSFQESLREENEKRTQHKDHSDNESTSSENSGRRRKGPFKTIKFGTNIDLSDNKKWKLQLHELTKLPAFARVVSAGNLLTHVGHTILGMNTVQLYMKVPGSRTPGHQENNNFCSVNINIGPGDCEWFVVPEDYWGVLNDFCEKNNLNFLMSSWWPNLEDLYEANVPVYRFIQRPGDLVWINAGTVHWVQAVGWCNNIAWNVGPLTACQYKLAVERYEWNKLKSVKSPVPMVHLSWNMARNIKVSDPKLFEMIKYCLLKILKQYQTLREALVAAGKEVIWHGRTNDEPAHYCSICEVEVFNLLFVTNESNTQKTYIVHCHDCARKTSKSLENFVVLEQYKMEDLIQVYDQFTLALSLSSSS

SEQ ID NO: 14001 - protein, 1211 aa, Homo sapiens
MKSCAVSLTTAAVAFGDEAKKMAEGKASRESEEESVSLTVEEREALGGMDSRLFGFVRLHEDGARTKTLLGKAVRCYESLILKAEGKVESDFFCQLGHFNLLLEDYSKALSAYQRYYSLQADYWKNAAFLYGLGLVYFYYNAFHWAIKAFQDVLYVDPSFCRAKEIHLRLGLMFKVNTDYKSSLKHFQLALIDCNPCTLSNAEIQFHIAHLYETQRKYHSAKEAYEQLLQTENLPAQVKATVLQQLGWMHHNMDLVGDKATKESYAIQYLQKSLEADPNSGQSWYFLGRCYSSIGKVQDAFISYRQSIDKSEASADTWCSIGVLYQQQNQPMDALQAYICAVQLDHGHAAAWMDLGTLYESCNQPQDAIKCYLNAARSKRCSNTSTLAARIKFLQAQLCNLPQSSLQNKTKLLPSIEEAWSLPIPAELTSRQGAMNTAQQNGSDNWNGGQSLSHHPVQQVYSLCLTPQKLQHLEQLRANRDNLNPAQKHQLEQLESQFVLMQQMRHKEVAQGLHKSQSSCLSGPNEEQPLFSTGSAQYHQATSTGIKKANEHLTLPSNSVPQGDADSHLSCHTATSGGQQGIMFTKESKPSKNRSLVPETSRHTGDTSNGCADVKGLSNHVHQLIADAVSSPNHGDSPNLLIADNPQLSALLIGKANGNVGTGTCDKVNNIHPAVHTKTDHSVASSPSSAISTATPSPKSTEQRSINSVTSLNSPHSGLHTVNGEGLGKSQSSTKVDLPLASHRSTSQILPSMSVSICPSSTEVLKACRNPGKNGLSNSCILLDKCPPPRPPTSPYPPLPKDKLNPPTPSIYLENKRDAFFPPLHQFCTNPKNPVTVIRGLAGALKLDLGLFSTKTLVEANNEHMVEVRTQLLQPADENWDPTGTKKIWRCESNRSHTTIAKYAQYQASSFQESLREENEKRTQHKDHSDNESTSSENSGRRRKGPFKTIKFGTNIDLSDNKKWKLQLHELTKLPAFARVVSAGNLLTHVGHTILGMNTVQLYMKVPGSRTPGHQENNNFCSVNINIGPGDCEWFVVPEDYWGVLNDFCEKNNLNFLMSSWWPNLEDLYEANVPVYRFIQRPGDLVWINAGTVHWVQAVGWCNNIAWNVGPLTACQYKLAVERYEWNKLKSVKSPVPMVHLSWNMARNIKVSDPKLFEMIKYCLLKILKQYQTLREALVAAGKEVIWHGRTNDEPAHYCSICEALSLSSSS

SEQ ID NO: 14002 - protein, 1399 aa, Homo sapiens
MKSCAVSLTTAAVAFGDEAKKMAEGKASRESEEESVSLTVEEREALGGMDSRLFGFVRLHEDGARTKTLLGKAVRCYESLILKAEGKVESDFFCQLGHFNLLLEDYSKALSAYQRYYSLQADYWKNAAFLYGLGLVYFYYNAFHWAIKAFQDVLYVDPSFCRAKEIHLRLGLMFKVNTDYKSSLKHFQLALIDCNPCTLSNAEIQFHIAHLYETQRKYHSAKEAYEQLLQTENLPAQVKATVLQQLGWMHHNMDLVGDKATKESYAIQYLQKSLEADPNSGQSWYFLGRCYSSIGKVQDAFISYRQSIDKSEASADTWCSIGVLYQQQNQPMDALQAYICAVQLDHGHAAAWMDLGTLYESCNQPQDAIKCYLNAARSKRCSNTSTLAARIKFLQAYRAHDPNTEHVLNHSQTPILQQSLSLHMITSSQVEGLSSPAKKKRTSSPTKNGSDNWNGGQSLSHHPVQQVYSLCLTPQKLQHLEQLRANRDNLNPAQKHQLEQLESQFVLMQQMRHKEVAQVRTTGIHNGAITDSSLPTNSVSNRQPHGALTRVSSVSQPGVRPACVEKLLSSGAFSAGCIPCGTSKILGSTDTILLGSNCIAGSESNGNVPYLQQNTHTLPHNHTDLNSSTEEPWRKQLSNSAQGLHKSQSSCLSGPNEEQPLFSTGSAQYHQATSTGIKKANEHLTLPSNSVPQGDADSHLSCHTATSGGQQGIMFTKESKPSKNRSLVPETSRHTGDTSNGCADVKGLSNHVHQLIADAVSSPNHGDSPNLLIADNPQLSALLIGKANGNVGTGTCDKVNNIHPAVHTKTDHSVASSPSSAISTATPSPKSTEQRSINSVTSLNSPHSGLHTVNGEGLGKSQSSTKVDLPLASHRSTSQILPSMSVSICPSSTEVLKACRNPGKNGLSNSCILLDKCPPPRPPTSPYPPLPKDKLNPPTPSIYLENKRDAFFPPLHQFCTNPKNPVTVIRGLAGALKLDLGLFSTKTLVEANNEHMVEVRTQLLQPADENWDPTGTKKIWRCESNRSHTTIAKYAQYQASSFQESLREENEKRTQHKDHSDNESTSSENSGRRRKGPFKTIKFGTNIDLSDNKKWKLQLHELTKLPAFARVVSAGNLLTHVGHTILGMNTVQLYMKVPGSRTPGHQENNNFCSVNINIGPGDCEWFVVPEDYWGVLNDFCEKNNLNFLMSSWWPNLEDLYEANVPVYRFIQRPGDLVWINAGTVHWVQAVGWCNNIAWNVGPLTACQYKLAVERYEWNKLKSVKSPVPMVHLSWNMARNIKVSDPKLFEMIKYCLLKILKQYQTLREALVAAGKEVIWHGRTNDEPAHYCSICEVEVFNLLFVTNESNTQKTYIVHCHDCARKTSKSLENFVVLEQYKMEDLIQVYDQFTLALSLSSSS

SEQ ID NO: 14003 - protein, 1367 aa, Homo sapiens
MKSCAVSLTTAAVAFGDEAKKMAEGKASRESEEESVSLTVEEREALGGMDSRLFGFVRLHEDGARTKTLLGKAVRCYESLILKAEGKVESDFFCQLGHFNLLLEDYSKALSAYQRYYSLQADYWKNAAFLYGLGLVYFYYNAFHWAIKAFQDVLYVDPSFCRAKEIHLRLGLMFKVNTDYKSSLKHFQLALIDCNPCTLSNAEIQFHIAHLYETQRKYHSAKEAYEQLLQTENLPAQVKATVLQQLGWMHHNMDLVGDKATKESYAIQYLQKSLEADPNSGQSWYFLGRCYSSIGKVQDAFISYRQSIDKSEASADTWCSIGVLYQQQNQPMDALQAYICAVQLDHGHAAAWMDLGTLYESCNQPQDAIKCYLNAARSKRCSNTSTLAARIKFLQAQLCNLPQSSLQNKTKLLPSIEEAWSLPIPAELTSRQGAMNTAQQNGSDNWNGGQSLSHHPVQQVYSLCLTPQKLQHLEQLRANRDNLNPAQKHQLEQLESQFVLMQQMRHKEVAQVRTTGIHNGAITDSSLPTNSVSNRQPHGALTRVSSVSQPGVRPACVEKLLSSGAFSAGCIPCGTSKILGSTDTILLGSNCIAGSESNGNVPYLQQNTHTLPHNHTDLNSSTEEPWRKQLSNSAQGLHKSQSSCLSGPNEEQPLFSTGSAQYHQATSTGIKKANEHLTLPSNSVPQGDADSHLSCHTATSGGQQGIMFTKESKPSKNRSLVPETSRHTGDTSNGCADVKGLSNHVHQLIADAVSSPNHGDSPNLLIADNPQLSALLIGKANGNVGTGTCDKVNNIHPAVHTKTDHSVASSPSSAISTATPSPKSTEQRSINSVTSLNSPHSGLHTVNGEGLGKSQSSTKVDLPLASHRSTSQILPSMSVSICPSSTEVLKACRNPGKNGLSNSCILLDKCPPPRPPTSPYPPLPKDKLNPPTPSIYLENKRDAFFPPLHQFCTNPKNPVTVIRGLAGALKLDLGLFSTKTLVEANNEHMVEVRTQLLQPADENWDPTGTKKIWRCESNRSHTTIAKYAQYQASSFQESLREENEKRTQHKDHSDNESTSSEKWKLQLHELTKLPAFARVVSAGNLLTHVGHTILGMNTVQLYMKVPGSRTPGHQENNNFCSVNINIGPGDCEWFVVPEDYWGVLNDFCEKNNLNFLMSSWWPNLEDLYEANVPVYRFIQRPGDLVWINAGTVHWVQAVGWCNNIAWNVGPLTACQYKLAVERYEWNKLKSVKSPVPMVHLSWNMARNIKVSDPKLFEMIKYCLLKILKQYQTLREALVAAGKEVIWHGRTNDEPAHYCSICEVEVFNLLFVTNESNTQKTYIVHCHDCARKTSKSLENFVVLEQYKMEDLIQVYDQFTLALSLSSSS

SEQ ID NO: 14004 - protein, 207 aa, Homo sapiens
MKSCAVSLTTAAVAFGDEAKKMAEGKASRESEEESVSLTVEEREALGGMDSRLFGFVRLHEDGARTKTLLGKAVRCYESLILKAEGKVESDFFCQLGHFNLLLEDYSKALSAYQRYYSLQADYWKNAAFLYGLGLVYFYYNAFHWAIKAFQDVLYVDPSFCRAKEIHLRLGLMFKVNTDYKSSLKHFQLALIDCNPCTLSNAESKYF

SEQ ID NO: 14005 - protein, 1264 aa, Homo sapiens
MKSCAVSLTTAAVAFGDEAKKMAEGKASRESEEESVSLTVEEREALGGMDSRLFGFVRLHEDGARTKTLLGKNAAFLYGLGLVYFYYNAFHWAIKAFQDVLYVDPSFCRAKEIHLRLGLMFKVNTDYKSSLKRKYHSAKEAYEQLLQTENLPAQVKATVLQQLGWMHHNMDLVGDKATKESYAIQYLQKSLEADPNSGQSWYFLGRCYSSIGKVQDAFISYRQSIDKSEASADTWCSIGVLYQQQNQPMDALQAYICAVQLDHGHAAAWMDLGTLYESCNQPQDAIKCYLNAARSKRCSNTSTLAARIKFLQNGSDNWNGGQSLSHHPVQQVYSLCLTPQKLQHLEQLRANRDNLNPAQKHQLEQLESQFVLMQQMRHKEVAQVRTTGIHNGAITDSSLPTNSVSNRQPHGALTRVSSVSQPGVRPACVEKLLSSGAFSAGCIPCGTSKILGSTDTILLGSNCIAGSESNGNVPYLQQNTHTLPHNHTDLNSSTEEPWRKQLSNSAQGLHKSQSSCLSGPNEEQPLFSTGSAQYHQATSTGIKKANEHLTLPSNSVPQGDADSHLSCHTATSGGQQGIMFTKESKPSKNRSLVPETSRHTGDTSNGCADVKGLSNHVHQLIADAVSSPNHGDSPNLLIADNPQLSALLIGKANGNVGTGTCDKVNNIHPAVHTKTDHSVASSPSSAISTATPSPKSTEQRSINSVTSLNSPHSGLHTVNGEGLGKSQSSTKVDLPLASHRSTSQILPSMSVSICPSSTEVLKACRNPGKNGLSNSCILLDKCPPPRPPTSPYPPLPKDKLNPPTPSIYLENKRDAFFPPLHQFCTNPKNPVTVIRGLAGALKLDLGLFSTKTLVEANNEHMVEVRTQLLQPADENWDPTGTKKIWRCESNRSHTTIAKYAQYQASSFQESLREENEKRTQHKDHSDNESTSSENSGRRRKGPFKTIKFGTNIDLSDNKKWKLQLHELTKLPAFARVVSAGNLLTHVGHTILGMNTVQLYMKVPGSRTPGHQENNNFCSVNINIGPGDCEWFVVPEDYWGVLNDFCEKNNLNFLMSSWWPNLEDLYEANVPVYRFIQRPGDLVWINAGTVHWVQAVGWCNNIAWNVGPLTACQYKLAVERYEWNKLKSVKSPVPMVHLSWNMARNIKVSDPKLFEMIKYCLLKILKQYQTLREALVAAGKEVIWHGRTNDEPAHYCSICEVEVFNLLFVTNESNTQKTYIVHCHDCARKTSKSLENFVVLEQYKMEDLIQVYDQFTLALSLSSSS

SEQ ID NO: 14006 - protein, 190 aa, Homo sapiens
MVEPLREKIRDLEKSFTQKYPPVKFLSEKDRKRILITGGAGFVGSHLTDKLMMDGHEVTVVDNFFTGRKRNVEHWIGHENFELINHDVVEPLYIEVDQIYHLASPASPPNYMYNPIKTLKTNTIGTLNMLGLAKRVGARLLLASTSEVYGDPEVHPQSEDYWGHVNPIGPRACYDEGKRVAETMCYAYMK

SEQ ID NO: 14007 - protein, 420 aa, Homo sapiens
MVSKALLRLVSAVNRRRMKLLLGIALLAYVASVWGNFVNMRSIQENGELKIESKIEEMVEPLREKIRDLEKSFTQKYPPVKFLSEKDRKRILITGGAGFVGSHLTDKLMMDGHEVTVVDNFFTGRKRNVEHWIGHENFELINHDVVEPLYIEVDQIYHLASPASPPNYMYNPIKTLKTNTIGTLNMLGLAKRVGARLLLASTSEVYGDPEVHPQSEDYWGHVNPIGPRACYDEGKRVAETMCYAYMKQEGVEVRVARIFNTFGPRMHMNDGRVVSNFILQALQGEPLTVYGSGSQTRAFQYVSDLVNGLVALMNSNVSSPVNLGNPEEHTILEFAQLIKNLVGSGSEIQFLSEAQDDPQKRKPDIKKAKLMLGWEPVVPLEEGLNKAIHYFRKELEYQANNQYIPKPKPARIKKGRTRHS

SEQ ID NO: 14008 - protein, 425 aa, Homo sapiens
MVSKALLRLVSAVNRRRMKLLLGIALLAYVASVWGNFVNMSFLLNRSIQENGELKIESKIEEMVEPLREKIRDLEKSFTQKYPPVKFLSEKDRKRILITGGAGFVGSHLTDKLMMDGHEVTVVDNFFTGRKRNVEHWIGHENFELINHDVVEPLYIEVDQIYHLASPASPPNYMYNPIKTLKTNTIGTLNMLGLAKRVGARLLLASTSEVYGDPEVHPQSEDYWGHVNPIGPRACYDEGKRVAETMCYAYMKQEGVEVRVARIFNTFGPRMHMNDGRVVSNFILQALQGEPLTVYGSGSQTRAFQYVSDLVNGLVALMNSNVSSPVNLGNPEEHTILEFAQLIKNLVGSGSEIQFLSEAQDDPQKRKPDIKKAKLMLGWEPVVPLEEGLNKAIHYFRKELEYQANNQYIPKPKPARIKKGRTRHS

SEQ ID NO: 14009 - protein, 171 aa, Homo sapiens [sequence omitted]

SEQ ID NO: 14010 - protein, 52 aa, Homo sapiens
MYNPIKTLKTNTIGTLNMLGLAKRVGARLLLASTSEVYGDPEVHPQSEDYWG

SEQ ID NO: 14011 - protein, 121 aa, Homo sapiens
MYNPIKTLKTNTIGTLNMLGLAKRVGARLLLASTSEVYGDPEVHPQSEDYWGHVNPIGPRACYDEGKRVAETMCYAYMKQEGVEVRVARIFNTFGPRMHMNDGRVVSNFILQALQGEPLTV

SEQ ID NO: 14012 - protein, 134 aa, Homo sapiens
MYNPIKTLKTNTIGTLNMLGLAKRVGARLLLASTSEVYGDPEVHPQSEDYWGHVNPIGPRACYDEGKRVAETMCYAYMKQEGVEVRVARIFNTFGPRMHMNDGRVVSNFILQALQGEPLTVYGSGSQTRAFQYV

SEQ ID NO: 14013 - protein, 252 aa, Homo sapiens
MYNPIKTLKTNTIGTLNMLGLAKRVGARLLLASTSEVYGDPEVHPQSEDYWGHVNPIGPRACYDEGKRVAETMCYAYMKQEGVEVRVARIFNTFGPRMHMNDGRVVSNFILQALQGEPLTVYGSGSQTRAFQYVSDLVNGLVALMNSNVSSPVNLGNPEEHTILEFAQLIKNLVGSGSEIQFLSEAQDDPQKRKPDIKKAKLMLGWEPVVPLEEGLNKAIHYFRKELEYQANNQYIPKPKPARIKKGRTRHS

SEQ ID NO: 14014 - protein, 91 aa, Homo sapiens
MGPGEGNCWFCWCLCPWLLSGSWVHLISGKSPSLTRPVMGGGGGVEMFLQFCLPWQNLDPGKGKQGRSPSEKGLCSPLTRSLAQATSAPRA

SEQ ID NO: 14015 - protein, 365 aa, Homo sapiens
MPGGKKVAGGGSSGATPTSAAATAPSGVRRLETSEGTSAQRDEEPEEEGEEDLRDGGVPFFVNRGGLPVDEATWERMWKHVAKIHPDGEKVAQRIRGATDLPKIPIPSVPTFQPSTPVPERLEAVQRYIRELQYNHTGTQFFEIKKSRPLTGLMDLAKEMTKEALPIKCLEAVILGIYLTNSMPTLERFPISFKTYFSGNYFRHIVLGVNFAGRYGALGMSRREDLMYKPPAFRTLSELVLDFEAAYGRCWHVLKKVKLGQSVSHDPHSVEQIEWKHSVLDVERLGRDDFRKELERHARDMRLKIGKGTGPPSPTKDRKKDVSSPQRAQSSPHRRNSRSERRPSGDKKTSEPKAMPDLNGYQIRV

SEQ ID NO: 14016 - protein, 204 aa, Homo sapiens
MPGGKKVAGGGSSGATPTSAAATAPSGVRRLETSEGTSAQRDEEPEEEGEEDLRDGGVPFFVNRGGLPVDEATWERMWKHVAKIHPDGEKVAQRIRGATDLPKIPIPSVPTFQPSTPVPERLEAVQRYIRELQYNHTGTQFFEIKKSRPLTGLMDLAKEMTKEALPIKCLEAVILGMYPSSPEGEGSGLLWASASCSESEGGVG

SEQ ID NO: 14017 - protein, 3396 aa, Homo sapiens
MFINIKSILWMCSTLIVTHALHKVKVGKSPPVRGSLSGKVSLPCHFSTMPTLPPSYNTSEFLRIKWSKIEVDKNGKDLKETTVLVAQNGNIKIGQDYKGRVSVPTHPEAVGDASLTVVKLLASDAGLYRCDVMYGIEDTQDTVSLTVDGVVFHYRAATSRYTLNFEAAQKACLDVGAVIATPEQLFAAYEDGFEQCDAGWLADQTVRYPIRAPRVGCYGDKMGKAGVRTYGFRSPQETYDVYCYVDHLDGDVFHLTVPSKFTFEEAAKECENQDARLATVGELQAAWRNGFDQCDYGWLSDASVRHPVTVARAQCGGGLLGVRTLYRFENQTGFPPPDSRFDAYCFKPKEATTIDLSILAETASPSLSKEPQMVSDRTTPIIPLVDELPVIPTEFPPVGNIVSFEQKATVQPQAITDSLATKLPTPTGSTKKPWDMDDYSPSASGPLGKLDISEIKEEVLQSTTGVSHYATDSWDGVVEDKQTQESVTQIEQIEVGPLVTSMEILKHIPSKEFPVTETPLVTARMILESKTEKKMVSTVSELVTTGHYGFTLGEEDDEDRTLTVGSDESTLIFDQIPEVITVSKTSEDTIHTHLEDLESVSASTTVSPLIMPDNNGSSMDDWEERQTSGRITEEFLGKYLSTTPFPSQHRTEIELFPYSGDKILVEGISTVIYPSLQTEMTHRRERTETLIPEMRTDTYTDEIQEEITKSPFMGKTEEEVFSGMKLSTSLSEPIHVTESSVEMTKSFDFPTLITKLSAEPTEVRDMEEDFTATPGTTKYDENITTVLLAHGTLSVEAATVSKWSWDEDNTTSKPLESTEPSASSKLPPALLTTVGMNGKDKDIPSFTEDGADEFTLIPDSTQKQLEEVTDEDIAAHGKFTIRFQPTTSTGIAEKSTLRDSTTEEKVPPITSTEGQVYATMEGSALGEVEDVDLSKPVSTVPQFAHTSEVEGLAFVSYSSTQEPTTYVDSSHTIPLSVIPKTDWGVLVPSVPSEDEVLGEPSQDILVIDQTRLEATISPETMRTTKITEGTTQEEFPWKEQTAEKPVPALSSTAWTPKEAVTPLDEQEGDGSAYTVSEDELLTGSERVPVLETTPVGKIDHSVSYPPGAVTEHKVKTDEVVTLTPRIGPKVSLSPGPEQKYETEGSSTTGFTSSLSPFSTHITQLMEETTTEKTSLEDIDLGSGLFEKPKATELIEFSTIKVTVPSDITTAFSSVDRLHTTSAFKPSSAITKKPPLIDREPGEETTSDMVIIGESTSHVPPTTLEDIVAKETETDIDREYFTTSSPPATQPTRPPTVEDKEAFGPQALSTPQPPASTKFHPDINVYIIEVRENKTGRMSDLSVIGHPIDSESKEDEPCSEETDPVHDLMAEILPEFPDIIEIDLYHSEENEEEEEECANATDVTTTPSVQYINGKHLVTTVPKDPEAAEARRGQFESVAPSQNFSDSSESDTHPFVIAKTELSTAVQPNESTETTESLEVTWKPETYPETSEHFSGGEPDVFPTVPFHEEFESGTAKKGAESVTERDTEVGHQAHEHTEPVSLFPEESSGEIAIDQESQKIAFARATEVTFGEEVEKSTSVTYTPTIVPSSASAYVSEEEAVTLIGNPWPDDLLSTKESWVEATPRQVVELSGSSSIPITEGSGEAEEDEDTMFTMVTDLSQRNTTDTLITLDTSRIITESFFEVPATTIYPVSEQPSAKVVPTKFVSETDTSEWISSTTVEEKKRKEEEGTTGTASTFEVYSSTQRSDQLILPFELESPNVATSSDSGTRKSFMSLTTPTQSEREMTDSTPVFTETNTLENLGAQTTEHSSIHQPGVQEGLTTLPRSPASVFMEQGSGEAAADPETTTVSSFSLNVEYAIQAEKEVAGTLSPHVETTFSTEPTGLVLSTVMDRVVAENITQTSREIVISERLGEPNYGAEIRGFSTGFPLEEDFSGDFREYSTVSHPIAKEETVMMEGSGDAAFRDTQTSPSTVPTSVHISHISDSEGPSSTMVSTSAFPWEEFTSSAEGSGEQLVTVSSSVVPVLPSAVQKFSGTASSIIDEGLGEVGTVNEIDRRSTILPTAEVEGTKAPVEKEEVKVSGTVSTNFPQTIEPAKLWSRQEVNPVRQEIESETTSEEQIQEEKSFESPQNSPATEQTIFDSQTFTETELKTTDYSVLTTKKTYSDDKEMKEEDTSLVNMSTPDPDANGLESYTTLPEATEKSHFFLATALVTESIPAEHVVTDSPIKKEESTKHFPKGMRPTIQESDTELLFSGLGSGEEVLPTLPTESVNFTEVEQINNTLYPHTSQVESTSSDKIEDFNRMENVAKEVGPLVSQTDIFEGSGSVTSTTLIEILSDTGAEGPTVAPLPFSTDIGHPQNQTVRWAEEIQTSRPQTITEQDSNKNSSTAEINETTTSSTDFLARAYGFEMAKEFVTSAPKPSDLYYEPSGEGSGEVDIVDSFHTSATTQATRQESSTTFVSDGSLEKHPEVPSAKAVTADGFPTVSVMLPLHSEQNKSSPDPTSTLSNTVSYERSTDGSFQDRFREFEDSTLKPNRKKPTENIIIDLDKEDKDLILTITESTILEILPELTSDKNTIIDIDHTKPVYEDILGMQTDIDTEVPSEPHDSNDESNDDSTQVQEIYEAAVNLSLTEETFEGSADVLASYTQATHDESMTYEDRSQLDHMGFHFTTGIPAPSTETELDVLLPTATSLPIPRKSATVIPEIEGIKAEAKALDDMFESSTLSDGQAIADQSEIIPTLGQFERTQEEYEDKKHAGPSFQPEFSSGAEEALVDHTPYLSIATTHLMDQSVTEVPDVMEGSNPPYYTDTTLAVSTFAKLSSQTPSSPLTIYSGSEASGHTEIPQPSALPGIDVGSSVMSPQDSFKEIHVNIEATFKPSSEEYLHITEPPSLSPDTKLEPSEDDGKPELLEEMEASPTELIAVEGTEILQDFQNKTDGQVSGEAIKMFPTIKTPEAGTVITTADEIELEGATQWPHSTSASATYGVEAGVVPWLSPQTSERPTLSSSPEINPETQAALIRGQDSTIAASEQQVAARILDSNDQATVNPVEFNTEVATPPFSLLETSNETDFLIGINEESVEGTAIYLPGPDRCKMNPCLNGGTCYPTETSYVCTCVPGYSGDQCELDFDECHSNPCRNGATCVDGFNTFRCLCLPSYVGALCEQDTETCDYGWHKFQGQCYKYFAHRRTWDAAERECRLQGAHLTSILSHEEQMFVNRVGHDYQWIGLNDKMFEHDFRWTDGSTLQYENWRPNQPDSFFSAGEDCVVIIWHENGQWNDVPCNYHLTYTCKKGTVACGQPPVVENAKTFGKMKPRYEINSLIRYHCKDGFIQRHLPTIRCLGNGRWAIPKITCMNPSAYQRTYSMKYFKNSSSAKDNSINTSKHDHRWSRRWQESRR

SEQ ID NO: 14018 - protein, 2409 aa, Homo sapiens
MFINIKSILWMCSTLIVTHALHKVKVGKSPPVRGSLSGKVSLPCHFSTMPTLPPSYNTSEFLRIKWSKIEVDKNGKDLKETTVLVAQNGNIKIGQDYKGRVSVPTHPEAVGDASLTVVKLLASDAGLYRCDVMYGIEDTQDTVSLTVDGVVFHYRAATSRYTLNFEAAQKACLDVGAVIATPEQLFAAYEDGFEQCDAGWLADQTVRYPIRAPRVGCYGDKMGKAGVRTYGFRSPQETYDVYCYVDHLDGDVFHLTVPSKFTFEEAAKECENQDARLATVGELQAAWRNGFDQCDYGWLSDASVRHPVTVARAQCGGGLLGVRTLYRFENQTGFPPPDSRFDAYCFKRRMSDLSVIGHPIDSESKEDEPCSEETDPVHDLMAEILPEFPDIIEIDLYHSEENEEEEEECANATDVTTTPSVQYINGKHLVTTVPKDPEAAEARRGQFESVAPSQNFSDSSESDTHPFVIAKTELSTAVQPNESTETTESLEVTWKPETYPETSEHFSGGEPDVFPTVPFHEEFESGTAKKGAESVTERDTEVGHQAHEHTEPVSLFPEESSGEIAIDQESQKIAFARATEVTFGEEVEKSTSVTYTPTIVPSSASAYVSEEEAVTLIGNPWPDDLLSTKESWVEATPRQVVELSGSSSIPITEGSGEAEEDEDTMFTMVTDLSQRNTTDTLITLDTSRIITESFFEVPATTIYPVSEQPSAKVVPTKFVSETDTSEWISSTTVEEKKRKEEEGTTGTASTFEVYSSTQRSDQLILPFELESPNVATSSDSGTRKSFMSLTTPTQSEREMTDSTPVFTETNTLENLGAQTTEHSSIHQPGVQEGLTTLPRSPASVFMEQGSGEAAADPETTTVSSFSLNVEYAIQAEKEVAGTLSPHVETTFSTEPTGLVLSTVMDRVVAENITQTSREIVISERLGEPNYGAEIRGFSTGFPLEEDFSGDFREYSTVSHPIAKEETVMMEGSGDAAFRDTQTSPSTVPTSVHISHISDSEGPSSTMVSTSAFPWEEFTSSAEGSGEQLVTVSSSVVPVLPSAVQKFSGTASSIIDEGLGEVGTVNEIDRRSTILPTAEVEGTKAPVEKEEVKVSGTVSTNFPQTIEPAKLWSRQEVNPVRQEIESETTSEEQIQEEKSFESPQNSPATEQTIFDSQTFTETELKTTDYSVLTTKKTYSDDKEMKEEDTSLVNMSTPDPDANGLESYTTLPEATEKSHFFLATALVTESIPAEHVVTDSPIKKEESTKHFPKGMRPTIQESDTELLFSGLGSGEEVLPTLPTESVNFTEVEQINNTLYPHTSQVESTSSDKIEDFNRMENVAKEVGPLVSQTDIFEGSGSVTSTTLIEILSDTGAEGPTVAPLPFSTDIGHPQNQTVRWAEEIQTSRPQTITEQDSNKNSSTAEINETTTSSTDFLARAYGFEMAKEFVTSAPKPSDLYYEPSGEGSGEVDIVDSFHTSATTQATRQESSTTFVSDGSLEKHPEVPSAKAVTADGFPTVSVMLPLHSEQNKSSPDPTSTLSNTVSYERSTDGSFQDRFREFEDSTLKPNRKKPTENIIIDLDKEDKDLILTITESTILEILPELTSDKNTIIDIDHTKPVYEDILGMQTDIDTEVPSEPHDSNDESNDDSTQVQEIYEAAVNLSLTEETFEGSADVLASYTQATHDESMTYEDRSQLDHMGFHFTTGIPAPSTETELDVLLPTATSLPIPRKSATVIPEIEGIKAEAKALDDMFESSTLSDGQAIADQSEIIPTLGQFERTQEEYEDKKHAGPSFQPEFSSGAEEALVDHTPYLSIATTHLMDQSVTEVPDVMEGSNPPYYTDTTLAVSTFAKLSSQTPSSPLTIYSGSEASGHTEIPQPSALPGIDVGSSVMSPQDSFKEIHVNIEATFKPSSEEYLHITEPPSLSPDTKLEPSEDDGKPELLEEMEASPTELIAVEGTEILQDFQNKTDGQVSGEAIKMFPTIKTPEAGTVITTADEIELEGATQWPHSTSASATYGVEAGVVPWLSPQTSERPTLSSSPEINPETQAALIRGQDSTIAASEQQVAARILDSNDQATVNPVEFNTEVATPPFSLLETSNETDFLIGINEESVEGTAIYLPGPDRCKMNPCLNGGTCYPTETSYVCTCVPGYSGDQCELDFDECHSNPCRNGATCVDGFNTFRCLCLPSYVGALCEQDTETCDYGWHKFQGQCYKYFAHRRTWDAAERECRLQGAHLTSILSHEEQMFVNRVGHDYQWIGLNDKMFEHDFRWTDGSTLQYENWRPNQPDSFFSAGEDCVVIIWHENGQWNDVPCNYHLTYTCKKGTVACGQPPVVENAKTFGKMKPRYEINSLIRYHCKDGFIQRHLPTIRCLGNGRWAIPKITCMNPSAYQRTYSMKYFKNSSSAKDNSINTSKHDHRWSRRWQESRR

SEQ ID NO: 14019 - protein, 1642 aa, Homo sapiens
MFINIKSILWMCSTLIVTHALHKVKVGKSPPVRGSLSGKVSLPCHFSTMPTLPPSYNTSEFLRIKWSKIEVDKNGKDLKETTVLVAQNGNIKIGQDYKGRVSVPTHPEAVGDASLTVVKLLASDAGLYRCDVMYGIEDTQDTVSLTVDGVVFHYRAATSRYTLNFEAAQKACLDVGAVIATPEQLFAAYEDGFEQCDAGWLADQTVRYPIRAPRVGCYGDKMGKAGVRTYGFRSPQETYDVYCYVDHLDGDVFHLTVPSKFTFEEAAKECENQDARLATVGELQAAWRNGFDQCDYGWLSDASVRHPVTVARAQCGGGLLGVRTLYRFENQTGFPPPDSRFDAYCFKPKEATTIDLSILAETASPSLSKEPQMVSDRTTPIIPLVDELPVIPTEFPPVGNIVSFEQKATVQPQAITDSLATKLPTPTGSTKKPWDMDDYSPSASGPLGKLDISEIKEEVLQSTTGVSHYATDSWDGVVEDKQTQESVTQIEQIEVGPLVTSMEILKHIPSKEFPVTETPLVTARMILESKTEKKMVSTVSELVTTGHYGFTLGEEDDEDRTLTVGSDESTLIFDQIPEVITVSKTSEDTIHTHLEDLESVSASTTVSPLIMPDNNGSSMDDWEERQTSGRITEEFLGKYLSTTPFPSQHRTEIELFPYSGDKILVEGISTVIYPSLQTEMTHRRERTETLIPEMRTDTYTDEIQEEITKSPFMGKTEEEVFSGMKLSTSLSEPIHVTESSVEMTKSFDFPTLITKLSAEPTEVRDMEEDFTATPGTTKYDENITTVLLAHGTLSVEAATVSKWSWDEDNTTSKPLESTEPSASSKLPPALLTTVGMNGKDKDIPSFTEDGADEFTLIPDSTQKQLEEVTDEDIAAHGKFTIRFQPTTSTGIAEKSTLRDSTTEEKVPPITSTEGQVYATMEGSALGEVEDVDLSKPVSTVPQFAHTSEVEGLAFVSYSSTQEPTTYVDSSHTIPLSVIPKTDWGVLVPSVPSEDEVLGEPSQDILVIDQTRLEATISPETMRTTKITEGTTQEEFPWKEQTAEKPVPALSSTAWTPKEAVTPLDEQEGDGSAYTVSEDELLTGSERVPVLETTPVGKIDHSVSYPPGAVTEHKVKTDEVVTLTPRIGPKVSLSPGPEQKYETEGSSTTGFTSSLSPFSTHITQLMEETTTEKTSLEDIDLGSGLFEKPKATELIEFSTIKVTVPSDITTAFSSVDRLHTTSAFKPSSAITKKPPLIDREPGEETTSDMVIIGESTSHVPPTTLEDIVAKETETDIDREYFTTSSPPATQPTRPPTVEDKEAFGPQALSTPQPPASTKFHPDINVYIIEVRENKTGPDRCKMNPCLNGGTCYPTETSYVCTCVPGYSGDQCELDFDECHSNPCRNGATCVDGFNTFRCLCLPSYVGALCEQDTETCDYGWHKFQGQCYKYFAHRRTWDAAERECRLQGAHLTSILSHEEQMFVNRVGHDYQWIGLNDKMFEHDFRWTDGSTLQYENWRPNQPDSFFSAGEDCVVIIWHENGQWNDVPCNYHLTYTCKKGTVACGQPPVVENAKTFGKMKPRYEINSLIRYHCKDGFIQRHLPTIRCLGNGRWAIPKITCMNPSAYQRTYSMKYFKNSSSAKDNSINTSKHDHRWSRRWQESRR

SEQ ID NO: 14020 - protein, 1240 aa, Homo sapiens
MFINIKSILWMCSTLIVTHALHKVKVGKSPPVRGSLSGKVSLPCHFSTMPTLPPSYNTSEFLRIKWSKIEVDKNGKDLKETTVLVAQNGNIKIGQDYKGRVSVPTHPEAVGDASLTVVKLLASDAGLYRCDVMYGIEDTQDTVSLTVDGVVFHYRAATSRYTLNFEAAQKACLDVGAVIATPEQLFAAYEDGFEQCDAGWLADQTVRYPIRAPRVGCYGDKMGKAGVRTYGFRSPQETYDVYCYVDHLDGDVFHLTVPSKFTFEEAAKECENQDARLATVGELQAAWRNGFDQCDYGWLSDASVRHPVTVARAQCGGGLLGVRTLYRFENQTGFPPPDSRFDAYCFKRRMSDLSVIGHPIDSESKEDEPCSEETDPVHDLMAEILPEFPDIIEIDLYHSEENEEEEEECANATDVTTTPSVQYINGKHLVTTVPKDPEAAEARRGQFESVAPSQNFSDSSESDTHPFVIAKTELSTAVQPNESTETTESLEVTWKPETYPETSEHFSGGEPDVFPTVPFHEEFESGTAKKGAESVTERDTEVGHQAHEHTEPVSLFPEESSGEIAIDQESQKIAFARATEVTFGEEVEKSTSVTYTPTIVPSSASAYVSEEEAVTLIGNPWPDDLLSTKESWVEATPRQVVELSGSSSIPITEGSGEAEEDEDTMFTMVTDLSQRNTTDTLITLDTSRIITESFFEVPATTIYPVSEQPSAKVVPTKFVSETDTSEWISSTTVEEKKRKEEEGTTGTASTFEVYSSTQRSDQLILPFELESPNVATSSDSGTRKSFMSLTTPTQSEREMTDSTPVFTETNTLENLGAQTTEHSSIHQPGVQEGLTTLPRSPASVFMEQGSGEAAADPETTTVSSFSLNVEYAIQAEKEVAGTLSPHVETTFSTEPTGLVLSTVMDRVVAENITQTSREIVISERLGEPNYGAEIRGFSTGFPLEEDFSGDFREYSTVSHPIAKEETVMMEGSGDAAFRDTQTSPSTVPTSVHISHISDSEGPSSTMVSTSAFPWEEFTSSAEGSGEQLVTVSSSVVPVLPSAVQKFSGTASSIIDEGLGEVGTVNEIDRRSTILPTAEVEGTKAPVEKEEVKVSGTVSTNFPQTIEPAKLWSRQEVNPVRQEIESETTSEEQIQEEKSFESPQNSPATEQTIFDSQTFTETELKTTDYSVLTTKKTYSDDKEMKEEDTSLVNMSTPDPDANGLESYTTLPEATEKSHFFLATALVTESIPAEHVVTDSPI

SEQ ID NO: 14021 - protein, 655 aa, Homo sapiens
MFINIKSILWMCSTLIVTHALHKVKVGKSPPVRGSLSGKVSLPCHFSTMPTLPPSYNTSEFLRIKWSKIEVDKNGKDLKETTVLVAQNGNIKIGQDYKGRVSVPTHPEAVGDASLTVVKLLASDAGLYRCDVMYGIEDTQDTVSLTVDGVVFHYRAATSRYTLNFEAAQKACLDVGAVIATPEQLFAAYEDGFEQCDAGWLADQTVRYPIRAPRVGCYGDKMGKAGVRTYGFRSPQETYDVYCYVDHLDGDVFHLTVPSKFTFEEAAKECENQDARLATVGELQAAWRNGFDQCDYGWLSDASVRHPVTVARAQCGGGLLGVRTLYRFENQTGFPPPDSRFDAYCFKRPDRCKMNPCLNGGTCYPTETSYVCTCVPGYSGDQCELDFDECHSNPCRNGATCVDGFNTFRCLCLPSYVGALCEQDTETCDYGWHKFQGQCYKYFAHRRTWDAAERECRLQGAHLTSILSHEEQMFVNRVGHDYQWIGLNDKMFEHDFRWTDGSTLQYENWRPNQPDSFFSAGEDCVVIIWHENGQWNDVPCNYHLTYTCKKGTVACGQPPVVENAKTFGKMKPRYEINSLIRYHCKDGFIQRHLPTIRCLGNGRWAIPKITCMNPSAYQRTYSMKYFKNSSSAKDNSINTSKHDHRWSRRWQESRR

SEQ ID NO: 14022 - protein, 354 aa, Homo sapiens
MFINIKSILWMCSTLIVTHALHKVKVGKSPPVRGSLSGKVSLPCHFSTMPTLPPSYNTSEFLRIKWSKIEVDKNGKDLKETTVLVAQNGNIKIGQDYKGRVSVPTHPEAVGDASLTVVKLLASDAGLYRCDVMYGIEDTQDTVSLTVDGVVFHYRAATSRYTLNFEAAQKACLDVGAVIATPEQLFAAYEDGFEQCDAGWLADQTVRYPIRAPRVGCYGDKMGKAGVRTYGFRSPQETYDVYCYVDHLDGDVFHLTVPSKFTFEEAAKECENQDARLATVGELQAAWRNGFDQCDYGWLSDASVRHPVTVARAQCGGGLLGVRTLYRFENQTGFPPPDSRFDAYCFKRKCLIPF

SEQ ID NO: 14023 - protein, 1594 aa, Homo sapiens
MPTLPPSYNTSEFLRIKWSKIEVDKNGKDLKETTVLVAQNGNIKIGQDYKGRVSVPTHPEAVGDASLTVVKLLASDAGLYRCDVMYGIEDTQDTVSLTVDGVVFHYRAATSRYTLNFEAAQKACLDVGAVIATPEQLFAAYEDGFEQCDAGWLADQTVRYPIRAPRVGCYGDKMGKAGVRTYGFRSPQETYDVYCYVDHLDGDVFHLTVPSKFTFEEAAKECENQDARLATVGELQAAWRNGFDQCDYGWLSDASVRHPVTVARAQCGGGLLGVRTLYRFENQTGFPPPDSRFDAYCFKPKEATTIDLSILAETASPSLSKEPQMVSDRTTPIIPLVDELPVIPTEFPPVGNIVSFEQKATVQPQAITDSLATKLPTPTGSTKKPWDMDDYSPSASGPLGKLDISEIKEEVLQSTTGVSHYATDSWDGVVEDKQTQESVTQIEQIEVGPLVTSMEILKHIPSKEFPVTETPLVTARMILESKTEKKMVSTVSELVTTGHYGFTLGEEDDEDRTLTVGSDESTLIFDQIPEVITVSKTSEDTIHTHLEDLESVSASTTVSPLIMPDNNGSSMDDWEERQTSGRITEEFLGKYLSTTPFPSQHRTEIELFPYSGDKILVEGISTVIYPSLQTEMTHRRERTETLIPEMRTDTYTDEIQEEITKSPFMGKTEEEVFSGMKLSTSLSEPIHVTESSVEMTKSFDFPTLITKLSAEPTEVRDMEEDFTATPGTTKYDENITTVLLAHGTLSVEAATVSKWSWDEDNTTSKPLESTEPSASSKLPPALLTTVGMNGKDKDIPSFTEDGADEFTLIPDSTQKQLEEVTDEDIAAHGKFTIRFQPTTSTGIAEKSTLRDSTTEEKVPPITSTEGQVYATMEGSALGEVEDVDLSKPVSTVPQFAHTSEVEGLAFVSYSSTQEPTTYVDSSHTIPLSVIPKTDWGVLVPSVPSEDEVLGEPSQDILVIDQTRLEATISPETMRTTKITEGTTQEEFPWKEQTAEKPVPALSSTAWTPKEAVTPLDEQEGDGSAYTVSEDELLTGSERVPVLETTPVGKIDHSVSYPPGAVTEHKVKTDEVVTLTPRIGPKVSLSPGPEQKYETEGSSTTGFTSSLSPFSTHITQLMEETTTEKTSLEDIDLGSGLFEKPKATELIEFSTIKVTVPSDITTAFSSVDRLHTTSAFKPSSAITKKPPLIDREPGEETTSDMVIIGESTSHVPPTTLEDIVAKETETDIDREYFTTSSPPATQPTRPPTVEDKEAFGPQALSTPQPPASTKFHPDINVYIIEVRENKTGPDRCKMNPCLNGGTCYPTETSYVCTCVPGYSGDQCELDFDECHSNPCRNGATCVDGFNTFRCLCLPSYVGALCEQDTETCDYGWHKFQGQCYKYFAHRRTWDAAERECRLQGAHLTSILSHEEQMFVNRVGHDYQWIGLNDKMFEHDFRWTDGSTLQYENWRPNQPDSFFSAGEDCVVIIWHENGQWNDVPCNYHLTYTCKKGTVACGQPPVVENAKTFGKMKPRYEINSLIRYHCKDGFIQRHLPTIRCLGNGRWAIPKITCMNPSAYQRTYSMKYFKNSSSAKDNSINTSKHDHRWSRRWQESRR

SEQ ID NO: 14024 - protein, 111 aa, Homo sapiens
APMAEGGGQNHHEVVKFMDVYQRSYCHPIETLVDIFQEYPDEIEYIFKPSCVPLMRCGGCCNDEGLECVPTEESNITMQTCKCSCKNTDSRCKARQLELNERTCRCDKPRR

SEQ ID NO: 14025 - protein, 317 aa, Homo sapiens
LTDRQTDTAPSPSYHLLPGRRRTVDAAASRGQGPEPAPGGGVEGVGARGVALKLFVQLLGCSRFGGAVVRAGEAEPSGAARSASSGREEPQPEEGEEEEEKEEERGPQWRLGARKPGSWTGEAAVCADSAPAARAPQALARASGRGGRVARRGAEESGPPHSPSRRGSASRAGPGRASETMNFLLSWVHWSLALLLYLHHAKWSQAAPMAEGGGQNHHEVVKFMDVYQRSYCHPIETLVDIFQEYPDEIEYIFKPSCVPLMRCGGCCNDEGLECVPTEESNITMQIMRIKPHQGQHIGEMSFLQHNKCECRCDKPRR

SEQ ID NO: 14026 - protein, 327 aa, Homo sapiens
LTDRQTDTAPSPSYHLLPGRRRTVDAAASRGQGPEPAPGGGVEGVGARGVALKLFVQLLGCSRFGGAVVRAGEAEPSGAARSASSGREEPQPEEGEEEEEKEEERGPQWRLGARKPGSWTGEAAVCADSAPAARAPQALARASGRGGRVARRGAEESGPPHSPSRRGSASRAGPGRASETMNFLLSWVHWSLALLLYLHHAKWSQAAPMAEGGGQNHHEVVKFMDVYQRSYCHPIETLVDIFQEYPDEIEYIFKPSCVPLMRCGGCCNDEGLECVPTEESNITMQIMRIKPHQGQHIGEMSFLQHNKCECRPKKDRARQEKCDKPRR

SEQ ID NO: 14027 - protein, 412 aa, Homo sapiens
LTDRQTDTAPSPSYHLLPGRRRTVDAAASRGQGPEPAPGGGVEGVGARGVALKLFVQLLGCSRFGGAVVRAGEAEPSGAARSASSGREEPQPEEGEEEEEKEEERGPQWRLGARKPGSWTGEAAVCADSAPAARAPQALARASGRGGRVARRGAEESGPPHSPSRRGSASRAGPGRASETMNFLLSWVHWSLALLLYLHHAKWSQAAPMAEGGGQNHHEVVKFMDVYQRSYCHPIETLVDIFQEYPDEIEYIFKPSCVPLMRCGGCCNDEGLECVPTEESNITMQIMRIKPHQGQHIGEMSFLQHNKCECRPKKDRARQEKKSVRGKGKGQKRKRKKSRYKSWSVYVGARCCLMPWSLPGPHPCGPCSERRKHLFVQDPQTCKCSCKNTDSRCKARQLELNERTCRCDKPRR

SEQ ID NO: 14028 - protein, 389 aa, Homo sapiens
LTDRQTDTAPSPSYHLLPGRRRTVDAAASRGQGPEPAPGGGVEGVGARGVALKLFVQLLGCSRFGGAVVRAGEAEPSGAARSASSGREEPQPEEGEEEEEKEEERGPQWRLGARKPGSWTGEAAVCADSAPAARAPQALARASGRGGRVARRGAEESGPPHSPSRRGSASRAGPGRASETMNFLLSWVHWSLALLLYLHHAKWSQAAPMAEGGGQNHHEVVKFMDVYQRSYCHPIETLVDIFQEYPDEIEYIFKPSCVPLMRCGGCCNDEGLECVPTEESNITMQIMRIKPHQGQHIGEMSFLQHNKCECRPKKDRARQEKKSVRGKGKGQKRKRKKSRPCGPCSERRKHLFVQDPQTCKCSCKNTDSRCKARQLELNERTCRCDKPRR

SEQ ID NO: 14029 - protein, 354 aa, Homo sapiens
LTDRQTDTAPSPSYHLLPGRRRTVDAAASRGQGPEPAPGGGVEGVGARGVALKLFVQLLGCSRFGGAVVRAGEAEPSGAARSASSGREEPQPEEGEEEEEKEEERGPQWRLGARKPGSWTGEAAVCADSAPAARAPQALARASGRGGRVARRGAEESGPPHSPSRRGSASRAGPGRASETMNFLLSWVHWSLALLLYLHHAKWSQAAPMAEGGGQNHHEVVKFMDVYQRSYCHPIETLVDIFQEYPDEIEYIFKPSCVPLMRCGGCCNDEGLECVPTEESNITMQIMRIKPHQGQHIGEMSFLQHNKCECRPKKDRARQENPCGPCSERRKHLFVQDPQTCKCSCKNTDSRCKM

SEQ ID NO: 14030 - protein, 371 aa, Homo sapiens
LTDRQTDTAPSPSYHLLPGRRRTVDAAASRGQGPEPAPGGGVEGVGARGVALKLFVQLLGCSRFGGAVVRAGEAEPSGAARSASSGREEPQPEEGEEEEEKEEERGPQWRLGARKPGSWTGEAAVCADSAPAARAPQALARASGRGGRVARRGAEESGPPHSPSRRGSASRAGPGRASETMNFLLSWVHWSLALLLYLHHAKWSQAAPMAEGGGQNHHEVVKFMDVYQRSYCHPIETLVDIFQEYPDEIEYIFKPSCVPLMRCGGCCNDEGLECVPTEESNITMQIMRIKPHQGQHIGEMSFLQHNKCECRPKKDRARQENPCGPCSERRKHLFVQDPQTCKCSCKNTDSRCKARQLELNERTCRCDKPRR

SEQ ID NO: 14031 - protein, 395 aa, Homo sapiens
LTDRQTDTAPSPSYHLLPGRRRTVDAAASRGQGPEPAPGGGVEGVGARGVALKLFVQLLGCSRFGGAVVRAGEAEPSGAARSASSGREEPQPEEGEEEEEKEEERGPQWRLGARKPGSWTGEAAVCADSAPAARAPQALARASGRGGRVARRGAEESGPPHSPSRRGSASRAGPGRASETMNFLLSWVHWSLALLLYLHHAKWSQAAPMAEGGGQNHHEVVKFMDVYQRSYCHPIETLVDIFQEYPDEIEYIFKPSCVPLMRCGGCCNDEGLECVPTEESNITMQIMRIKPHQGQHIGEMSFLQHNKCECRPKKDRARQEKKSVRGKGKGQKRKRKKSRYKSWSVPCGPCSERRKHLFVQDPQTCKCSCKNTDSRCKARQLELNERTCRCDKPRR

SEQ ID NO: 14032 - protein, 371 aa, Homo sapiens
LTDRQTDTAPSPSYHLLPGRRRTVDAAASRGQGPEPAPGGGVEGVGARGVALKLFVQLLGCSRFGGAVVRAGEAEPSGAARSASSGREEPQPEEGEEEEEKEEERGPQWRLGARKPGSWTGEAAVCADSAPAARAPQALARASGRGGRVARRGAEESGPPHSPSRRGSASRAGPGRASETMNFLLSWVHWSLALLLYLHHAKWSQAAPMAEGGGQNHHEVVKFMDVYQRSYCHPIETLVDIFQEYPDEIEYIFKPSCVPLMRCGGCCNDEGLECVPTEESNITMQIMRIKPHQGQHIGEMSFLQHNKCECRPKKDRARQENPCGPCSERRKHLFVQDPQTCKCSCKNTDSRCKARQLELNERTCRSLTRKD

SEQ ID NO: 14033 - protein, 371 aa, Homo sapiens; identical to SEQ ID NO: 14030

SEQ ID NO: 14034 - protein, 327 aa, Homo sapiens; identical to SEQ ID NO: 14026

SEQ ID NO: 14035 - protein, 389 aa, Homo sapiens; identical to SEQ ID NO: 14028

SEQ ID NO: 14036 - protein, 371 aa, Homo sapiens; identical to SEQ ID NO: 14032

SEQ ID NO: 14037 - protein, 354 aa, Homo sapiens; identical to SEQ ID NO: 14029

SEQ ID NO: 14038 - protein, 395 aa, Homo sapiens; identical to SEQ ID NO: 14031

SEQ ID NO: 14039 - protein, 412 aa, Homo sapiens; identical to SEQ ID NO: 14027

SEQ ID NO: 14040 - protein, 163 aa, Homo sapiens
MAEGGGQNHHEVVKFMDVYQRSYCHPIETLVDIFQEYPDEIEYIFKPSCVPLMRCGGCCNDEGLECVPTEESNITMQIMRIKPHQGQHIGEMSFLQHNKCECRPKKDRARQENPCGPCSERRKHLFVQDPQTCKCSCKNTDSRCKARQLELNERTCRCDKPRR

SEQ ID NO: 14041 - protein, 137 aa, Homo sapiens
MNFLLSWVHWSLALLLYLHHAKWSQAAPMAEGGGQNHHEVVKFMDVYQRSYCHPIETLVDIFQEYPDEIEYIFKPSCVPLMRCGGCCNDEGLECVPTEESNITMQIMRIKPHQGQHIGEMSFLQHNKCECRCDKPRR

SEQ ID NO: 14042 - protein, 147 aa, Homo sapiens
MNFLLSWVHWSLALLLYLHHAKWSQAAPMAEGGGQNHHEVVKFMDVYQRSYCHPIETLVDIFQEYPDEIEYIFKPSCVPLMRCGGCCNDEGLECVPTEESNITMQIMRIKPHQGQHIGEMSFLQHNKCECRPKKDRARQEKCDKPRR

SEQ ID NO: 14043 - protein, 209 aa, Homo sapiens
MNFLLSWVHWSLALLLYLHHAKWSQAAPMAEGGGQNHHEVVKFMDVYQRSYCHPIETLVDIFQEYPDEIEYIFKPSCVPLMRCGGCCNDEGLECVPTEESNITMQIMRIKPHQGQHIGEMSFLQHNKCECRPKKDRARQEKKSVRGKGKGQKRKRKKSRPCGPCSERRKHLFVQDPQTCKCSCKNTDSRCKARQLELNERTCRCDKPRR

SEQ ID NO: 14044 - protein, 215 aa, Homo sapiens
MNFLLSWVHWSLALLLYLHHAKWSQAAPMAEGGGQNHHEVVKFMDVYQRSYCHPIETLVDIFQEYPDEIEYIFKPSCVPLMRCGGCCNDEGLECVPTEESNITMQIMRIKPHQGQHIGEMSFLQHNKCECRPKKDRARQEKKSVRGKGKGQKRKRKKSRYKSWSVPCGPCSERRKHLFVQDPQTCKCSCKNTDSRCKARQLELNERTCRCDKPRR

SEQ ID NO: 14045 - protein, 232 aa, Homo sapiens
MNFLLSWVHWSLALLLYLHHAKWSQAAPMAEGGGQNHHEVVKFMDVYQRSYCHPIETLVDIFQEYPDEIEYIFKPSCVPLMRCGGCCNDEGLECVPTEESNITMQIMRIKPHQGQHIGEMSFLQHNKCECRPKKDRARQEKKSVRGKGKGQKRKRKKSRYKSWSVYVGARCCLMPWSLPGPHPCGPCSERRKHLFVQDPQTCKCSCKNTDSRCKARQLELNERTCRCDKPRR

SEQ ID NO: 14046 - protein, 191 aa, Homo sapiens
MNFLLSWVHWSLALLLYLHHAKWSQAAPMAEGGGQNHHEVVKFMDVYQRSYCHPIETLVDIFQEYPDEIEYIFKPSCVPLMRCGGCCNDEGLECVPTEESNITMQIMRIKPHQGQHIGEMSFLQHNKCECRPKKDRARQENPCGPCSERRKHLFVQDPQTCKCSCKNTDSRCKARQLELNERTCRCDKPRR

SEQ ID NO: 14047 - protein, 191 aa, Homo sapiens
MNFLLSWVHWSLALLLYLHHAKWSQAAPMAEGGGQNHHEVVKFMDVYQRSYCHPIETLVDIFQEYPDEIEYIFKPSCVPLMRCGGCCNDEGLECVPTEESNITMQIMRIKPHQGQHIGEMSFLQHNKCECRPKKDRARQENPCGPCSERRKHLFVQDPQTCKCSCKNTDSRCKARQLELNERTCRSLTRKD

SEQ ID NO: 14048 - protein, 174 aa, Homo sapiens
MNFLLSWVHWSLALLLYLHHAKWSQAAPMAEGGGQNHHEVVKFMDVYQRSYCHPIETLVDIFQEYPDEIEYIFKPSCVPLMRCGGCCNDEGLECVPTEESNITMQIMRIKPHQGQHIGEMSFLQHNKCECRPKKDRARQENPCGPCSERRKHLFVQDPQTCKCSCKNTDSRCKM

SEQ ID NO: 14049 - protein, 323 aa, Homo sapiens
  SITE 1: note = misc_feature - Xaa can be any naturally occurring amino acid
XRGQGPEPAPGGGVEGVGARGVALKLFVQLLGCSRFGGAVVRAGEAEPSGAARSASSGREEPQPEEGEEEEEKEEERGPQWRLGARKPGSWTGEAAVCADSAPAARAPQALARASGRGGRVARRGAEESGPPHSPSRRGSASRAGPGRASETMNFLLSWVHWSLALLLYLHHAKWSQAAPMAEGGGQNHHEVVKFMDVYQRSYCHPIETLVDIFQEYPDEIEYIFKPSCVPLMRCGGCCNDEGLECVPTEESNITMQIMRIKPHQGQHIGEMSFLQHNKCECRPKKDRARQEKKSVRGKGKGQKRKRKKSRYKSWSVCDKPRR

SEQ ID NO: 14050 - protein, 207 aa, Homo sapiens
MSPLLRRLLLAALLQLAPAQAPVSQPDAPGHQRKVVSWIDVYTRATCQPREVVVPLTVELMGTVAKQLVPSCVTVQRCGGCCPDDGLECVPTGQHQVRMQILMIRYPSSQLGEMSLEEHSQCECRPKKKDSAVKPDRAATPHHRPQPRSVPGWDSAPGAPSPADITHPTPAPGPSAHAAPSTTSALTPGPAAAAADAAASSVAKGGA

SEQ ID NO: 14051 - protein, 188 aa, Homo sapiens
MSPLLRRLLLAALLQLAPAQAPVSQPDAPGHQRKVVSWIDVYTRATCQPREVVVPLTVELMGTVAKQLVPSCVTVQRCGGCCPDDGLECVPTGQHQVRMQILMIRYPSSQLGEMSLEEHSQCECRPKKKDSAVKPDSPRPLCPRCTQHHQRPDPRTCRCRCRRRSFLRCQGRGLELNPDTCRCRKLRR

SEQ ID NO: 14052 - protein, 32 aa, Homo sapiens
  SITE 1: note = misc_feature - Xaa can be any naturally occurring amino acid
XHAAPSTTSALTPGPAAAAADAAASSVAKGGA

SEQ ID NO: 14053 - protein, 419 aa, Homo sapiens
MHLLGFFSVACSLLAAALLPGPREAPAAAAAFESGLDLSDAEPDAGEATAYASKDLEEQLRSVSSVDELMTVLYPEYWKMYKCQLRKGGWQHNREQANLNSRTEETIKFAAAHYNTEILKSIDNEWRKTQCMPREVCIDVGKEFGVATNTFFKPPCVSVYRCGGCCNSEGLQCMNTSTSYLSKTLFEITVPLSQGPKPVTISFANHTSCRCMSKLDVYRQVHSIIRRSLPATLPQCQAANKTCPTNYMWNNHICRCLAQEDFMFSSDAGDDSTDGFHDICGPNKELDEETCQCVCRAGLRPASCGPHKELDRNSCQCVCKNKLFPSQCGANREFDENTCQCVCKRTCPRNQPLNPGKCACECTESPQKCLLKGKKFHHQTCSCYRRPCTNRQKACEPGFSYSEEVCRCVPSYWKRPQMS

SEQ ID NO: 14054 - protein, 354 aa, Homo sapiens
MYREWVVVNVFMMLYVQLVQGSSNEHGPVKRSSQSTLERSEQQIRAASSLEELLRITHSEDWKLWRCRLRLKSFTSMDSRSASHRSTRFAATFYDIETLKVIDEEWQRTQCSPRETCVEVASELGKSTNTFFKPPCVNVFRCGGCCNEESLICMNTSTSYISKQLFEISVPLTSVPELVPVKVANHTGCKCLPTAPRHPYSIIRRSIQIPEEDRCSHSKKLCPIDMLWDSNKCKCVLQEENPLAGTEDHSHLQEPALCGPHMMFDEDRCECVCKTPCPKDLIQHPKNCSCFECKESLETCCQKHKLFHPDTCSCEDRCPFHTRPCASGKTACAKHCRFPKEKRAAQGPHSRKNP

SEQ ID NO: 14055 - protein, 615 aa, Homo sapiens
MKALRLSASALFCLLLINGLGAAPPGRPEAQPPPLSSEHKEPVAGDAVPGPKDGSAPEVRGARNSEPQDEGELFQGVDPRALAAVLLQALDRPASPPAPSGSQQGPEEEAAEALLTETVRSQTHSLPAPESPEPAAPPRPQTPENGPEASDPSEELEALASLLQELRDFSPSSAKRQQETAAAETETRTHTLTRVNLESPGPERVWRASWGEFQARVPERAPLPPPAPSQFQARMPDSGPLPETHKFGEGVSSPKTHLGEALAPLSKAYQGVAAPFPKARRPESALLGGSEAGERLLQQGLAQVEAGRRQAEATRQAAAQEERLADLASDLLLQYLLQGGARQRGLGGRGLQEAAEERESAREEEEAEQERRGGEERVGEEDEEAAEAEAEAEEAERARQNALLFAEEEDGEAGAEDKRSQEETPGHRRKEAEGTEEGGEEEDDEEMDPQTIDSLIELSTKLHLPADDVVSIIEEVEEKRKRKKNAPPEPVPPPRAAPAPTHVRSPQPPPPAPAPARDELPDWNEVLPPWDREEDEVYPPGPYHPFPNYIRPRTLQPPSALRRRHYHHALPPSRHYPGREAQARRAQEEAEAEERRLQEQEELENYIEHVLLRRP

SEQ ID NO: 14056 - protein, 615 aa, Homo sapiens; identical to SEQ ID NO: 14055

SEQ ID NO: 14057 - protein, 377 aa, Homo sapiens
MKALRLSASALFCLLLINGLGAAPPGRPEAQPPPLSSEHKEPVAGDAVPGPKDGSAPEVRGARNSEPQDEGELFQGVDPRALAAVLLQALDRPASPPAPSGSQQGPEEEAAEALLTETVRSQTHSLPAPESPEPAAPPRPQTPENGPEASDPSEELEALASLLQELRDFSPSSAKRQQETAAAETETRTHTLTRVNLESPGPERVWRASWGEFQARVPERAPLPPPAPSQFQARMPDSGPLPETHKFGEGVSSPKTHLGEALAPLSKAYQGVAAPFPKARRPESALLGGSEAGERLLQQGLAQVEAGRRQAEATRQAAAQEERLADLASDLLLQFAAGRGPAARPCPLALPLSPGCVGTCQTPLPGPEPELPELTRG

SEQ ID NO: 14058 - protein, 169 aa, Homo sapiens
MDTRNKAQLLVLLTLLSVLFSQTSAWPLYRAPSALRLGDRIPFEGANEPDQVSLKEDIDMLQNALAENDTPYYDVSRNARHADGVFTSDFSKLLGQLSAKKYLESLMGKRVSNISEDPVPVKRHSDAVFTDNYTRLRKQMAVKKYLNSILNGKRSSEGESPDFPEELEK

SEQ ID NO: 14059 - protein, 170 aa, Homo sapiens
MDTRNKAQLLVLLTLLSVLFSQTSAWPLYRAPSALRLGDRIPFEGANEPDQVSLKEDIDMLQNALAENDTPYYDVSRNARHADGVFTSDFSKLLGQLSAKKYLESLMGKRVSSNISEDPVPVKRHSDAVFTDNYTRLRKQMAVKKYLNSILNGKRSSEGESPDFPEELEK

SEQ ID NO: 14060 - protein, 119 aa, Homo sapiens
  SITE 1: note = misc_feature - Xaa can be any naturally occurring amino acid
XVSLKEDIDMLQNALAENDTPYYDVSRNARHADGVFTSDFSKLLGQLSAKKYLESLMGKRVSSNISEDPVPVKRHSDAVFTDNYTRLRKQMAVKKYLNSILNGKRSEGESPDFPEELEK

SEQ ID NO: 14061 - protein, 422 aa, Homo sapiens
MPLWEAPSDHPANPPATLQGHTSLPGCQEEPARDPQSGLPQITSESSSFSEGSLPSWSSGPAGAKLNASHEGIGSSSDGNGDSKAATERVVSAMDTVRRKHPEITFYILVKAIYTLGYSVSLMSLATGSIILCLFRKLHCTRNYIHLNLFLSFILRAISVLVKDDVLYSSSGTLHCPDQPSSWVGCKLSLVFLQYCIMANFFWLLVEGLYLHTLLVAMLPPRRCFLAYLLIGWGLPTVCIGAWTAARLYLEDTGCWDTNDHSVPWWVIRIPILISIIVNFVLFISIIRILLQKLTSPDVGGNDQSQYKRLAKSTLLLIPLFGVHYMVFAVFPISISSKYQILFELCLGSFQGLVVAVLYCFLNSEVQCELKRKWRSRCPTPSASRDYRVCGSSFSRNGSEGALQFHRGSRAQSFLQTETSVI

SEQ ID NO: 14062 - protein, 438 aa, Homo sapiens
MRTLLPPALLTCWLLAPVNSIHPECRFHLEIQEEETKCAELLRSQTEKHKACSGVWDNITCWRPANVGETVTVPCPKVFSNFYSKAGNISKNCTSDGWSETFPDFVDACGYSDPEDESKITFYILVKAIYTLGYSVSLMSLATGSIILCLFRKLHCTRNYIHLNLFLSFILRAISVLVKDDVLYSSSGTLHCPDQPSSWVGCKLSLVFLQYCIMANFFWLLVEGLYLHTLLVAMLPPRRCFLAYLLIGWGLPTVCIGAWTAARLYLEDTGCWDTNDHSVPWWVIRIPILISIIVNFVLFISIIRILLQKLTSPDVGGNDQSQYKRLAKSTLLLIPLFGVHYMVFAVFPISISSKYQILFELCLGSFQGLVVAVLYCFLNSEVQCELKRKWRSRCPTPSASRDYRVCGSSFSRNGSEGALQFHRGSRAQSFLQTETSVI

SEQ ID NO: 14063 - protein, 77 aa, Homo sapiens
MRTLLPPALLTCWLLAPVNSIHPECRFHLEIQEEETKCAELLRSQTEKHKGHTKGFILIHAGGLKRILDPHTYPLAP

SEQ ID NO: 14064 - protein, 579 aa, Homo sapiens
MRTLLPPALLTCWLLAPVSAPATPAPRRLGPGSPLPRRALLPPVFAFLPGAGARAGSGRGSGVARGPELPPGEREALSSGPAGLRDSGWEAACALPRAPPSGVCWKRDRFFLDASTMSSFGAVPGAGSCGRLRGLRVSRGDRGWRWPQMPLGPSLYLLVNSIHPECRFHLEIQEEETKCAELLRSQTEKHKACSGVWDNITCWRPANVGETVTVPCPKVFSNFYSKAGNISKNCTSDGWSETFPDFVDACGYSDPEDESKITFYILVKAIYTLGYSVSLMSLATGSIILCLFRKLHCTRNYIHLNLFLSFILRAISVLVKDDVLYSSSGTLHCPDQPSSWVGCKLSLVFLQYCIMANFFWLLVEGLYLHTLLVAMLPPRRCFLAYLLIGWGLPTVCIGAWTAARLYLEDTGCWDTNDHSVPWWVIRIPILISIIVNFVLFISIIRILLQKLTSPDVGGNDQSQYKRLAKSTLLLIPLFGVHYMVFAVFPISISSKYQILFELCLGSFQGLVVAVLYCFLNSEVQCELKRKWRSRCPTPSASRDYRVCGSSFSRNGSEGALQFHRGSRAQSFLQTETSVI

SEQ ID NO: 14065 - protein, 347 aa, Homo sapiens
MGVVQYGDNPATHFNLKTHTNSRDLKTAIEKITQRGGLSNVGRAISFVTKNFFSKANGNRSGAPNVVVVMVDGWPTDKVEEASRLARESGINIFFITIEGAAENEKQYVVEPNFANKAVCRTNGFYSLHVQSWFGLHKTLQPLVKRVCDTDRLACSKTCLNSADIGFVIDGSSSVGTGNFRTVLQFVTNLTKEFEISDTDTRIGAVQYTYEQRLEFGFDKYSSKPDILNAIKRVGYWSGGTSTGAAINFALEQLFKKSKPNKRKLMILITDGRSYDDVRIPAMAAHLKGVITYAIGVAWAAQEELEVIATHPARDHSFFVDEFDNLHQYVPRIIQNICTEFNSQPRN

SEQ ID NO: 14066 - protein, 630 aa, Homo sapiens
MRTVVLTMKASVIEMFLAVPQINCDVKAGKIIDPEFIVKCPAGCQDPKYHVYGTDVYASYSSVCGAAVHSGVLDNSGGKILVRKVAGQSGYKGSYSNGVQSLSLPRWRESFIVLESKPKKGVTYPSALTYSSSKSPAAQAGETTKAYQRPPIPGTTAQPVTLMQLLAVTVAVATPTTLPRPSPSAASTTSIPRPQSVGHRSQEMGEMDSWKPGSVLLDEGLVPKEELSTQSLEPVSLGDPNCKIDLSFLIDGSTSIGKRRFRIQKQLLADVAQALDIGPAGPLMGVVQYGDNPATHFNLKTHTNSRDLKTAIEKITQRGGLSNVGRAISFVTKNFFSKANGNRSGAPNVVVVMVDGWPTDKVEEASRLARESGINIFFITIEGAAENEKQYVVEPNFANKAVCRTNGFYSLHVQSWFGLHKTLQPLVKRVCDTDRLACSKTCLNSADIGFVIDGSSSVGTGNFRTVLQFVTNLTKEFEISDTDTRIGAVQYTYEQRLEFGFDKYSSKPDILNAIKRVGYWSGGTSTGAAINFALEQLFKKSKPNKRKLMILITDGRSYDDVRIPAMAAHLKGVITYAIGVAWAAQEELEVIATHPARDHSFFVDEFDNLHQYVPRIIQNICTEFNSQPRN

SEQ ID NO: 14067 - protein, 657 aa, Homo sapiens
MRTVVLTMKASVIEMFLVLLVTGVHSNKETAKKIKRPKFTVPQINCDVKAGKIIDPEFIVKCPAGCQDPKYHVYGTDVYASYSSVCGAAVHSGVLDNSGGKILVRKVAGQSGYKGSYSNGVQSLSLPRWRESFIVLESKPKKGVTYPSALTYSSSKSPAAQAGETTKAYQRPPIPGTTAQPVTLMQLLAVTVAVATPTTLPRPSPSAASTTSIPRPQSVGHRSQEMDLWSTATYTSSQNRPRADPGIQRQDPSGAAFQKPVGADVSLDCKIDLSFLIDGSTSIGKRRFRIQKQLLADVAQALDIGPAGPLMGVVQYGDNPATHFNLKTHTNSRDLKTAIEKITQRGGLSNVGRAISFVTKNFFSKANGNRSGAPNVVVVMVDGWPTDKVEEASRLARESGINIFFITIEGAAENEKQYVVEPNFANKAVCRTNGFYSLHVQSWFGLHKTLQPLVKRVCDTDRLACSKTCLNSADIGFVIDGSSSVGTGNFRTVLQFVTNLTKEFEISDTDTRIGAVQYTYEQRLEFGFDKYSSKPDILNAIKRVGYWSGGTSTGAAINFALEQLFKKSKPNKRKLMILITDGRSYDDVRIPAMAAHLKGVITYAIGVAWAAQEELEVIATHPARDHSFFVDEFDNLHQYVPRIIQNICTEFNSQPRN

SEQ ID NO: 14068 - protein, 693 aa, Homo sapiens
MRTVVLTMKASVIEMFLVLLVTGVHSNKETAKKIKRPKFTVPQINCDVKAGKIIDPEFIVKCPAGCQDPKYHVYGTDVYASYSSVCGAAVHSGVLDNSGGKILVRKVAGQSGYKGSYSNGVQSLSLPRWRESFIVLESKPKKGVTYPSALTYSSSKSPAAQAGETTKAYQRPPIPGTTAQPVTLMQLLAVTVAVATPTTLPRPSPSAASTTSIPRPQSVGHRSQEMDLWSTATYTSSQNRPRADPGIQRQDPSGAAFQKPVGADVSLGEMDSWKPGSVLLDEGLVPKEELSTQSLEPVSLGDPNCKIDLSFLIDGSTSIGKRRFRIQKQLLADVAQALDIGPAGPLMGVVQYGDNPATHFNLKTHTNSRDLKTAIEKITQRGGLSNVGRAISFVTKNFFSKANGNRSGAPNVVVVMVDGWPTDKVEEASRLARESGINIFFITIEGAAENEKQYVVEPNFANKAVCRTNGFYSLHVQSWFGLHKTLQPLVKRVCDTDRLACSKTCLNSADIGFVIDGSSSVGTGNFRTVLQFVTNLTKEFEISDTDTRIGAVQYTYEQRLEFGFDKYSSKPDILNAIKRVGYWSGGTSTGAAINFALEQLFKKSKPNKRKLMILITDGRSYDDVRIPAMAAHLKGVITYAIGVAWAAQEELEVIATHPARDHSFFVDEFDNLHQYVPRIIQNICTEFNSQPRN

SEQ ID NO: 14069 - protein, 678 aa, Homo sapiens
MRTVVLTMKASVIEMFLVLLVTGVHSNKETAKKIKRPKFTVPQINCDVKAGKIIDPEFIVKCPAGCQDPKYHVYGTDVYASYSSVCGAAVHSGVLDNSGGKILVRKVAGQSGYKGSYSNGVQSLSLPRWRESFIVLESKPKKGVTYPSALTYSSSKSPAAQAGETTKAYQRPPIPGTTAQPVTLMQLLAVTVAVATPTTLPRPSPSAASTTSIPRPQSVGHRSQEMDLWSTATYTSSQNRPRADPGIQRQDPSGAAFQKPVGADVSLGLVPKEELSTQSLEPVSLGDPNCKIDLSFLIDGSTSIGKRRFRIQKQLLADVAQALDIGPAGPLMGVVQYGDNPATHFNLKTHTNSRDLKTAIEKITQRGGLSNVGRAISFVTKNFFSKANGNRSGAPNVVVVMVDGWPTDKVEEASRLARESGINIFFITIEGAAENEKQYVVEPNFANKAVCRTNGFYSLHVQSWFGLHKTLQPLVKRVCDTDRLACSKTCLNSADIGFVIDGSSSVGTGNFRTVLQFVTNLTKEFEISDTDTRIGAVQYTYEQRLEFGFDKYSSKPDILNAIKRVGYWSGGTSTGAAINFALEQLFKKSKPNKRKLMILITDGRSYDDVRIPAMAAHLKGVITYAIGVAWAAQEELEVIATHPARDHSFFVDEFDNLHQYVPRIIQNICTEFNSQPRN

SEQ ID NO: 14070 - protein, 656 aa, Homo sapiens
MRTVVLTMKASVIEMFLVLLVTGVHSNKETAKKIKRPKFTVPQINCDVKAGKIIDPEFIVKCPAGCQDPKYHVYGTDVYASYSSVCGAAVHSGVLDNSGGKILVRKVAGQSGYKGSYSNGVQSLSLPRWRESFIVLESKPKKGVTYPSALTYSSSKSPAAQAGETTKAYQRPPIPGTTAQPVTLMQLLAVTVAVATPTTLPRPSPSAASTTSIPRPQSVGHRSQEMDLWSTATYTSSQNRPRADPGLVPKEELSTQSLEPVSLGDPNCKIDLSFLIDGSTSIGKRRFRIQKQLLADVAQALDIGPAGPLMGVVQYGDNPATHFNLKTHTNSRDLKTAIEKITQRGGLSNVGRAISFVTKNFFSKANGNRSGAPNVVVVMVDGWPTDKVEEASRLARESGINIFFITIEGAAENEKQYVVEPNFANKAVCRTNGFYSLHVQSWFGLHKTLQPLVKRVCDTDRLACSKTCLNSADIGFVIDGSSSVGTGNFRTVLQFVTNLTKEFEISDTDTRIGAVQYTYEQRLEFGFDKYSSKPDILNAIKRVGYWSGGTSTGAAINFALEQLFKKSKPNKRKLMILITDGRSYDDVRIPAMAAHLKGVITYAIGVAWAAQEELEVIATHPARDHSFFVDEFDNLHQYVPRIIQNICTEFNSQPRN

SEQ ID NO: 14071 - protein, 203 aa, Homo sapiens
MRTVVLTMKASVIEMFLVLLVTGVHSNKETAKKIKRPKFTVPQINCDVKAGKIIDPEFIVKCPAGCQDPKYHVYGTDVYASYSSVCGAAVHSGVLDNSGGKILVRKVAGQSGYKGSYSNGVQSLSLPRWRESFIVLESKPKKGVTYPSALTYSSSKSPAAQAGKCSRVIESKPSESMNTRRVLGDSGEINILTGQAPLALAIF

SEQ ID NO: 14072 - protein, 134 aa, Homo sapiens
  SITE 1: note = misc_feature - Xaa can be any naturally occurring amino acid
XTSSQNRPRADPGIQRQDPSGAAFQKPVGADVSLGLVPKEELSTQSLEPVSLGDPNCKIDLSFLIDGSTSIGKRRFRIQKQLLADVAQALDIGPAGPLMGVVQYGPLHWYWKNSPGNGEEWVGRETAPISQLST

SEQ ID NO: 14073 - protein, 92 aa, Homo sapiens
MGSTWGSPGWVRLALCLTGLVLSLYALHVKAARARDRDYRALCDVGTAISCSRVFSSRLPADTLGLCPDAAELPGVSRWFCLPGLDPVLRAL

SEQ ID NO: 14074 - protein, 149 aa, Homo sapiens
MGSTWGSPGWVRLALCLTGLVLSLYALHVKAARARDRDYRALCDVGTAISCSRVFSSRVQGTGLTVLTWFHPTPPLCQVGQGFRAGGACAGTGQHPQSIQQHIRLHLLHTTAIVRLPADTLGLCPDAAELPGVSRWFCLPGLDPVLRAL

SEQ ID NO: 14075 - protein, 156 aa, Homo sapiens
MGSTWGSPGWVRLALCLTGLVLSLYALHVKAARARDRDYRALCDVGTAISCSRVFSSRWGRGFGLVEHVLGQDSILNQSNSIFGCIFYTLQLLLDGVSPCCPGWSQAICLPQPPKVLGGLQALPADTLGLCPDAAELPGVSRWFCLPGLDPVLRAL

SEQ ID NO: 14076 - protein, 163 aa, Homo sapiens
MGSTWGSPGWVRLALCLTGLVLSLYALHVKAARARDRDYRALCDVGTAISCSRVFSSRWGRGFGLVEHVLGQDSILNQSNSIFGCIFYTLQLLLGCLRTRWASVLMLLSSLVSLAGSVYLAWILFFVLYDFCIVCITTYAINVSLMWLSFRKVQEPQGKAKRH

SEQ ID NO: 14077 - protein, 160 aa, Homo sapiens
MIILESGIGVPGERTRGWTARGVVAQGLSYPAILVFEIRVRGKGPDSAGDWDYSGDSHVNWMPRNNGDQERRGGRMAVEIDDGLKDGAQVGQGFRAGGACAGTGQHPQSIQQHIRLHLLHTTAIVRLPADTLGLCPDAAELPGVSRWFCLPGLDPVLRAL

SEQ ID NO: 14078 - protein, 161 aa, Homo sapiens
MIVERLGYCQGCVWPKEWFCECMGERETDHQEALVRQDPGGWEAAARMVPEIVSGEMLGSRIGSPYSLDPLIRWSLGPGCCNSYNRTWHRVGQGFRAGGACAGTGQHPQSIQQHIRLHLLHTTAIVRLPADTLGLCPDAAELPGVSRWFCLPGLDPVLRAL

SEQ ID NO: 14079 - protein, 43 aa, Homo sapiens
MLLSSLVSLAGSVYLAWILFFVLYDFCIVCITTYAINVSLMWL

SEQ ID NO: 14080 - protein, 92 aa, Homo sapiens
  SITE 1: note = misc_feature - Xaa can be any naturally occurring amino acid
XQGCVWPKEWFCECMGERETDHQEALVRQDPGGWEAAARMVPEIVSGEMLGSRIGSPYSLDPLIRWSLGPGCCNSYNRTWHRVACGHAGPLS

SEQ ID NO: 14081 - protein, 845 aa, Homo sapiens
MGTSALWALWLLLALCWAPRESGATGTGRKAKCEPSQFQCTNGRCITLLWKCDGDEDCVDGSDEKNCVKKTCAESDFVCNNGQCVPSRWKCDGDPDCEDGSDESPEQCHMRTCRIHEISCGAHSTQCIPVSWRCDGENDCDSGEDEENCGNITCSPDEFTCSSGRCISRNFVCNGQDDCSDGSDELDCAPPTCGAHEFQCSTSSCIPISWVCDDDADCSDQSDESLEQCGRQPVIHTKCPASEIQCGSGECIHKKWRCDGDPDCKDGSDEVNCPSRTCRPDQFECEDGSCIHGSRQCNGIRDCVDGSDEVNCKNVNQCLGPGKFKCRSGECIDISKVCNQEQDCRDWSDEPLKECHINECLVNNGGCSHICKDLVIGYECDCAAGFELIDRKTCGDIDECQNPGICSQICINLKGGYKCECSRGYQMDLATGVCKAVGKEPSLIFTNRRDIRKIGLERKEYIQLVEQLRNTVALDADIAAQKLFWADLSQKAIFSASIDDKVGRHVKMIDNVYNPAAIAVDWVYKTIYWTDAASKTISVATLDGTKRKFLFNSDLREPASIAVDPLSGFVYWSDWGEPAKIEKAGMNGFDRRPLVTADIQWPNGITLDLIKSRLYWLDSKLHMLSSVDLNGQDRRIVLKSLEFLAHPLALTIFEDRVYWIDGENEAVYGANKFTGSELATLVNNLNDAQDIIVYHELVQPSGKNWCEEDMENGGCEYLCLPAPQINDHSPKYTCSCPSGYNVEENGRDCQRINVTTAVSEVSVPPKGTSAAWAILPLLLLVMAAVGGYLMWRNWQHKNMKSMNFDNPVYLKTTEEDLSIDIGRHSASVGHTYPAISVVSTDDDLA

SEQ ID NO: 14082 - protein, 873 aa, Homo sapiens
MGTSALWALWLLLALCWAPRESGATGTGRKAKCEPSQFQCTNGRCITLLWKCDGDEDCVDGSDEKNCVKKTCAESDFVCNNGQCVPSRWKCDGDPDCEDGSDESPEQCHMRTCRIHEISCGAHSTQCIPVSWRCDGENDCDSGEDEENCGNITCSPDEFTCSSGRCISRNFVCNGQDDCSDGSDELDCAPPTCGAHEFQCSTSSCIPISWVCDDDADCSDQSDESLEQCGRQPVIHTKCPASEIQCGSGECIHKKWRCDGDPDCKDGSDEVNCPSRTCRPDQFECEDGSCIHGSRQCNGIRDCVDGSDEVNCKNVNQCLGPGKFKCRSGECIDISKVCNQEQDCRDWSDEPLKECHINECLVNNGGCSHICKDLVIGYECDCAAGFELIDRKTCGDIDECQNPGICSQICINLKGGYKCECSRGYQMDLATGVCKAVGKEPSLIFTNRRDIRKIGLERKEYIQLVEQLRNTVALDADIAAQKLFWADLSQKAIFSASIDDKVGRHVKMIDNVYNPAAIAVDWVYKTIYWTDAASKTISVATLDGTKRKFLFNSDLREPASIAVDPLSGFVYWSDWGEPAKIEKAGMNGFDRRPLVTADIQWPNGITLDLIKSRLYWLDSKLHMLSSVDLNGQDRRIVLKSLEFLAHPLALTIFEDRVYWIDGENEAVYGANKFTGSELATLVNNLNDAQDIIVYHELVQPSGKNWCEEDMENGGCEYLCLPAPQINDHSPKYTCSCPSGYNVEENGRDCQSTATTVTYSETKDTNTTEISATSGLVPGGINVTTAVSEVSVPPKGTSAAWAILPLLLLVMAAVGGYLMWRNWQHKNMKSMNFDNPVYLKTTEEDLSIDIGRHSASVGHTYPAISVVSTDDDLA

SEQ ID NO: 14083 - protein, 173 aa, Homo sapiens
MGTSALWALWLLLALCWAPRESGATGTGRKAKCEPSQFQCTNGRCITLLWKCDGDEDCVDGSDEKNCVKKTCAESDFVCNNGQCVPSRWKCDGDPDCEDGSDESPEQCRNITCSPDEFTCSSGRCISRNFVCNGQDDCSDGSDELDCAPPTCGAHEFQCSTSSCIPISWVCDD

SEQ ID NO: 14084 - protein, 70 aa, Homo sapiens
MERGAGAKLLPLLLLLRATGFTCAQTDGRNGYTAVIEVTSGGPWGDWAWPEMCPDGFFASGFSLKLGRME

SEQ ID NO: 14085 - protein, 102 aa, Homo sapiens
MERGAGAKLLPLLLLLRATGFTCAQTDGRNGYTAVIEVTSGGPWGDWAWPEMCPDGFFASGFSLKVEPPQGIPGDDTALNGIRLHCARGNVLGNTHVLGRME

SEQ ID NO: 14086 - protein, 114 aa, Homo sapiens
MERGAGAKLLPLLLLLRATGFTCAQTDGRNGYTAVIEVTSGGPWGDWAWPEMCPDGFFASGFSLKVEPPQGIPGDDTALNGIRLHCARGNVLGNTHVVESQSGRWGAGVEDPLG

SEQ ID NO: 14087 - protein, 202 aa, Homo sapiens
MERGAGAKLLPLLLLLRATGFTCAQTDGRNGYTAVIEVTSGGPWGDWAWPEMCPDGFFASGFSLKVEPPQGIPGDDTALNGIRLHCARGNVLGNTHVVESQSGSWGEWSEPLWCRGGAYLVAFSLRVEAPTTLGDNTAANNVRFRCSDGEELQGPGLSWGDFGDWSDHCPKGACGLQTKIQGPRGLGDDTALNDARLFCCRS

SEQ ID NO: 14088 - protein, 513 aa, Homo sapiens
MTTQLPAYVAILLFYVSRASCQDTFTAAVYEHAAILPNATLTPVSREEALALMNRNLDILEGAITSAADQGAHIIVTPEDAIYGWNFNRDSLYPYLEDIPDPEVNWIPCNNRNRFGQTPVQERLSCLAKNNSIYVVANIGDKKPCDTSDPQCPPDGRYQYNTDVVFDSQGKLVARYHKQNLFMGENQFNVPKEPEIVTFNTTFGSFGIFTCFDILFHDPAVTLVKDFHVDTIVFPTAWMNVLPHLSAVEFHSAWAMGMRVNFLASNIHYPSKKMTGSGIYAPNSSRAFHYDMKTEEGKLLLSQLDSHPSHSAVVNWTSYASSIEALSSGNKEFKGTVFFDEFTFVKLTGVAGNYTVCQKDLCCHLSYKMSENIPNEVYALGAFDGLHTVEGRYYLQICTLLKCKTTNLNTCGDSAETASTRFEMFSLSGTFGTQYVFPEVLLSENQLAPGEFQVSTDGRLFSLKPTSGPVLTVTLFGRLYEKDWASNASSGLTAQARIIMLIVIAPIVCSLSW

SEQ ID NO: 14089 - protein, 102 aa, Homo sapiens
MNENIDILETAIKQAAEQGARIIVTPEDALYGWKFTRETVFPYLEDIPDPQVNWIPCQDPHRFGHTPVQARLSCLAKDNSIYVLANLGDKKPCNSRDSTCPP

SEQ ID NO: 14090 - protein, 131 aa, Homo sapiens
MNENIDILETAIKQAAEQGARIIVTPEDALYGWKFTRETVFPYLEDIPDPQVNWIPCQDPHRFGHTPVQARLSCLAKDNSIYVLANLGDKKPCNSRDSTCPPNGYFQYNTNVVYNTEGKLVARYHKVGKSH

SEQ ID NO: 14091 - protein, 467 aa, Homo sapiens
MNENIDILETAIKQAAEQGARIIVTPEDALYGWKFTRETVFPYLEDIPDPQVNWIPCQDPHRFGHTPVQARLSCLAKDNSIYVLANLGDKKPCNSRDSTCPPNGYFQYNTNVVYNTEGKLVARYHKYHLYSEPQFNVPEKPELVTFNTAFGRFGIFTCFDIFFYDPGVTLVKDFHVDTILFPTAWMNVLPLLTAIEFHSAWAMGMGVNLLVANTHHVSLNMTGSGIYAPNGPKVYHYDMKTELGKLLLSEVDSHPLSSLAYPTAVNWNAYATTIKPFPVQKNTFRGFISRDGFNFTELFENAGNLTVCQKELCCHLSYRMLQKEENEVYVLGAFTGLHGRRRREYWQVCTLLKCKTTNLTTCGRPVETASTRFEMFSLSGTFGTEYVFPEVLLTEIHLSPGKFEVLKDGRLVNKNGSSGPILTVSLFGRWYTKDSLYSSCGTSNSAITYLLIFILLMIIALQNIVML

SEQ ID NO: 14092 - protein, 101 aa, Homo sapiens
MVTSSFPISVAVFALITLQVGTQDSFIAAVYEHAVILPNKTETPVSQEDALNLMNENIDILETAIKQAAEQGARIIVTPEDALYGWKFTRETVFPYLEDIP

SEQ ID NO: 14093 - protein, 166 aa, Homo sapiens
MVTSSFPISVAVFALITLQVGTQDSFIAAVYEHAVILPNKTETPVSQEDALNLMNENIDILETAIKQAAEQGARIIVTPEDALYGWKFTRETVFPYLEDIPDPQVNWIPCQDPHRFGHTPVQARLSCLAKDNSIYVLANLGDKKPCNSRDSTCPPNGYFQYNTNVV

SEQ ID NO: 14094 - protein, 192 aa, Homo sapiens
MVTSSFPISVAVFALITLQVGTQDSFIAAVYEHAVILPNKTETPVSQEDALNLMNENIDILETAIKQAAEQGARIIVTPEDALYGWKFTRETVFPYLEDIPDPQVNWIPCQDPHRFGHTPVQARLSCLAKDNSIYVLANLGDKKPCNSRDSTCPPNGYFQYNTNVVYNTEGKLVARYHKETLQSVKRSFAVI

SEQ ID NO: 14095 - protein, 195 aa, Homo sapiens
MVTSSFPISVAVFALITLQVGTQDSFIAAVYEHAVILPNKTETPVSQEDALNLMNENIDILETAIKQAAEQGARIIVTPEDALYGWKFTRETVFPYLEDIPDPQVNWIPCQDPHRFGHTPVQARLSCLAKDNSIYVLANLGDKKPCNSRDSTCPPNGYFQYNTNVVYNTEGKLVARYHKEVVFMHQMVPKCIIMT

SEQ ID NO: 14096 - protein, 299 aa, Homo sapiens
MVTSSFPISVAVFALITLQVGTQDSFIAAVYEHAVILPNKTETPVSQEDALNLMNENIDILETAIKQAAEQGARIIVTPEDALYGWKFTRETVFPYLEDIPDPQVNWIPCQDPHRFGHTPVQARLSCLAKDNSIYVLANLGDKKPCNSRDSTCPPNGYFQYNTNVVYNTEGKLVARYHKVCTLLKCKTTNLTTCGRPVETASTRFEMFSLSGTFGTEYVFPEVLLTEIHLSPGKFEVLKDGRLVNKNGSSGPILTVSLFGRWYTKDSLYSSCGTSNSAITYLLIFILLMIIALQNIVML

SEQ ID NO: 14097 - protein, 184 aa, Homo sapiens
MVTSSFPISVAVFALITLQVGTQDSFIAAVYEHAVILPNKTETPVSQEDALNLMNENIDILETAIKQAAEQGARIIVTPEDALYGWKFTRETVFPYLEDIPDPQVNWIPCQDPHRFGHTPVQARLSCLAKDNSIYVLANLGDKKPCNSRDSTCPPNGYFQYNTNVVYNTEGKLVARYHKVGKSH

SEQ ID NO: 14098 - protein, 520 aa, Homo sapiens
MVTSSFPISVAVFALITLQVGTQDSFIAAVYEHAVILPNKTETPVSQEDALNLMNENIDILETAIKQAAEQGARIIVTPEDALYGWKFTRETVFPYLEDIPDPQVNWIPCQDPHRFGHTPVQARLSCLAKDNSIYVLANLGDKKPCNSRDSTCPPNGYFQYNTNVVYNTEGKLVARYHKYHLYSEPQFNVPEKPELVTFNTAFGRFGIFTCFDIFFYDPGVTLVKDFHVDTILFPTAWMNVLPLLTAIEFHSAWAMGMGVNLLVANTHHVSLNMTGSGIYAPNGPKVYHYDMKTELGKLLLSEVDSHPLSSLAYPTAVNWNAYATTIKPFPVQKNTFRGFISRDGFNFTELFENAGNLTVCQKELCCHLSYRMLQKEENEVYVLGAFTGLHGRRRREYWQVCTLLKCKTTNLTTCGRPVETASTRFEMFSLSGTFGTEYVFPEVLLTEIHLSPGKFEVLKDGRLVNKNGSSGPILTVSLFGRWYTKDSLYSSCGTSNSAITYLLIFILLMIIALQNIVML

SEQ ID NO: 14099 - protein, 290 aa, Homo sapiens
MVTSSFPISVAVFALITLQVGTQDSFIAAVYEHAVILPNKTETPVSQEDALNLMNENIDILETAIKQAAEQGARIIVTPEDALYGWKFTRETVFPYLEDIPDPQVNWIPCQDPHRFGHTPVQARLSCLAKDNSIYVLANLGDKKPCNSRDSTCPPNGYFQYNTNVVYNTEGKLVARYHKYHLYSEPQFNVPEKPELVTFNTAFGRFGIFTCFDIFFYDPGVTLVKDFHVDTILFPTAWMNVLPLLTAIEFHSAWAMGMGVNLLVANTHHVSLNMTVVFMHQMVPKCIIMT

SEQ ID NO: 14100 - protein, 219 aa, Homo sapiens
MVTSSFPISVAVFALITLQVGTQDSFIAAVYEHAVILPNKTETPVSQEDALNLMNENIDILETAIKQAAEQGARIIVTPEDALYGWKFTRETVFPYLEDIPDPQVNWIPCQDPHRFGHTPVQARLSCLAKDNSIYVLANLGDKKPCNSRDSTCPPNGYFQYNTNVVYNTEGKLVARYHKYHLYSEPQFNVPEKPELVTFNTAFGRKWYLCTKWSQSVSL

SEQ ID NO: 14101 - protein, 216 aa, Homo sapiens
MVTSSFPISVAVFALITLQVGTQDSFIAAVYEHAVILPNKTETPVSQEDALNLMNENIDILETAIKQAAEQGARIIVTPEDALYGWKFTRETVFPYLEDIPDPQVNWIPCQDPHRFGHTPVQARLSCLAKDNSIYVLANLGDKKPCNSRDSTCPPNGYFQYNTNVVYNTEGKLVARYHKYHLYSEPQFNVPEKPELVTFNTAFGSLDERFAPFDSY

SEQ ID NO: 14102 - protein, 119 aa, Homo sapiens
MVTSSFPISVAVFALITLQVGTQDSFIAAVYEHAVILPNKTETPVSQEDALNLMNENIDILETAIKQAAEQGARIIVTPEDALYGWKFTRETVFPYLEDIPDPQVNWIPCQDPHRSAHC

SEQ ID NO: 14103 - protein, 129 aa, Homo sapiens
MIISHFPKCVAVFALLALSVGALDTFIAAVYEHAVILPNRTETPVSKEEALLLMNKNIDVLEKAVKLAAKQGAHIIVTPEDGIYGWIFTRESIYPYLEDIPDPGVNWIPCRDPWREWNLRPRSSQGVPL

SEQ ID NO: 14104 - protein, 129 aa, Homo sapiens; identical to SEQ ID NO: 14103

SEQ ID NO: 14105 - protein, 207 aa, Homo sapiens
MIISHFPKCVAVFALLALSVGALDTFIAAVYEHAVILPNRTETPVSKEEALLLMNKNIDVLEKAVKLAAKQGAHIIVTPEDGIYGWIFTRESIYPYLEDIPDPGVNWIPCRDPWRFGNTPVQQRLSCLAKDNSIYVVANIGDKKPCNASDSQCPPDGRYQYNTDVVFDSQGKLLARYHKGVESTPQKQSRCTTMTWKQRVVSCCYQN

SEQ ID NO: 14106 - protein, 274 aa, Homo sapiens
MIISHFPKCVAVFALLALSVGALDTFIAAVYEHAVILPNRTETPVSKEEALLLMNKNIDVLEKAVKLAAKQGAHIIVTPEDGIYGWIFTRESIYPYLEDIPDPGVNWIPCRDPWRFGNTPVQQRLSCLAKDNSIYVVANIGDKKPCNASDSQCPPDGRYQYNTDVVFDSQGKLLARYHKYNLFAPEIQFDFPKDSELVTFDTPFGKFGIFTCFDIFSHDPAVVVVDEFQLTAFSTPQHGTTRCPSSRLFPSIQHGPRPWESIYLLQIPTTPACT

SEQ ID NO: 14107 - protein, 147 aa, Homo sapiens
MIISHFPKCVAVFALLALSVGALDTFIAAVYEHAVILPNRTETPVSKEEALLLMNKNIDVLEKAVKLAAKQGAHIIVTPEDGIYGWIFTRESIYPYLEDIPDPGVNWIPCRDPWRKSKKMNEPVSKELCYHCHSECNQYGQWKLYRT

SEQ ID NO: 14108 - protein, 117 aa, Homo sapiens
MIISHFPKCVAVFALLALSVGALDTFIAAVYEHAVILPNRTETPVSKEEALLLMNKNIDVLEKAVKLAAKQGAHIIVTPEDGIYGWIFTRESIYPYLEDIPDPGVNWIPCRDPWRNH

SEQ ID NO: 14109 - protein, 117 aa, Homo sapiens; identical to SEQ ID NO: 14108

SEQ ID NO: 14110 - protein, 117 aa, Homo sapiens; identical to SEQ ID NO: 14108

SEQ ID NO: 14111 - protein, 133 aa, Homo sapiens
MIISHFPKCVAVFALLALSVGALDTFIAAVYEHAVILPNRTETPVSKEEALLLMNKNIDVLEKAVKLAAKQGAHIIVTPEDGIYGWIFTRESIYPYLEDIPDPGVNWIPCRDPWSTIFLHLKFSLISPRIQNL

SEQ ID NO: 14112 - protein, 169 aa, Homo sapiens
MIISHFPKCVAVFALLALSVGALDTFIAAVYEHAVILPNRTETPVSKEEALLLMNKNIDVLEKAVKLAAKQQGAHIIVTPEDGIYGWIFTRESIYPYLEDIPDPGVNWIPCRDPWSMVQHAAPPLGCSLPFSMGQGHGSQSTCCKYPQHQHAHDREWNLRPRSSQGVPL

SEQ ID NO: 14113 - protein, 161 aa, Homo sapiens
MIISHFPKCVAVFALLALSVGALDTFIAAVYEHAVILPNRTETPVSKEEALLLMNKNIDVLEKAVKLAAKQVLPFYTCKGDLQFGQRVFGIHDKLFCPTCFEQGAHIIVTPEDGIYGWIFTRESIYPYLEDIPDPGVNWIPCRDPWREWNLRPRSSQGVPL

SEQ ID NO: 14114 - protein, 60 aa, Homo sapiens
  SITE 1: note = misc_feature - Xaa can be any naturally occurring amino acid
XTRESIYPYLEDIPDPGVNWIPCRDPWRKSKKMNEPVSKELCYHCHSECNQYGQWKLYRT

SEQ ID NO: 14115 - protein, 155 aa, Homo sapiens
MCTEAKKHCWYFEGLYPTYYICRSYEDCCGSRCCVRALSIQRLWYFWFLLMMGVLFCCGAGFFIRRRMYPPPLIEEPAFNVSYTRQPPNPGPGAQQPGPPYYTDPGGPGMNPVGNSMAMAFQVPPNSPQGSVACPPPPAYCNTPPPPYEQVVKAK

SEQ ID NO: 14116 - protein, 109 aa, Homo sapiens
MFLLMMGVLFCCGAGFFIRRRMYPPPLIEEPAFNVSYTRQPPNPGPGAQQPGPPYYTDPGGPGMNPVGNSMAMAFQVPPNSPQGSVACPPPPAYCNTPPPPYEQVVKAK

SEQ ID NO: 14117 - protein, 169 aa, Homo sapiens
MLSETLGYLSSVLLQCTEAKKHCWYFEGLYPTYYICRSYEDCCGSRCCVRALSIQRLWYFWFLLMMGVLFCCGAGFFIRRRMYPPPLIEEPAFNVSYTRQPPNPGPGAQQPGPPYYTDPGGPGMNPVGNSMAMAFQVPPNSPQGSVACPPPPAYCNTPPPPYEQVVKAK

SEQ ID NO: 14118 - protein, 22 aa, Homo sapiens
MMGVLFCCGAGFFIRRRMYPPP

SEQ ID NO: 14119 - protein, 53 aa, Homo sapiens
MMGVLFCCGAGFFIRRRMYPPPLIEEPAFNVSYTRQPPNPGPGAQQPGPPYYT

SEQ ID NO: 14120 - protein, 85 aa, Homo sapiens
MMGVLFCCGAGFFIRRRMYPPPLIEEPAFNVSYTRQPPNPGPGAQQPGPPYYTDPGGPGMNPVGNSMAMAFQVPPNSPQGSVACP

SEQ ID NO: 14121 - protein, 96 aa, Homo sapiens
MMGVLFCCGAGFFIRRRMYPPPLIEEPAFNVSYTRQPPNPGPGAQQPGPPYYTDPGGPGMNPVGNSMAMAFQVPPNSPQGSVACPPPPAYCNTPPP

SEQ ID NO: 14122 - protein, 105 aa, Homo sapiens
MMGVLFCCGAGFFIRRRMYPPPLIEEPAFNVSYTRQPPNPGPGAQQPGPPYYTDPGGPGMNPVGNSMAMAFQVPPNSPQGSVACPPPPAYCNTPPPPYEQVVKAK

SEQ ID NO: 14123 - protein, 105 aa, Homo sapiens; identical to SEQ ID NO: 14122

SEQ ID NO: 14124 - protein, 105 aa, Homo sapiens; identical to SEQ ID NO: 14122

SEQ ID NO: 14125 - protein, 170 aa, Homo sapiens
MRIRSLHPVQQTEPTTCTEAKKHCWYFEGLYPTYYICRSYEDCCGSRCCVRALSIQRLWYFWFLLMMGVLFCCGAGFFIRRRMYPPPLIEEPAFNVSYTRQPPNPGPGAQQPGPPYYTDPGGPGMNPVGNSMAMAFQVPPNSPQGSVACPPPPAYCNTPPPPYEQVVKAK

SEQ ID NO: 14126 - protein, 172 aa, Homo sapiens
MRRQPAKVAALLLGLLLECTEAKKHCWYFEGLYPTYYICRSYEDCCGSRCCVRALSIQRLWYFWFLLMMGVLFCCGAGFFIRRRMYPPPLIEEPAFNVSYTRQPPNPGPGAQQPGPPYYTDPGGPGMNPVGNSMAMAFQVPPNSPQGSVACPPPPAYCNTPPPPYEQVVKAK

SEQ ID NO: 14127 - protein, 163 aa, Homo sapiens
MRRTGSHAQCTEAKKHCWYFEGLYPTYYICRSYEDCCGSRCCVRALSIQRLWYFWFLLMMGVLFCCGAGFFIRRRMYPPPLIEEPAFNVSYTRQPPNPGPGAQQPGPPYYTDPGGPGMNPVGNSMAMAFQVPPNSPQGSVACPPPPAYCNTPPPPYEQVVKAK

SEQ ID NO: 14128 - protein, 144 aa, Homo sapiens
MSAPCPGLLSCSCCLSTAQPVLHQPPAMSSALGTTIRLTCTLRNDHDIGVYSVYWYQQRPGHPPRFLLRYFSQSDKSQGPQVPPRFSGSKDVARNRGYLSISELQPEDEAMYYCAMGARSSEKEEREREWEEEMEPTAARTRVP

SEQ ID NO: 14129 - protein, 145 aa, Homo sapiens
MSWAPVLLMLFVYCTGCGPQPVLHQPPAMSSALGTTIRLTCTLRNDHDIGVYSVYWYQQRPGHPPRFLLRYFSQSDKSQGPQVPPRFSGSKDVARNRGYLSISELQPEDEAMYYCAMGARSSEKEEREREWEEEMEPTAARTRVP

SEQ ID NO: 14130 - protein, 107 aa, Homo sapiens
MACRCLSFLLMGTFLSGQVAQLSCTLSPQHVTIRDYGVSWYQQRAGSAPRYLLYYRSEEDHHRPADIPDRFSAAKDEAHNACVLTISPVQPEDDADYYCSVGYGFSP

SEQ ID NO: 14131 - protein, 123 aa, Homo sapiens
MACRCLSFLLMGTFLSVSQTVLAQLDALLVFPGQVAQLSCTLSPQHVTIRDYGVSWYQQRAGSAPRYLLYYRSEEDHHRPADIPDRFSAAKDEAHNACVLTISPVQPEDDADYYCSVGYGFSP

SEQ ID NO: 14132 - protein, 271 aa, Homo sapiens
MAGAGSEARFAGLSLVQLNELLEDEGQLTEMVQKMEENVQLNKEMTLASNRSLAEGNLLYQPQLDTLKARLTQKYQELQVLFEAYQIKKTKLDRQSSSASLETLLALLQAEGAKIEEDTENMAEKFLDGELPLDSFIDVYQSKRKLAHMRRVKIEKLQEMVLKGQRLPQALAPLPPRLPELAPTAPLPYPAPEASGPPAVAPRRIPPPPPPVPAGRLATPFTAAMSSGQAVPYPGLQCPPLPPRVGLPTQQGFSSQFVSPYPPPLPQRPPP

SEQ ID NO: 14133 - protein, 285 aa, Homo sapiens
MAGAGSEARFAGLSLVQLNELLEDEGQLTEMVQKMEETQNVQLNKEMTLASNRSLAEGNLLYQPQLDTLKARLTQKYQELQVLFEAYQIKKTKLDRQSSSASLETLLALLQAEGAKIEEDTENMAEKFLDGELPLDSFIDVYQSKRKLAHMRRVKIEKLQEMVLKGQRLPQALAPLPPRLPELAPTAPLPYPAPEASGPPAVAPRRIPPPPPPVPAGRLATPFTAAMSSGQAVPYPGLQCPPLPPRVGLPTQQGFSSQFVSPYPPPLPQRPPPRLPPHQPGFILQ

SEQ ID NO: 14134 - protein, 184 aa, Homo sapiens
MQSGCVLELRNAGLVACLALITVFVAECCYGDSCQTQNVQLNKEMTLASNRSLAEGNLLYQPQLDTLKARLTQKYQELQVLFEAYQIKKTKLDRQSSSASLETLLALLQAEGAKIEEDTENMAEKFLDGELPLDSFIDVYQSKRKLAHMRRVKIEKLQEMVLKGQRLPQALAPLPPRLPELAPT

SEQ ID NO: 14135 - protein, 334 aa, Homo sapiens
MAAAAAAGPSPGSGPGDSPEGPEGEAPERRRKAHGMLKLYYGLSEGEAAGRPAGPDPLDPTDLNGAHFDPEVYLDKLRRECPLAQLMDSETDMVRQIRALDSDMQTLVYENYNKFISATDTIRKMKNDFRKMEDEMDRLATNMAVITDFSARISATLQDRHERITKLAGGRCRAGPAVGLSWGSGANVTLRPPGVHALLRKLQFLFELPSRLTKCVELGAYGQAVRYQGRAQAVLQQYQHLPSFRAIQDDCQVITARLAQQLRQRFREGGSGAPEQAECVELLLALGEPAEELCEEFLAHARGRLEKELRNLEAELGPSPPAPDVLEFTDHGGS

SEQ ID NO: 14136 - protein, 782 aa, Homo sapiens
MAAAAAAGPSPGSGPGDSPEGPEGEAPERRRKAHGMLKLYYGLSEGEAAGRPAGPDPLDPTDLNGAHFDPEVYLDKLRRECPLAQLMDSETDMVRQIRALDSDMQTLVYENYNKFISATDTIRKMKNDFRKMEDEMDRLATNMAVITDFSARISATLQDRHERITKLAGVHALLRKLQFLFELPSRLTKCVELGAYGQAVRYQGRAQAVLQQYQHLPSFRAIQDDCQVITARLAQQLRQRFREGGSGAPEQAECVELLLALGEPAEELCEEFLAHARGRLEKELRNLEAELGPSPPAPDVLEFTDHGGSGFVGGLCQVAAAYQELFAAQGPAGAEKLAAFARQLGSRYFALVERRLAQEQGGGDNSLLVRALDRFHRRLRAPGALLAAAGLADAATEIVERVARERLGHHLQGLRAAFLGCLTDVRQALAAPRVAGKEGPGLAELLANVASSILSHIKASLAAVHLFTAKEVSFSNKPYFRGEFCSQGVREGLIVGFVHSMCQTAQSFCDSPGEKGGATPPALLLLLSRLCLDYETATISYILTLTDEQFLVQDQFPVTPVSTLCAEARETARRLLTHYVKVQGLVISQMLRKSVETRDWLSTLEPRNVRAVMKRVVEDTTAIDVQVGLLYEEGVRKAQSSDSSKRTFSVYSSSRQQGRYAPSYTPSAPMDTNLLSNIQKLFSERIDVFSPVEFNKVSVLTGIIKISLKTLLECVRLRTFGRFGLQQVQVDCHFLQLYLWRFVADEELVHLLLDEVVASAALRCPDPVPMEPSVVEVICERG

SEQ ID NO: 14137 - protein, 163 aa, Homo sapiens
MAAAAAAGPSPGSGPGDSPEGPEGEAPERRRKAHGMLKLYYGLSEGEAAGRPAGPDPLDPTDLNGAHFDPEVYLDKLRRECPLAQLMDSETDMVRQIRALDSDMQTLVYENYNKFISATGSALDTQMRLGASGPCLGCLWSDGAVEAQWWQLAKHLRPASDLD

SEQ ID NO: 14138 - protein, 233 aa, Homo sapiens
MAAAAAAGPSPGSGPGDSPEGPEGEAPERRRKAHGMLKLYYGLSEGEAAGRPAGPDPLDPTDLNGAHFDPEVYLDKLRRECPLAQLMDSETDMVRQIRALDSDMQTLVYENYNKFISATGVHALLRKLQFLFELPSRLTKCVELGAYGQAVRYQGRAQAVLQQYQHLPSFRAIQDDCQVITARLAQQLRQRFREGGSGAPEQAECVELLLALGEPAEELCEEFLAHARGRLEK

SEQ ID NO: 14139 - protein, 81 aa, Homo sapiens
MAAAAAAGPSPGSGPGDSPEGPEGEAPERRRKAHGMLKLYYGLSEGEAAGRPAGPDPLDPTDLNGAHFDPEVYLDKTPSGR

SEQ ID NO: 14140 - protein, 81 aa, Homo sapiens [sequence omitted]

SEQ ID NO: 14141 - protein, 110 aa, Homo sapiens
MDSETDMVRQIRALDSDMQTLVYENYNKFISATDTIRKMKNDFRKMEDEMDRLATNMAVITDFSARISATLQDRHERITKLAGVHALLRKLQFLFELPSRLTKCVELGAY

SEQ ID NO: 14142 - protein, 255 aa, Homo sapiens
MDSETDMVRQIRALDSDMQTLVYENYNKFISATDTIRKMKNDFRKMEDEMDRLATNMAVITDFSARISATLQDRHERITKLAGVHALLRKLQFLFELPSRLTKCVELGAYGQAVRYQGRAQAVLQQYQHLPSFRAIQDDCQVITARLAQQLRQRFREGGSGAPEQAECVELLLALGEPAEELCEEFLAHARGRLEKELRNLEAELGPSPPAPDVLEFTDHGGSGFVGGLCQVAAAYQELFAAQGPAGAEKLAAFA

SEQ ID NO: 14143 - protein, 165 aa, Homo sapiens
MIMPLYSKLGDREKKKRKEKASRPWAAVGTMAAAAAAGPSPGSGPGDSPEGPEGEAPERRRKAHGMLKLYYGLSEGEAAGRPAGPDPLDPTDLNGAHFDPEVYLDKLRRECPLAQLMDSETDMVRQIRALDSDMQTLVYENYNKFISATDTIRKMKNDFRKMEDE

SEQ ID NO: 14144 - protein, 99 aa, Homo sapiens
VGLLYEEGVRKAQSSDSSKRTFSVYSSSRQQGRYAPSYTPSAPMDTNLLSNIQKLFSERIDVFSPVEFNKMTALILYPSLLIWPRRLSASSQLLPSCRC

SEQ ID NO: 14145 - protein, 72 aa, Homo sapiens
  SITE 1: note = misc_feature - Xaa can be any naturally occurring amino acid
XSQGVREGLIVGFVHSMCQTAQSFCDSPGEKGGATPPALLLLLSRLCLDYETATISYILTLTDEQFLVQVKH

SEQ ID NO: 14146 - protein, 199 aa, Homo sapiens
  SITE 1: note = misc_feature - Xaa can be any naturally occurring amino acid
XTAQSFCDSPGEKGGATPPALLLLLSRLCLDYETATISYILTLTDEQFLVQDQFPVTPVSTLCAEARETARRLLTHYVKVQGLVISQMLRKSVETRDWLSTLEPRNVRAVMKRVVEDTTAIDVQVGLLYEEGVRKAQSSDSSKRTFSVYSSSRQQGRYAPSYTPSAPMDTNLLSNIQKLFSERIDVFSPVEFNKVRLPT

SEQ ID NO: 14147 - protein, 168 aa, Homo sapiens
MVFAFWKVFLILSCLAGQVSVVQVTIPDGFVNVTVGSNVTLICIYTTTVASREQLSIQWSFFHKKEMEPISHSSCLSTEGMEEKAVSQCLKMTHARDARGRCSWTSEIYFSQGGQAVAIGQFKDRITGSNDPGNASITISHMQPADSGIYICDVNNPPDFLGQNQGIL

SEQ ID NO: 14148 - protein, 423 aa, Homo sapiens
MVFAFWKVFLILSCLAGQVSVVQVTIPDGFVNVTVGSNVTLICIYTTTVASREQLSIQWSFFHKKEMEPISHSSCLSTEGMEEKAVSQCLKMTHARDARGRCSWTSEIYFSQGGQAVAIGQFKDRITGSNDPGNASITISHMQPADSGIYICDVNNPPDFLGQNQGILNVSVLVKPSKPLCSVQGRPETGHTISLSCLSALGTPSPVYYWHKLEGRDIVPVKENFNPTTGILVIGNLTNFEQGYYQCTAINRLGNSSCEIDLTSSHPEVGIIVGALIGSLVGAAIIISVVCFARNKAKAKAKERNSKTIAELEPMTKINPRGESEAMPREDATQLEVTLPSSIHETGPDTIQEPDYEPKPTQEPAPEPAPGSEPMAVPDLDIELELEPETQSELEPEPEPEPESEPGVVVEPLSEDEKGVVKA

SEQ ID NO: 14149 - protein, 387 aa, Homo sapiens
MVFAFWKVFLILSCLAGQVSVVQVTIPDGFVNVTVGSNVTLICIYTTTVASREQLSIQWSFFHKKEMEPISIYFSQGGQAVAIGQFKDRITGSNDPGNASITISHMQPADSGIYICDVNNPPDFLGQNQGILNVSVLVKPSKPLCSVQGRPETGHTISLSCLSALGTPSPVYYWHKLEGRDIVPVKENFNPTTGILVIGNLTNFEQGYYQCTAINRLGNSSCEIDLTSSHPEVGIIVGALIGSLVGAAIIISVVCFARNKAKAKAKERNSKTIAELEPMTKINPRGESEAMPREDATQLEVTLPSSIHETGPDTIQEPDYEPKPTQEPAPEPAPGSEPMAVPDLDIELELEPETQSELEPEPEPEPESEPGVVVEPLSEDEKGVVKA

SEQ ID NO: 14150 - protein, 190 aa, Homo sapiens
MAAGGSAPEPRVLVCLGALLAGWVAVGLEAVVIGEVHENVTLHCGNISGLRGQVTWYRNNSEPVFLLSSNSSLRPAEPRFSLVDATSLHIESLSLGDEGIYTCQEILNVTQWFQVWLQVANPPPSAPQCWAQMASGSFMLQLTCRWDGGYPDPDFLWIEEPGGVIVGKSKLGVEMLSESQLSDGKKFKCV

SEQ ID NO: 14151 - protein, 540 aa, Homo sapiens
MAAGGSAPEPRVLVCLGALLAGWVAVGLEAVVIGEVHENVTLHCGNISGLRGQVTWYRNNSEPVFLLSSNSSLRPAEPRFSLVDATSLHIESLSLGDEGIYTCQEILNVTQWFQVWLQVASGPYQIEVHIVATGTLPNGTLYAARGSQVDFSCNSSSRPPPVVEWWFQALNSSSESFGHNLTVNFFSLLLISPNLQGNYTCLALNQLSKRHRKVTTELLVYYPPPSAPQCWAQMASGSFMLQLTCRWDGGYPDPDFLWIEEPGGVIVGKSKLGVEMLSESQLSDGKKFKCVTSHIVGPESGASCMVQIRGPSLLSEPMKTCFTGGNVTLTCQVSGAYPPAKILWLRNLTQPEVIIQPSSRHLITQDGQNSTLTIHNCSQDLDEGYYICRADSPVGVREMEIWLSVKEPLNIGGIVGTIVSLLLLGLAIISGLLLHYSPVFCWKVGNTSRGQNMDDVMVLVDSEEEEEEEEEEEEDAAVGEQEGAREREELPKEIPKQDHIHRVTALVNGNIEQMGNGFQDLQDDSSEEQSDIVQEEDRPV

SEQ ID NO: 14152 - protein, 126 aa, Homo sapiens
EFPFTDLKPKDAGRYFCAYKTTASHEWSESSEHLQLVVTDKHDELEAPSMKTGSSSEESTKRTSHSKLPEQEAAEADLSNMERVSLSTADPQGVTYAELSTSALSEAASDTTQEPPGSHEYAALKV

SEQ ID NO: 14153 - protein, 116 aa, Homo sapiens
MTAEFLSLLCLDTRTIFVAIFSCISILLLFLSVFIIYRCSQHSSSSEESTKRTSHSKLPEQEAAEADLSNMERVSLSTADPQGVTYAELSTSALSEAASDTTQEPPGSHEYAALKV

SEQ ID NO: 14154 - protein, 174 aa, Homo sapiens
MTAEFLSLLCLGLCLGYEDEKKNEKPPKPSLHAWPSSVVEAESNVTLKCQAHSQNVTFVLRKVNDSGYKQEQSSAENEAEFPFTDLKPKDAGRYFCAYKTTASHEWSESSEHLQLVVTDKHDELEAPSMKTDTRTIFVAIFSCISILLLFLSVFIIYRCSQHSELRERKGREGE

SEQ ID NO: 14155 - protein, 236 aa, Homo sapiens
MTAEFLSLLCLGLCLGYEDEKKNEKPPKPSLHAWPSSVVEAESNVTLKCQAHSQNVTFVLRKVNDSGYKQEQSSAENEAEFPFTDLKPKDAGRYFCAYKTTASHEWSESSEHLQLVVTDKHDELEAPSMKTDTRTIFVAIFSCISILLLFLSVFIIYRCSQHSSSSEESTKRTSHSKLPEQEAAEADLSNMERVSLSTADPQGVTYAELSTSALSEAASDTTQEPPGSHEYAALKV

SEQ ID NO: 14156 - protein, 205 aa, Homo sapiens
MTAEFLSLLCLGLCLGYEDEKKNEKPPKPSLHAWPSSVVEAESNVTLKCQAHSQNVTFVLRKVNDSGYKQEQSSAENEAEFPFTDLKPKDAGRYFCAYKTTASHEWSESSEHLQLVVTDKHDELEAPSMKTGSSSEESTKRTSHSKLPEQEAAEADLSNMERVSLSTADPQGVTYAELSTSALSEAASDTTQEPPGSHEYAALKV

SEQ ID NO: 14157 - protein, 143 aa, Homo sapiens
MTAEFLSLLCLGLCLGYEDEKKNEKPPKPSLHAWPSSVVEAESNVTLKCQAHSQNVTFVLRKVNDSGYKQEQSSAENEAEFPFTDLKPKDAGRYFCAYKTTASHEWSESSEHLQLVVTDKHDELEAPSMKTVAHVCNTRTLGR

SEQ ID NO: 14158 - protein, 229 aa, Homo sapiens
MTAEFLSLLCLGLCLGYEDEKKNEKPPKPSLHAWPSSVVEAESNVTLKCQAHSQNVTFVLRKVNDSGYKQEQSSAENEAEFPFTDLKPKDAGRYFCAYKTTASHEWSESSEHLQLVVTGSLPEPLLSVNVDPGMTPGLRTLRCLTPYNGTECIVIALLKMGIPEPLQVRQVRKNQTDFMLWNVTSNDSGNYSCVYYLSNSSHLASFPSNKLEIWVTDKHDELEAPSMKT

SEQ ID NO: 14159 - protein, 240 aa, Homo sapiens
MMGIFLVYVGFVFFSVLYVQQGLSSQAKFTEFPRNVTATEGQNVEMSCAFQSGSASVYLEIQWWFLRGPEDLDPGAEGAGAQVELLPDRDPDSDGTKISTVKVQGNDISHKLQISKVRKKDEGLYECRVTDANYGELQEHKAQAYLKVNANSHARRMQAFEASPMWLQDMKPRKNVSAAIPSSIHGSANQRTHSTSSPQVVAKIPKQSPQSAKSKSPVKSTERTAKLTLNSKHHPAPTVL

SEQ ID NO: 14160 - protein, 236 aa, Homo sapiens
MMGIFLVYVGFVFFSVLYVQQGLSSQAKFTEFPRNVTATEGQNVEMSCAFQSGSASVYLEIQWWFLRGPEDLDPGAEGAGAQVELLPDRDPDSDGTKISTVKVQGNDISHKLQISKVRKKDEGLYECRVTDANYGELQEHKAQAYLKVNANSHARRMQAFEASPMWLQDMKPRKNVSAAIPSSIHGSANQRTHSTSSPQVVAKIPKQSPQSGARIATSHGLSVLLLVCGFVKGALL

SEQ ID NO: 14161 - protein, 244 aa, Homo sapiens
MMGIFLVYVGFVFFSVLYVQQGLSSQAKFTEFPRNVTATEGQNVEMSCAFQSGSASVYLEIQWWFLRGPEDLDPGAEGAGAQVELLPDRDPDSDGTKISTVKVQGNDISHKLQISKVRKKDEGLYECRVTDANYGELQEHKAQAYLKVNANSHARRMQAFEASPMWLQDMKPRKNVSAAIPSSIHGSANQRTHSTSSPQVVAKIPKQSPQSGMETHFEPFILPLTNAPQKGQSYRVDRFMNGDF

SEQ ID NO: 14162 - protein, 309 aa, Homo sapiens
MMGIFLVYVGFVFFSVLYVQQGLSSQAKFTEFPRNVTATEGQNVEMSCAFQSGSASVYLEIQWWFLRGPEDLDPGAEGAGAQVELLPDRDPDSDGTKISTVKVQGNDISHKLQISKVRKKDEGLYECRVTDANYGELQEHKAQAYLKVNANSHARRMQAFEASPMWLQDMKPRKNVSAAIPSSIHGSANQRTHSTSSPQVVAKIPKQSPQSVSPILPEVKHLHRPPLLVLPFFSLSSLFSTDPLPTFPTSHRTVKRLPAPLPQPGHGSTPGVQSCVLAPPAKSKSPVKSTERTAKLTLNSKHHPAPTVL

SEQ ID NO: 14163 - protein, 285 aa, Homo sapiens
MEQRNRLGALGYLPPLLLHALLLFVADAAFTEVPKDVTVREGDDIEMPCAFRASGATSYSLEIQWWYLKEPPRELLHELALSVPGARSKVTNKDATKISTVRVQGNDISHRLRLSAVRLQDEGVYECRVSDYSDDDTQEHKAQAMLRVLSRFAPPNMQAAEAVSHIQSSGPRRHGPASAANANNAGAASRTTSEPGRGDKSPPPGSPPAAIDPAVPEAAAASAAHTPTTTVAAAAAASSASPPSGQAVLLRQRHGSGTGRSYTTDPLLSLLLLALHKFLRLLLGH

SEQ ID NO: 14164 - protein, 204 aa, Homo sapiens
MGAPLAVALGALHYLALFLQLGGATRPAGHAPWDNHVSGHALFTETPHDMTARTGEDVEMACSFRGSGSPSYSLEIQWWYVRSHRDWTDKQAWASNQLKASQQEDAGKEATKISVVKVVGSNISHKLRLSRVKPTDEGTYECRVIDFSDGKARHHKVKAYLRVQPGENSVLHLPEAPPAAPAPPPPKPGKELRKRSVDQEACSL

SEQ ID NO: 14165 - protein, 149 aa, Homo sapiens
MGAPLAVALGALHYLALFLQLGGATRPAGHAPWDNHVSGHALFTETPHDMTARTGEDVEMACSFRGSGSPSYSLEIQWWYVRSHRDWTDKQAWASNQVVKVVGSNISHKLRLSRVKPTDEGTYECRVIDFSDGKARHHKVKAYLRVQPG

SEQ ID NO: 14166 - protein, 132 aa, Homo sapiens
MGAPLAVALGALHYLALFLQLGGATRPAGHAPWDNHVSGHGGQGGGQQHLPQAAPVPGEAHGRRHLRVPRHRLQRRQGPAPQGQGLPAGAARGELRPASARSPSRRARPAAPQARQGAEEALGGPGGLQPLD

SEQ ID NO: 14167 - protein, 191 aa, Homo sapiens
MRLLALAAAALLARAPAPEVCAALNVTVSPGPVVDYLEGENATLLCHVSQKRRKDSLLAVRWFFAHSFDSQEALMVKMTKLRVVQYYGNFSRSAKRRRLRLLEEQRGALYRLSVLTLQPSDQGHYVCRVQEISRHRNKWTAWSNGSSATEMRGVSSHPVERGAFLGISLVILPHSLPFTADLTMASFLQSS

SEQ ID NO: 14168 - protein, 320 aa, Homo sapiens
MRLLALAAAALLARAPAPEVCAALNVTVSPGPVVDYLEGENATLLCHVSQKRRKDSLLAVRWFFAHSFDSQEALMVKMTKLRVVQYYGNFSRSAKRRRLRLLEEQRGALYRLSVLTLQPSDQGHYVCRVQEISRHRNKWTAWSNGSSATEMRVISLKASEESSFEKTKETWAFFEDLYVYAVLVCCVGILSILLFMLVIVWQSVFNKRKSRVRHYLVKCPQNSSGETVTSVTSLAPLQPKKGKRQKEKPDIPPAVPAKAPIAPTFHKPKLLKPQRKVTLPKIAEENLTYAELELIKPHRAAKGAPTSTVYAQILFEENKL

SEQ ID NO: 14169 - protein, 118 aa, Homo sapiens
MAPLRPLLILALLAWVALADQESCKGRCTEGFNVDKKCQCDELCSYYQSCCTDYTAECKPQVTRGDVFTMPEDEYTVYDDGEEKNNATVHEQVGGPSLTSDLQAQSKGNPEQTPVLKP

SEQ ID NO: 14170 - protein, 478 aa, Homo sapiens
MAPLRPLLILALLAWVALADQESCKGRCTEGFNVDKKCQCDELCSYYQSCCTDYTAECKPQVTRGDVFTMPEDEYTVYDDGEEKNNATVHEQVGGPSLTSDLQAQSKGNPEQTPVLKPEEEAPAPEVGASKPEGIDSRPETLHPGRPQPPAEEELCSGKPFDAFTDLKNGSLFAFRGQYCYELDEKAVRPGYPKLIRDVWGIEGPIDAAFTRINCQGKTYLFKGSQYWRFEDGVLDPDYPRNISDGFDGIPDNVDAALALPAHSYSGRERVYFFKGKQYWEYQFQHQPSQEECEGSSLSAVFEHFAMMQRDSWEDIFELLFWGRTSAGTRQPQFISRDWHGVPGQVDAAMAGRIYISGMAPRPSLAKKQRFRHRNRKGYRSQRGHSRGRNQNSRRPSRATWLSLFSSEESNLGANNYDDYRMDWLVPATCEPIQSVFFFSGDKYYRVNLRTRRVDTVDPPYPRSIAQYWLGCPAPGHL

SEQ ID NO: 14171 - protein, 167 aa, Homo sapiens
MFLLDSSASVSHYEFSRVREFVGQLVAPLPLGTGALRASLVHVGSRPYTEFPFGQHSSGEAAQDAVRASAQRMGDTHTGLALVYAKEQLFAEASGARPGVPKVLVWVTDGGSSDPVGPPMQELKDLGVTVFIVSTGRGNFLELSAAASAPAEKHLHFVDVDDLHIIV

SEQ ID NO: 14172 - protein, 64 aa, Homo sapiens
MLPWTALGLALSLRLALARSGAERGAQGPGRHRVHCQHRPRQLPGAVSRCLSPCREAPALCGRG

SEQ ID NO: 14173 - protein, 148 aa, Homo sapiens
MLPWTALGLALSLRLALARSGAERGPLGEGKHPLKESWGPGGPCLAVGLSGGPTPEAEHSSFPPGPPASAPRGDLMFLLDSSASVSHYEFSRVREFVGQLVAPLPLGTGALRASLVHVGSRPYTEFPFGQHSSGEAAQDAVRASAQRM

SEQ ID NO: 14174 - protein, 445 aa, Homo sapiens
MLPWTALGLALSLRLALARSGAERGPPASAPRGDLMFLLDSSASVSHYEFSRVREFVGQLVAPLPLGTGALRASLVHVGSRPYTEFPFGQHSSGEAAQDAVRASAQRMGDTHTGLALVYAKEQLFAEASGARPGVPKVLVWVTDGGSSDPVGPPMQELKDLGVTVFIVSTGRGNFLELSAAASAPAEKHLHFVDVDDLHIIVQELRGSILDAMRPQQLHATEITSSGFRLAWPPLLTADSGYYVLELVPSAQPGAARRQQLPGNATDWIWAGLDPDTDYDVALVPESNVRLLRPQILRVRTRPGEAGPGASGPESGAGPAPTQLAALPAPEEAGPERIVISHARPRSLRVSWAPALGSAAALGYHVQFGPLRGGEAQRVEVPAGRNCTTLQGLAPGTAYLVTVTAAFRSGRESALSAKACTPDGPRPRPRPVPRAPTPGTASREP

SEQ ID NO: 14175 - protein, 421 aa, Homo sapiens
MEAHVFQKDWTATSASARWPLEGRLTVVALKLSLECRVDLLFLLDSSAGTTLDGFLRAKVFVKRFVRAVLSEDSRARVGVATYSRELLVAVPVGEYQDVPDLVWSLDGIPFRGGPTLTGSALRQAAERGFGSATRTGQDRPRRVVVLLTESHSEDEVAGPARHARARELLLLGVGSEAVRAELEEITGSPKHVMVYSDPQDLFNQIPELQGKLCSRQRPGCRTQALDLVFMLDTSASVGPENFAQMQSFVRSCALQFEVNPDVTQVGLVVYGSQVQTAFGLDTKPTRAAMLRAISQAPYLGGVGSAGTALLHIYDKVMTVQRGARPGVPKAVVVLTGGRGAEDAAVPAQKLRNNGISVLVVGVGPVLSEGLRRLAGPRDSLIHVAAYADLRYHQDVLIEWLCGGEWGNPHPQGCPHGRPSA

SEQ ID NO: 14176 - protein, 755 aa, Homo sapiens
MPPFLLLEAVCVFLFSRVPPSLPLQEVHVSKETIGKISAASKMMWCSAAVDIMFLLDGSNSVGKGSFERSKHFAITVCDGLDISPERVRVGAFQFSSTPHLEFPLDSFSTQQEVKARIKRMVFKGGRTETELALKYLLHRGLPGGRNASVPQILIIVTDGKSQGDVALPSKQLKERGVTVFAVGVRFPRWEELHALASEPRGQHVLLAEQVEDATNGLFSTLSSSAICSSATPDCRVEAHPCEHRTLEMVREFAGNAPCWRGSRRTLAVLAAHCPFYSWKRVFLTHPATCYRTTCPGPCDSQPCQNGGTCVPEGLDGYQCLCPLAFGGEANCALKLSLECRVDLLFLLDSSAGTTLDGFLRAKVFVKRFVRAVLSEDSRARVGVATYSRELLVAVPVGEYQDVPDLVWSLDGIPFRGGPTLTGSALRQAAERGFGSATRTGQDRPRRVVVLLTESHSEDEVAGPARHARARELLLLGVGSEAVRAELEEITGSPKHVMVYSDPQDLFNQIPELQGKLCSRQRPGCRTQALDLVFMLDTSASVGPENFAQMQSFVRSCALQFEVNPDVTQVGLVVYGSQVQTAFGLDTKPTRAAMLRAISQAPYLGGVGSAGTALLHIYDKVMTVQRGARPGVPKAVVVLTGGRGAEDAAVPAQKLRNNGISVLVVGVGPVLSEGLRRLAGPRDSLIHVAAYADLRYHQDVLIEWLCGEAKQPVNLCKPSPCMNEGSCVLQNGSYRCKCRDGWEGPHCENRFLRRP

SEQ ID NO: 14177 - protein, 1024 aa, Homo sapiens
MLVTGPCLLAGLESPSHALRADAPPHASSAATICVTLAEGHHCDRALEILLHPSEPHQPHLMLEGGSLSSAEYEARVRARRDFQRLQRRDSDGDRQVWFLQRRFHKDILLNPVLALSFCPDLSSKPGHLGTATRELLFLLDSSSVAHKDAIVLAVKSLPPQTLINLAVFGTLVQPLFPESRPCSDDAVQLICESIETLQVPSGPPDVLAALDWAVGQPQHRAYPRQLFLLTAASPMAATTHRTLELMRWHRGTARCFSFGLGPTCHQLLQGLSALSRGQAYFLRPGQRLQPMLVQALRKALEPALSDISVDWFVPDTVEALLTPREIPALYPGDQLLGYCSLFRVDGFRSRPPGGQEPGWQSSGGSVFPSPEEAPSAASPGTEPTGTSEPLGTGTVSAELSSPWAARDSEQTGTDALTDPVTDPGPNPSDTAIWRRIFQSSYIREQYVLTHCSASPEPGPGSTGSSESPGSQGPGSPEGSAPLEPPSQQGCRSLAWGEPAGSRSCPLPAPTPAPFKVGALSTEVLGRQHRAALAGRSLSSPPGRANQVPGRPRKPSLGAILDGPSPEPGQQLGQGLDDSGNLLSPAPMDWDMLMEPPFLFTAVPPSGELAPPAVPPQAPRCHVVIRGLCGEQPMCWEVGVGLETLWGPGDGSQPPSPPVREAAWDQALHRLTAASVVRDNEQLALRGGAETTADRGHARRCWLRALQTSKVSSAPSCFTCPVAVDATTREVLPGALQVCSSEPAEPPGTPPASHSHLDAAPLPTVVYSKGLQRGSPAGAWDSDQNGNSKRALGDPATPTEGPRRPPPRPPCRLSMGRRHKLCSPDPGQANNSEGSDHDYLPLVRLQEAPGSFRLDAPFCAAVRISQERLCRASPFAVHRASLSPTSASLPWALLGPGVGQGDSATASCSPSPSSGSEGPGQVDSGRGSDTEASEGAEGLGGTDLRGRTWATAVALAWLEHRCAAAFDEWELTAAKADCWLRAQHLPDGLDLAALKAAARGLFLLLRHWDQNLQLHLLCYSPANV

SEQ ID NO: 14178 - protein, 1242 aa, Homo sapiens
MPGLYCPSSWTPLPLTDSWVRACANGPCLSVRARLTYRNPQPQPVDGVFVYPLAEAEVVSGFEAEAAGRRVSFQLQSRRRSQAACCRALGPGLGTPTPRRCAQGHLVLDLAQARSTLVLPTGIIAAAGTMTVTLHSSRELPSRPDGVLHVALPTVLTPLAPPGPPGPPRPPGLCDDSPTSCFGVGSLQEEGLAWEELAAPRDVFSGPARCPAPYTFSFEMLVTGPCLLAGLESPSHALRADAPPHASSAATICVTLAEGHHCDRALEILLHPSEPHQPHLMLEGGSLSSAEYEARVRARRDFQRLQRRDSDGDRQVWFLQRRFHKDILLNPVLALSFCPDLSSKPGHLGTATRELLFLLDSSSVAHKDAIVLAVKSLPPQTLINLAVFGTLVQPLFPESRPCSDDAVQLICESIETLQVPSGPPDVLAALDWAVGQPQHRAYPRQLFLLTAASPMAATTHRTLELMRWHRGTARCFSFGLGPTCHQLLQGLSALSRGQAYFLRPGQRLQPMLVQALRKALEPALSDISVDWFVPDTVEALLTPREIPALYPGDQLLGYCSLFRVDGFRSRPPGGQEPGWQSSGGSVFPSPEEAPSAASPGTEPTGTSEPLGTGTVSAELSSPWAARDSEQSTDALTDPVTDPGPNPSDTAIWRRIFQSSYIREQYVLTHCSASPEPGPGSTGSSESPGSQGPGSPEGSAPLEPPSQQGCRSLAWGEPAGSRSCPLPAPTPAPFKVGALSTEVLGRQHRAALAGRSLSSPPGRANQVPGRPRKPSLGAILDGPSPEPGQQLGQGLDDSGNLLSPAPMDWDMLMEPPFLFTAVPPSGELAPPAVPPQAPRCHVVIRGLCGEQPMCWEVGVGLETLWGPGDGSQPPSPPVREAAWDQALHRLTAASVVRDNEQLALRGGAETTADRGHARRCWLRALQTSKVSSAPSCFTCPVAVDATTREVLPGALQVCSSEPAEPPGTPPASHSHLDAAPLPTVVYSKGLQRGSPAGAWDSDQNGNSKRALGDPATPTEGPRRPPPRPPCRLSMGRRHKLCSPDPGQANNSEGSDHDYLPLVRLQEAPGSFRLDAPFCAAVRISQERLCRASPFAVHRASLSPTSASLPWALLGPGVGQGDSATASCSPSPSSGSEGPGQVDSGRGSDTEASEGAEGLGGTDLRGRTWATAVALAWLEHRCAAAFDEWELTAAKADCWLRAQHLPDGLDLAALKAAARGLFLLLRHWDQNLQLHLLCYSPANV

SEQ ID NO: 14179 - protein, 891 aa, Homo sapiens
MLPTEVPQSHPGPSALLLLQLLLPPTSAFFPNIWSLLAAPGSITHQDLTEEAALNVTLQLFLEQPPPGRPPLRLEDFLGRTLLADDLFAAYFGPGSSRRFRAALGEVSRANAAQDFLPTSRNDPDLHFDAERLGQGRARLVGALRETVVAARALDHTLARQRLGAALHALQDFYSHSNWVELGEQQPHPHLLWPRQELQNLAQVADPTCSDCEELSCPRNWLGFTLLTSGYFGTHPPKPPGKCSHGGHFDRSSSQPPRGGINKDSTSPGFSPHHMLHLQAAKLALLASIQAFSLLRSRLGDRDFSRLLDITPASSLSFVLDTTGSMGEEINAAKIQARHLVEQRRGSPMEPVHYVLVPFHDPGFGPVFTTSDPDSFWQQLNEIHALGGGDEPEMCLSALQLALLHTPPLSDIFVFTDASPKDAFLTNQVESLTQERRCRVTFLVTEDTSRVQGRARREILSPLRFEPYKAVALASGGEVIFTKDQHIRDVAAIVGESMAALVTLPLDPPVVVPGQPLVFSVDGLLQKITVRIHGDISSFWIKNPAGVSQGQEEGGGPLGHTRRFGQFWMVTMDDPPQTGTWEIQVTAEDTPGVRVQAQTSLDFLFHFGIPMEDGPHPGLYPLTQPVAGLQTQLLVEVTGLGSRANPGDPQPHFSHVILRGVPEGAELGQVPLEPVGPPERGLLAASLSPTLLSTPRPFSLELIGQDAAGRRLHRAAPQPSTVVPVLLELSGPSGFLAPGSKVPLSLRIASFSGPQDLDLRTFVNPSFSLTSNLSRAHLELNESAWGRLWLEVPDSAAPDSVVMVTVTAGGREANPVPPTHAFLRLLVSAPAPQDRHTTPTGSSDPILTTATPAFSPFTLVTQGRAGAGLAAGSPWWGTVGGVLLLLGLASW

SEQ ID NO: 14180 - protein, 325 aa, Homo sapiens
MPSSTAMAVGALSSSLLVTCCLMVALCSPSIPLEKLAQAPEQPGQEKREHASRDGPGRVNELGRPARDEGGSGRDWKSKSGRGLAGREPWSKLKQAWVSQGGGAKAGDLQVRPRGDTPQAEALAAAAQDAIGPELAPTPEPPEEYVYPDYRGKGCVDESGFVYAIGEKFAPGPSACPCLCTEEGPLCAQPECPRLHPRCIHVDTSQCCPQCKERKNYCEFRGKTYQTLEEFVVSPCERCRCEANGEVLCTVSACPQTECVDPVYEPDQCCPICKNGPNCFAETAVIPAGREVKTDECTICHCTYEEGTWRIERQAMCTRHECRQM

SEQ ID NO: 14181 - protein, 222 aa, Homo sapiens
MALHIHEACILLLVIPGLVTSAAISHEDYPADEGDQISSNDNLIFDDYRGKGCVDDSGFVYKLGERFFPGHSNCPCVCALDGPVCDQPECPKIHPKCTKVEHNGCCPECKEVKNFCEYHGKNYKILEEFKPSPCEWCRCEPSNEVHCVVADCAVPECVNPVYEPEQCCPVCKNGPNCFAGTTIIPAGIEVKVDECNICHCHNGDWWKPAQCSKRECQGKQTV

SEQ ID NO: 14182 - protein, 139 aa, Homo sapiens
MALHIHEACILLLVIPGLVTSAAISHEDYPADEGDQISSNDNLIFDDYRGKGCVDDSGFVYKLGERFFPGHSNCPCVCALDGPVCDQPECPKIHPKCTKVEHNGCCPECKEVKNFCEYHGKNYKILEEFKVQTALQERR

SEQ ID NO: 14183 - protein, 670 aa, Homo sapiens [sequence omitted]

SEQ ID NO: 14184 - protein, 420 aa, Homo sapiens
MPCPELACPREEWRLGPGQCCFTCQEPTPSTGCSLDDNGVEFPIGQIWSPGDPCELCICQADGSVSCKRTDCVDSCPHPIRIPGQCCPDCSAGCTYTGRIFYNNETFPSVLDPCLSCICLLGSVACSPVDCPITCTYPFHPDGECCPVCRDCNYEGRKVANGQVFTLDDEPCTRCTCQLGEVSCEKVPCQRACADPALLPGDCCSSCPDSLSPLEEKQGLSPHGNVAFSKAGRSLHGDTEAPVNCSSCPGPPTASPSRPVLHLLQLLLRTNLMKTQTLPTSPAGAHGPHSLALGLTATFPGEPGASPRLSPGPSTPPGAPTLPLASPGAPQPPPVTPERSFSASGAQIVSRWPPLPGTLLTEASALSMMDPSPSKTPITLLGPRVLSPTTSRLSTALAATTHPGPQQPPVGASRGEESTM

SEQ ID NO: 14185 - protein, 219 aa, Homo sapiens
MWAGLLLRAACVALLLPGAPARGYTGRKPPGHFAAERRRLGPHVCLSGFGSGCCPGWAPSMGGGHCTLPLCSFGCGSGICIAPNVCSCQDGEQGATCPETHGPCGEYGCDLTCNHGGCQEVARVCPVGFSMTETAVGIRCTDIDECVTSSCEGHCVNTEGGFVCECGPGMQLSADRHSCQDTDECLGTPCQQRCKNSIGSYKCSCRTGFHLHGNRHSCM

SEQ ID NO: 14186 - protein, 955 aa, Homo sapiens
MWAGLLLRAACVALLLPGAPARGYTGRKPPGHFAAERRRLGPHVCLSGFGSGCCPGWAPSMGGGHCTLPLCSFGCGSGICIAPNVCSCQDGEQGATCPETHGPCGEYGCDLTCNHGGCQEVARVCPVGFSMTETAVGIRCTDIDECVTSSCEGHCVNTEGGFVCECGPGMQLSADRHSCQDTDECLGTPCQQRCKNSIGSYKCSCRTGFHLHGNRHSCVDVNECRRPLERRVCHHSCHNTVGSFLCTCRPGFRLRADRVSCEAFPKAVLAPSAILQPRQHPSKMLLLLPEAGRPALSPGHSPPSGAPGPPAGVRTTRLPSPTPRLPTSSPSAPVWLLSTLLATPVPTASLLGNLRPPSLLQGEVMGTPSSPRGPESPRLAAGPSPCWHLGAMHESRSRWTEPGCSQCWCEDGKVTCEKVRCEAACSHPIPSRDGGCCPSCTGCFHSGVVRAEGDVFSPPNENCTVCVCLAGNVSCISPECPSGPCQTPPQTDCCTCVPVRCYFHGRWYADGAVFSGGGDECTTCVCQNGEVECSFMPCPELACPREEWRLGPGQCCFTCQEPTPSTGCSLDDNGVEFPIGQIWSPGDPCELCICQADGSVSCKRTDCVDSCPHPIRIPGQCCPDCSAGCTYTGRIFYNNETFPSVLDPCLSCICLLGSVACSPVDCPITCTYPFHPDGECCPVCRDCNYEGRKVANGQVFTLDDEPCTRCTCQLGEVSCEKVPCQRACADPALLPGDCCSSCPDSLSPLEEKQGLSPHGNVAFSKAGRSLHGDTEAPVNCSSCPGPPTASPSRPVLHLLQLLLRTNLMKTQTLPTSPAGAHGPHSLALGLTATFPGEPGASPRLSPGPSTPPGAPTLPLASPGAPQPPPVTPERSFSASGAQIVSRWPPLPGTLLTEASALSMMDPSPSKTPITLLGPRVLSPTTSRLSTALAATTHPGPQQPPVGASRGEESTM

SEQ ID NO: 14187 - protein, 173 aa, Homo sapiens
MWAGLLLRAACVALLLPGAPARGYTGRKPPGHFAAERRRLGPHVCLSGFGSGCCPGWAPSMGGGHCTLRKCLSLCPKSSPPAVCVASPQSLVRGADGRPQFLVSHLHFSSQPSAPSAVGVASASLPMSAPARMESKGPPAQKPMDHVGSTAVTLPATMEAVRRWPECAPWASR

SEQ ID NO: 14188 - protein, 1590 aa, Homo sapiens
MPGGACVLVIALMFLAWGEAQECSPGGHQFLRSPYRSVRFDSWHLQQSAVQDLICDHSLSPGWYRFLILDRPAEMPTKCVEMNHCGTQAPIWLSLRDSETLPSPGEIKQLTACATWQFLFSTTKDCCLFQIPVSVRNCGNFSVYLLQPTQGCMGYCAEAISDARLHPCGSDETETGGDCVRQLAASLPPPPAGRPEVLVELIESRLFCRCSFDVPATKNSVGFHIAWSRLSSQEVKEELTQETTVQAFSLLELDGINLRLGDRIFCSASVFFLENPHVQSVAIESQEFFAGFKLQPELSTISEDGKEYYLRIESTVPIICSEFSELDQECKISLKLKTIGQGREHLGLNLALSSCHVDLLQTSSCANGTCSHTFVYYTAVTDFSRDGDRVSNIVVQPIVNEDFLWNNYIPDSIQIKVKDVPTAYCYTFTDPHIITFDGRVYDNFKTGTFVLYKSMSRDFEVHVRQWDCRSLHYPVSCNCGFVAQEGGDIVTFDMCNGQLRESQPYLFIKSQDVTRNIKISESYLGRKVTIWFSSGAFIRADLGEWGMSLTIRAPSVDYRNTLGLCGTFDENPENDFHDKNGMQIDQNFNNYVAFINEWRILPGKSMSDTLPVSMTSPGKPSYCSCSLDTAAYPSSEDLDSVSRSEIALGCKDLNHVSLSSLIPELDVTSEYINSDTLVREINKHTSPEEYNLNLFLQEKKHINLTKLGLNVQKHPGNEKEDSLQYLANKKYTQGRGSHSQEMRYNRQNRWKRQNFHEFPPLFAFPSLSQTDLEELTYFFPEDHAEDVQQEFFPSWPTPSGLTEYSTLTLCQETLANSSIGRLCLAFLGKRLDSVIEMCVKDVLLKDDLSWAEAGVALLENECEKRIVEEGKYNTEEYGTSIEDILSVLKCPNLCSGNGQCMEWGCACSPSFSSYDCSDSYDKAPEITELGNAGFCDVQKYNCMMVRVFGKGFKELPSIKCEVTKLQYNSSEWMPGEPIYTQTVFHNSRAVDCQLPTDVQQFDTMDLVGGKPTGKWQLKVSNDGYKFSNPKITVIYDGACQVCGLYKNDSCTIKENVCIIDGLCYVEGDKNPTSPCLICRPKISRFTWSFLENNQPPVIQALQDKLQTFYGENFEYQFVAFDPEGSDIHFTLDSGPEGASVSSAGLFMWKTDLLTTQQITVRLNDDCDAETRVTIEVTVKSCDCLNGGSCVSDRNFSPGSGVYLCVCLPGFHGSLCEVDISGCQSNPCGLGSYISGFHSYSCDCPPELKVETQFVNQFTTQTVVLTRSDKSVNKEEDDKNAQGRKRHVKPTSGNAFTICKYPCGKSRECVAPNICKCKPGYIGSNCQTALCDPDCKNHGKCIKPNICQCLPGHGGATCDEEHCNPPCQHGGTCLAGNLCTCPYGFVGPRCETMVCNRHCENGGQCLTPDICQCKPGWYGPTCSTALCDPVCLNGGSCNKPNTCLCPNGFFGEHCQNAFCHPPCKNGGHCMRNNVCVCREGYTGRRFQKSICDPTCMNGGKCVGPSTCSCPSGWSGKRCNTPICLQKCKNGGECIAPSICHCPSSWEGVRCQIPICNPKCLYGGRCIFPNVCSCRTEYSGVKCEKKIQIRRH

SEQ ID NO: 14189 - protein, 1302 aa, Homo sapiens
MPGGACVLVIALMFLAWGEAQECSPGGHQFLRSPYRSVRFDSWHLQQSAVQDLICDHSLSPGWYRFLILDRPAEMPTKCVEMNHCGTQAPIWLSLRDSETLPSPGEIKQLTACATWQFLFSTTKDCCLFQIPVSVRNCGNFSVYLLQPTQGCMGYCAEAISDARLHPCGSDETETGGDCVRQLAASLPPPPAGRPEVLVELIESRLFCRCSFDVPATKNSVGFHIAWSRLSSQEVKEELTQETTVQAFSLLELDGINLRLGDRIFCSASVFFLENPHVQSVAIESQEFFAGFKLQPELSTISEDGKEYYLRIESTVPIICSEFSELDQECKISLKLKTIGQGREHLGLNLALSSCHVDLLQTSSCANGTCSHTFVYYTAVTDFSRDGDRVSNIVVQPIVNEDFLWNNYIPDSIQIKVKDVPTAYCYTFTDPHIITFDGRVYDNFKTGTFVLYKSMSRDFEVHVRQWDCRSLHYPVSCNCGFVAQEGGDIVTFDMCNGQLRESQPYLFIKSQDVTRNIKISESYLGRKVTIWFSSGAFIRADLGEWGMSLTIRAPSVDYRNTLGLCGTFDENPENDFHDKNGMQIDQNFNNYVAFINEWRILPGKSMSDTLPVSMTSPGKPSYCSCSLDTAAYPSSEDLDSVSRSEIALGCKDLNHVSLSSLIPELDVTSEYINSDTLVREINKHTSPEEYNLNLFLQEKKHINLTKLGLNVQKHPGNEKEDSLQYLANKKYTQGRGSHSQEMRYNRQNRWKRQNFHEFPPLFAFPSLSQTDLEELTYFFPEDHAEDVQQEFFPSWPTPSGLTEYSTLTLCQETLANSSIGRLCLAFLGKRLDSVIEMCVKDVLLKDDLSWAEAGVALLENECEKRIVEEGKYNTEEYGTSIEDILSVLKCPNLCSGNGQCMEWGCACSPSFSSYDCSDSYDKAPEITELGNAGFCDVQKYNCMMVRVFGKGFKELPSIKCEVTKLQYNSSEWMPGEPIYTQTVFHNSRAVDCQLPTDVQQFDTMDLVGGKPTGKWQLKVSNDGYKFSNPKITVIYDGACQVCGLYKNDSCTIKENVCIIDGLCYVEGDKNPTSPCLICRPKISRFTWSFLENNQPPVIQALQDKLQTFYGENFEYQFVAFDPEGSDIHFTLDSGPEGASVSSAGLFMWKTDLLTTQQITVRLNDDCDAETRVTIEVTVKSCDCLNGGSCVSDRNFSPGSGVYLCVCLPGFHGSLCEVDISGCQSNPCGLGSYISGFHSYSCDCPPELKGKNCQEDVDECDSKPCFEGVACLNTFGSYHCGSCPEGFYGDGKICHGKSFYFLL

SEQ ID NO: 14190 - protein, 352 aa, Homo sapiens
MPGGACVLVIALMFLAWGEAQECSPGGHQFLRSPYRSVRFDSWHLQQSAVQDLICDHSLSPGWYRFLILDRPAEMPTKCVEMNHCGTQAPIWLSLRDSETLPSPGEIKQLTACATWQFLFSTTKDCCLFQIPVSVRNCGNFSVYLLQPTQGCMGYCAEAISDARLHPCGSDETETGGDCVRQLAASLPPPPAGRPEVLVELIESRLFCRCSFDVPATKNSVGFHIAWSRLSSQEVKEELTQETTVQAFSLLELDGINLRLGDRIFCSASVFFLENPHVQSVAIESQEFFAGFKLQPELSTISEDGKEYYLRIESTVPIICSEFSELDQECKISLKLKTIGQDLVFFWGIYPC

SEQ ID NO: 14191 - protein, 170 aa, Homo sapiens
MPGGACVLVIALMFLAWGEAQECSPGGHQFLRSPYRSVRFDSWHLQQSAVQDLICDHSLSPGWYRFLILDRPAEMPTKCVEMNHCGTQAPIWLSLRDSETLPSPGEIKQLTACATWQFLFSTTKDCCLFQIPVSVRNCGNFSVYLLQPTQGCMGYCAEGFFAKIVKSPHT

SEQ ID NO: 14192 - protein, 944 aa, Homo sapiens
MSLTIRAPSVDYRNTLGLCGTFDENPENDFHDKNGMQIDQNFNNYVAFINEWRILPGKSMSDTLPVSMTSPGKPSYCSCSLDTAAYPSSEDLDSVSRSEIALGCKDLNHVSLSSLIPELDVTSEYINSDTLVREINKHTSPEEYNLNLFLQEKKHINLTKLGLNVQKHPGNEKEDSLQYLANKKYTQGRGSHSQEMRYNRQNRWKRQNFHEFPPLFAFPSLSQTDLEELTYFFPEDHAEDVQQEFFPSWPTPSGLTEYSTLTLCQETLANSSIGRLCLAFLGKRLDSVIEMCVKDVLLKDDLSWAEAGVALLENECEKRIVEEGKYNTEEYGTSIEDILSVLKCPNLCSGNGQCMEWGCACSPSFSSYDCSDSYDKAPEITELGNAGFCDVQKYNCMMVRVFGKGFKELPSIKCEVTKLQYNSSEWMPGEPIYTQTVFHNSRAVDCQLPTDVQQFDTMDLVGGKPTGKWQLKVSNDGYKFSNPKITVIYDGACQVCGLYKNDSCTIKENVCIIDGLCYVEGDKNPTSPCLICRPKISRFTWSFLENNQPPVIQALQDKLQTFYGENFEYQFVAFDPEGSDIHFTLDSGPEGASVSSAGLFMWKTDLLTTQQITVRLNDDCDAETRVTIEVTVKSCDCLNGGSCVSDRNFSPGSGVYLCVCLPGFHGSLCEVDISGCQSNPCGLGSYISGFHSYSCDCPPELKVETQFVNQFTTQTVVLTRSDKSVNKEEDDKNAQGRKRHVKPTSGNAFTICKYPCGKSRECVAPNICKCKPGYIGSNCQTALCDPDCKNHGKCIKPNICQCLPGHGGATCDEEHCNPPCQHGGTCLAGNLCTCPYGFVGPRCETMVCNRHCENGGQCLTPDICQCKPGWYGPTCSTALCDPVCLNGGSCNKPNTCLCPNGFFGEHCQNAFCHPPCKNGGHCMRNNVCVCREGYTGRRFQKRHL

SEQ ID NO: 14193 - protein, 166 aa, Homo sapiens
VTVKSCDCLNGGSCVSDRNFSPGSGVYLCVCLPGFHGSLCEVDISGCQSNPCGLGSYISGFHSYSCDCPPELKGKNCQEDVDECDSKPCFEGVACLNTFGSYHCGSCPEGFYGDGKICHVETQFVNQFTTQTVVLTRSDKSVNKEEDDKNAQGRKRHVKPTSGNAF

SEQ ID NO: 14194 - protein, 60 aa, Homo sapiens
MIPARFAGVLLALALILPETRCLQMPSPVGELRSIKVAQNCPILWGHRMRRKESKTWMDY

SEQ ID NO: 14195 - protein, 60 aa, Homo sapiens; identical to SEQ ID NO: 14194

SEQ ID NO: 14196 - protein, 2813 aa, Homo sapiens
MIPARFAGVLLALALILPGTLCAEGTRGRSSTARCSLFGSDFVNTFDGSMYSFAGYCSYLLAGGCQKRSFSIIGDFQNGKRVSLSVYLGEFFDIHLFVNGTVTQGDQRVSMPYASKGLYLETEAGYYKLSGEAYGFVARIDGSGNFQVLLSDRYFNKTCGLCGNFNIFAEDDFMTQEGTLTSDPYDFANSWALSSGEQWCERASPPSSSCNISSGEMQKGLWEQCQLLKSTSVFARCHPLVDPEPFVALCEKTLCECAGGLECACPALLEYARTCAQEGMVLYGWTDHSACSPVCPAGMEYRQCVSPCARTCQSLHINEMCQERCVDGCSCPEGQLLDEGLCVESTECPCVHSGKRYPPGTSLSRDCNTCICRNSQWICSNEECPGECLVTGQSHFKSFDNRYFTFSGICQYLLARDCQDHSFSIVIETVQCADDRDAVCTRSVTVRLPGLHNSLVKLKHGAGVAMDGQDVQLPLLKGDLRIQHTVTASVRLSYGEDLQMDWDGRGRLLVKLSPVYAGKTCGLCGNYNGNQGDDFLTPSGLAEPRVEDFGNAWKLHGDCQDLQKQHSDPCALNPRMTRFSEEACAVLTSPTFEACHRAVSPLPYLRNCRYDVCSCSDGRECLCGALASYAAACAGRGVRVAWREPGRCELNCPKGQVYLQCGTPCNLTCRSLSYPDEECNEACLEGCFCPPGLYMDERGDCVPKAQCPCYYDGEIFQPEDIFSDHHTMCYCEDGFMHCTMSGVPGSLLPDAVLSSPLSHRSKRSLSCRPPMVKLVCPADNLRAEGLECTKTCQNYDLECMSMGCVSGCLCPPGMVRHENRCVALERCPCFHQGKEYAPGETVKIGCNTCVCQDRKWNCTDHVCDATCSTIGMAHYLTFDGLKYLFPGECQYVLVQDYCGSNPGTFRILVGNKGCSHPSVKCKKRVTILVEGGEIELFDGEVNVKRPMKDETHFEVVESGRYIILLLGKALSVVWDRHLSISVVLKQTYQEKVCGLCGNFDGIQNNDLTSSNLQVEEDPVDFGNSWKVSSQCADTRKVPLDSSPATCHNNIMKQTMVDSSCRILTSDVFQDCNKLVDPEPYLDVCIYDTCSCESIGDCACFCDTIAAYAHVCAQHGKVVTWRTATLCPQSCEERNLRENGYECEWRYNSCAPACQVTCQHPEPLACPVQCVEGCHAHCPPGKILDELLQTCVDPEDCPVCEVAGRRFASGKKVTLNPSDPEHCQICHCDVVNLTCEACQEPGGLVVPPTDAPVSPTTLYVEDISEPPLHDFYCSRLLDLVFLLDGSSRLSEAEFEVLKAFVVDMMERLRISQKWVRVAVVEYHDGSHAYIGLKDRKRPSELRRIASQVKYAGSQVASTSEVLKYTLFQIFSKIDRPEASRITLLLMASQEPQRMSRNFVRYVQGLKKKKVIVIPVGIGPHANLKQIRLIEKQAPENKAFVLSSVDELEQQRDEIVSYLCDLAPEAPPPTLPPDMAQVTVGPGLLGVSTLGPKRNSMVLDVAFVLEGSDKIGEADFNRSKEFMEEVIQRMDVGQDSIHVTVLQYSYMVTVEYPFSEAQSKGDILQRVREIRYQGGNRTNTGLALRYLSDHSFLVSQGDREQAPNLVYMVTGNPASDEIKRLPGDIQVVPIGVGPNANVQELERIGWPNAPILIQDFETLPREAPDLVLQRCCSGEGLQIPTLSPAPDCSQPLDVILLLDGSSSFPASYFDEMKSFAKAFISKANIGPRLTQVSVLQYGSITTIDVPWNVVPEKAHLLSLVDVMQREGGPSQIGDALGFAVRYLTSEMHGARPGASKAVVILVTDVSVDSVDAAADAARSNRVTVFPIGIGDRYDAAQLRILAGPAGDSNVVKLQRIEDLPTMVTLGNSFLHKLCSGFVRICMDEDGNEKRPGDVWTLPDQCHTVTCQPDGQTLLKSHRVNCDRGLRPSCPNSQSPVKVEETCGCRWTCPCVCTGSSTRHIVTFDGQNFKLTGSCSYVLFQNKEQDLEVILHNGACSPGARQGCMKSIEVKHSALSVELHSDMEVTVNGRLVSVPYVGGNMEVNVYGAIMHEVRFNHLGHIFTFTPQNNEFQLQLSPKTFASKTYGLCGICDENGANDFMLRDGTVTTDWKTLVQEWTVQRPGQTCQPILEEQCLVPDSSHCQVLLLPLFAECHKVLAPATFYAICQQDSCHQEQVCEVIASYAHLCRTNGVCVDWRTPDFCAMSCPPSLVYNHCEHGCPRHCDGNVSSCGDHPSEGCFCPPDKVMLEGSCVPEEACTQCIGEDGVQHQFLEAWVPDHQPCQICTCLSGRKVNCTTQPCPTAKAPTCGLCEVARLRQNADQCCPEYECVCDPVSCDLPPVPHCERGLQPTLTNPGECRPNFTCACRKEECKRVSPPSCPPHRLPTLRKTQCCDEYECACNCVNSTVSCPLGYLASTATNDCGCTTTTCLPDKVCVHRSTIYPVGQFWEEGCDVCTCTDMEDAVMGLRVAQCSQKPCEDSCRSGFTYVLHEGECCGRCLPSACEVVTGSPRGDSQSSWKSVGSQWASPENPCLINECVRVKEEVFIQQRNVSCPQLEVPVCPSGFQLSCKTSACCPSCRCERMEACMLNGTVIGPGKTVMIDVCTTCRCMVQVGVISGFKLECRKTTCNPCPLGYKEENNTGECCGRCLPTACTIQLRGGQIMTLKRDETLQDGCDTHFCKVNERGEYFWEKRVTGCPPFDEHKCLAEGGKIMKIPGTCCDTCEEPECNDITARLQYVKVGSCKSEVEVDIHYCQGKCASKAMYSIDINDVQDQCSCCSPTRTEPMQVALHCTNGSVVYHEVLNAMECKCSPRKCSK

SEQ ID NO: 14197 - protein, 287 aa, Homo sapiens
MPALCLVLCWFQGLLGEVWNAVDSGHCLQTYSLHTEAVRAARWAPCGRRILSGGFDFALHLTDLETGTQLFSGRSDFRITTLKFHPKDHNIFLCGGFSSEMKAWDIRTGKVMRSYKATIQQTLDILFLREGSEFLSSTDASTRDSADRTIIAWDFRTSAKISNQIFHERFTCPSLALHPREPVFLAQTNGNYLALFSTVWPYRMSRRRRYEGHKVEGYSVGCECSPGGDLLVTGSADGRVLMYSFRTASRACTLQGHTQACVGTTYHPVLPSVLATCSWGGDMKIWH

SEQ ID NO: 14198 - protein, 544 aa, Homo sapiens
MTARTLSLMASLVAYDDSDSEAETEHAGSFNATGQQKDTSGVARPPGQDFASGTLDVPKAGAQPTKHGSCEDPGGYRLPLAQLGRSDWGSCPSQRLQWPGKEPQVTFPIKEPSCSSLWTSHVPASHMPLAAARFKQVKLSRNFPKSSFHAQSESETVGKNGSSFQKKKCEDCVVPYTPRRLRQRQALSTETGKGKDVEPQGPPAGRAPAPLYVGPGVSEFIQPYLNSHYKETTVPRKVLFHLRGHRGPVNTIQWCPVLSKSHMLLSTSMDKTFKVWNAVDSGHCLQTYSLHTEAVRAARWAPCGRRILSGGFDFALHLTDLETGTQLFSGRSDFRITTLKFHPKDHNIFLCGGFSSEMKAWDIRTGKVMRSYKATIQQTLDILFLREGSEFLSSTDASTRDSADRTIIAWDFRTSAKISNQIFHERFTCPSLALHPREPVFLAQTNGNYLALFSTVWPYRMSRRRRYEGHKVEGYSVGCECSPGGDLLVTGSADGRVLMYSFRTASRACTLQGHTQACVGTTYHPVLPSVLATCSWGGDMKIWH

SEQ ID NO: 14199 - protein, 544 aa, Homo sapiens; identical to SEQ ID NO: 14198

SEQ ID NO: 14200 - protein, 274 aa, Homo sapiens
MTARTLSLMASLVAYDDSDSEAETEHAGSFNATGQQKDTSGVARPPGQDFASGTLDVPKAGAQPTKHGSCEDPGGYRLPLAQLGRSDWGSCPSQRLQWPGKEPQVTFPIKEPSCSSLWTSHVPASHMPLAAARFKQVKLSRNFPKSSFHAQSESETVGKNGSSFQKKKCEDCVVPYTPRRLRQRQALSTETGKGKDVEPQGPPAGRAPAPLYVGPGVSEFIQPYLNSHYKETTVPRKVLFHLRGHRGPVNTIQWCPVLSKSHMLLSTSMDKTFK

SEQ ID NO: 14201 - protein, 289 aa, Homo sapiens
MTARTLSLMASLVAYDDSDSEAETEHAGSFNATGQQKDTSGVARPPGQDFASGTLDVPKAGAQPTKHGSCEDPGGYRLPLAQLGRSDWGSCPSQRLQWPGKEPQVTFPIKEPSCSSLWTSHVPASHMPLAAARFKQVKLSRNFPKSSFHAQSESETVGKNGSSFQKKKCEDCVVPYTPRRLRQRQALSTETGKGKDVEPQGPPAGRAPAPLYVGPGVSEFIQPYLNSHYKETTVPRKVLFHLRGHRGPVNTIQWCPVLSKSHMLLSTSMDKTFKEPSYLVVEVTLESLP

SEQ ID NO: 14202 - protein, 544 aa, Homo sapiens; identical to SEQ ID NO: 14198

SEQ ID NO: 14203 - protein, 121 aa, Homo sapiens
  SITE 1: note = misc_feature - Xaa can be any naturally occurring amino acid
XSTDASTRDSADRTIIAWDFRTSAKISNQIFHERFTCPSLALHPREPVFLAQTNGNYLALFSTVWPYRMSRRRRYEGHKVLLSLSPRRMLSPSPKPPGSPGHGPWGAWSLCLGGSCFLFPG

SEQ ID NO: 14204 - protein, 1941 aa, Homo sapiens
MAQGSGGREGALRTPAGGWHSPPSPDMQELLRSVERDLSIDPRQLAPAPGGTHVVALVPARWLASLRDRRLPLGPCPRAEGLGEAEVRTLLQRSVQRLPAGWTRVEVHGLRKRRLSYPLGGGLPFEDGSCGPETLTRFMQEVAAQNYRNLWRHAYHTYGQPYSHSPAPSAVPALDSVRQALQRVYGCSFLPVGETTQCPSYAREGPCPPRGSPACPSLLRAEALLESPEMLYVVHPYVQFSLHDVVTFSPAKLTNSQAKVLFILFRVLRAMDACHRQGLACGALSLYHIAVDEKLCSELRLDLSAYERPEEDENEEAPVARDEAGIVSQEEQGGQPGQPTGQEELRSLVLDWVHGRISNFHYLMQLNRLAGRRQGDPNYHPVLPWVVDFTTPHGRFRDLRKSKFRLNKGDKQLDFTYEMTRQAFVAGGAGGGEPPHVPHHISDVLSDITYYVYKARRTPRSVLCGHVRAQWEPHEYPASMERMQNWTPDECIPEFYTDPSIFRSIHPDMPDLDVPAWCSSSQEFVAAHRALLESREVSRDLHHWIDLTFGYKLQGKEAVKEKNVCLHLVDAHTHLASYGVVQLFDQPHPQRLAGAPALAPEPPLIPKLLVQTIQETTGREDFTENPGQLPNGVGRPVLEATPCEASWTRDRPVAGEDDLEQATEALDSISLAGKAGDQLGSSSQASPGLLSFSVASASRPGRRNKAAGADPGEGEEGRILLPEGFNPMQALEELEKTGNFLAKGLGGLLEVPEQPRVQPAVPLQCLLHRDMQALGVLLAEMVFATRVRTLQPDAPLWVRFQAVRGLCTRHPKEVPVSLQPVLDTLLQMSGPEVPMGAERGKLDQLFEYRPVSQGLPPPCPSQLLSPFSSVVPFPPYFPALHRFILLYQARRVEDEAQGRELVFALWQQLGAVLKDITPEGLEILLPFVLSLMSEEHTAVYTAWYLFEPVAKALGPKNANKYLLKPLIGAYESPCQLHGRFYLYTDCFVAQLMVRLGLQAFLTHLLPHVLQVLAGAEASQEESKDLAGAAEEEESGLPGAGPGSCAFGEEIPMDGEPPASSGLGLPDYTSGVSFHDQADLPETEDFQAGLYVTESPQPQEAEAVSLGRLSDKSSTSETSLGEERAPDEGGAPVDKSSLRSGDSSQDLKQSEGSEEEEEEEDSCVVLEEEEGEQEEVTGASELTLSDTVLSMETVVAGGSGGDGEEEEEALPEQSEGKEQKILLDTACKMVRWLSAKLGPTVASRHVARNLLRLLTSCYVGPTRQQFTVSSGESPPLSAGNIYQKRPVLGDIVSGPVLSCLLHIARLYGEPVLTYQYLPYISYLVAPGSASGPSRLNSRKEAGLLAAVTLTQKIIVYLSDTTLMDILPRISHEVLLPVLSFLTSLVTGFPSGAQARTILCVKTISLIALICLRIGQEMVQQHLSEPVATFFQVFSQLHELRQQDLKLDPAGRGEGQLPQVVFSDGQQRPVDPALLDELQKVFTLEMAYTIYVPFSCLLGDIIRKIIPNHELVGELAALYLESISPSSRNPASVEPTMPGTGPEWDPHGGGCPQDDGHSGTFGSVLVGNRIQIPNDSRPENPGPLGPISGVGGGGLGSGSDDNALKQELPRSVHGLSGNWLAYWQYEIGVSQQDAHFHFHQIRLQSFPGHSGAVKCVAPLSSEDFFLSGSKDRTVRLWPLYNYGDGTSETAPRLVYTQHRKSVFFVGQLEAPQHVVSCDGAVHVWDPFTGKTLRTVEPLDSRVPLTAVAVMPAPHTSITMASSDSTLRFVDCRKPGLQHEFRLGGGLNPGLVRALAISPSGRSVVAGFSSGFMVLLDTRTGLVLRGWPAHEGDILQIKAVEGSVLVSSSSDHSLTVWKELEQKPTHHYKSASDPIHTFDLYGSEVVTGTVSNKIGVCSLLEPPSQATTKLSSENFRGTLTSLALLPTKRHLLLGSDNGVIRLLA

SEQ ID NO: 14205 - protein, 890 aa, Homo sapiens
MDGEPPASSGLGLPDYTSGVSFHDQADLPETEDFQAGLYVTESPQPQEAEAVSLGRLSDKSSTSETSLGEERAPDEGGAPVDKSSLRSGDSSQDLKQSEGSEEEEEEEDSCVVLEEEEGEQEEVTGASELTLSDTVLSMETVVAGGSGGDGEEEEEALPEQSEGKEQKILLDTACKMVRWLSAKLGPTVASRHVARNLLRLLTSCYVGPTRQQFTVSSGESPPLSAGNIYQKRPVLGDIVSGPVLSCLLHIARLYGEPVLTYQYLPYISYLVAPGSASGPSRLNSRKEAGLLAAVTLTQKIIVYLSDTTLMDILPRISHEVLLPVLSFLTSLVTGFPSGAQARTILCVKTISLIALICLRIGQEMVQQHLSEPVATFFQVFSQLHELRQQDLKLDPAGRGEGQLPQVVFSDGQQRPVDPALLDELQKVFTLEMAYTIYVPFSCLLGDIIRKIIPNHELVGELAALYLESISPSSRNPASVEPTMPGTGPEWDPHGGGCPQDDGHSGTFGSVLVGNRIQIPNDSRPENPGPLGPISGVGGGGLGSGSDDNALKQELPRSVHGLSGNWLAYWQYEIGVSQQDAHFHFHQIRLQSFPGHSGAVKCVAPLSSEDFFLSGSKDRTVRLWPLYNYGDGTSETAPRLVYTQHRKSVFFVGQLEAPQHVVSCDGAVHVWDPFTGKTLRTVEPLDSRVPLTAVAVMPAPHTSITMASSDSTLRFVDCRKPGLQHEFRLGGGLNPGLVRALAISPSGRSVVAGFSSGFMVLLDTRTGLVLRGWPAHEGDILQIKAVEGSVLVSSSSDHSLTVWKELEQKPTHHYKSASDPIHTFDLYGSEVVTGTVSNKIGVCSLLEPPSQATTKLSSENFRGTLTSLALLPTKRHLLLGSDNGVIRLLA

SEQ ID NO: 14206 - protein, 580 aa, Homo sapiens
MDILPRISHEVLLPVLSFLTSLVTGFPSGAQARTILCVKTISLIALICLRIGQEMVQQHLSEPVATFFQVFSQLHELRQQDLKLDPAGRGEGQLPQVVFSDGQQRPVDPALLDELQKVFTLEMAYTIYVPFSCLLGDIIRKIIPNHELVGELAALYLESISPSSRNPASVEPTMPGTGPEWDPHGGGCPQDDGHSGTFGSVLVGNRIQIPNDSRPENPGPLGPISGVGGGGLGSGSDDNALKQELPRSVHGLSGNWLAYWQYEIGVSQQDAHFHFHQIRLQSFPGHSGAVKCVAPLSSEDFFLSGSKDRTVRLWPLYNYGDGTSETAPRLVYTQHRKSVFFVGQLEAPQHVVSCDGAVHVWDPFTGKTLRTVEPLDSRVPLTAVAVMPAPHTSITMASSDSTLRFVDCRKPGLQHEFRLGGGLNPGLVRALAISPSGRSVVAGFSSGFMVLLDTRTGLVLRGWPAHEGDILQIKAVEGSVLVSSSSDHSLTVWKELEQKPTHHYKSASDPIHTFDLYGSEVVTGTVSNKIGVCSLLEPPSQATTKLSSENFRGTLTSLALLPTKRHLLLGSDNGVIRLLA

SEQ ID NO: 14207 - protein, 171 aa, Homo sapiens
MHAGPCSSQPDTVVPRTQRALFPSGAQARTILCVKTISLIALICLRIGQEMVQQHLSEPVATFFQVFSQLHELRQQDLKLDPAGRGEGQLPQVVFSDGQQRPVDPALLDELQKVFTLEMAYTIYVPFSCLLGDIIRKIIPNHELVGELAALYLESISPSSRNPASVEPTMP

SEQ ID NO: 14208 - protein, 172 aa, Homo sapiens
MLVRVVLSLTPSFPEPSALYTACKMVRWLSAKLGPTVASRHVARNLLRLLTSCYVGPTRQQFTVSSGESPPLSAGNIYQKRPVLGDIVSGPVLSCLLHIARLYGEPVLTYQYLPYISYLVAPGSASGPSRLNSRKEAGLLAAVTLTQKIIVYLSDTTLMDILPRISHEVLLP

SEQ ID NO: 14209 - protein, 738 aa, Homo sapiens
MLVRVVLSLTPSFPEPSALYTACKMVRWLSAKLGPTVASRHVARNLLRLLTSCYVGPTRQQFTVSSGESPPLSAGNIYQKRPVLGDIVSGPVLSCLLHIARLYGEPVLTYQYLPYISYLVAPGSASGPSRLNSRKEAGLLAAVTLTQKIIVYLSDTTLMDILPRISHEVLLPVLSFLTSLVTGFPSGAQARTILCVKTISLIALICLRIGQEMVQQHLSEPVATFFQVFSQLHELRQQDLKLDPAGRGEGQLPQVVFSDGQQRPVDPALLDELQKVFTLEMAYTIYVPFSCLLGDIIRKIIPNHELVGELAALYLESISPSSRNPASVEPTMPGTGPEWDPHGGGCPQDDGHSGTFGSVLVGNRIQIPNDSRPENPGPLGPISGVGGGGLGSGSDDNALKQELPRSVHGLSGNWLAYWQYEIGVSQQDAHFHFHQIRLQSFPGHSGAVKCVAPLSSEDFFLSGSKDRTVRLWPLYNYGDGTSETAPRLVYTQHRKSVFFVGQLEAPQHVVSCDGAVHVWDPFTGKTLRTVEPLDSRVPLTAVAVMPAPHTSITMASSDSTLRFVDCRKPGLQHEFRLGGGLNPGLVRALAISPSGRSVVAGFSSGFMVLLDTRTGLVLRGWPAHEGDILQIKAVEGSVLVSSSSDHSLTVWKELEQKPTHHYKSASDPIHTFDLYGSEVVTGTVSNKIGVCSLLEPPSQATTKLSSENFRGTLTSLALLPTKRHLLLGSDNGVIRLLA

SEQ ID NO: 14210 - protein, 132 aa, Homo sapiens
MVQQHLSEPVATFFQVFSQLHELRQQDLKLDPAGRGEGQLPQVVFSDGQQRPVDPALLDELQKVFTLEMAYTIYVPFSCLLGDIIRKIIPNHELVGELAALYLESISPSSRNPASVEPTMPGTGPEWDPHGG

SEQ ID NO: 14211 - protein, 714 aa, Homo sapiens
MVRWLSAKLGPTVASRHVARNLLRLLTSCYVGPTRQQFTVSSGESPPLSAGNIYQKRPVLGDIVSGPVLSCLLHIARLYGEPVLTYQYLPYISYLVAPGSASGPSRLNSRKEAGLLAAVTLTQKIIVYLSDTTLMDILPRISHEVLLPVLSFLTSLVTGFPSGAQARTILCVKTISLIALICLRIGQEMVQQHLSEPVATFFQVFSQLHELRQQDLKLDPAGRGEGQLPQVVFSDGQQRPVDPALLDELQKVFTLEMAYTIYVPFSCLLGDIIRKIIPNHELVGELAALYLESISPSSRNPASVEPTMPGTGPEWDPHGGGCPQDDGHSGTFGSVLVGNRIQIPNDSRPENPGPLGPISGVGGGGLGSGSDDNALKQELPRSVHGLSGNWLAYWQYEIGVSQQDAHFHFHQIRLQSFPGHSGAVKCVAPLSSEDFFLSGSKDRTVRLWPLYNYGDGTSETAPRLVYTQHRKSVFFVGQLEAPQHVVSCDGAVHVWDPFTGKTLRTVEPLDSRVPLTAVAVMPAPHTSITMASSDSTLRFVDCRKPGLQHEFRLGGGLNPGLVRALAISPSGRSVVAGFSSGFMVLLDTRTGLVLRGWPAHEGDILQIKAVEGSVLVSSSSDHSLTVWKELEQKPTHHYKSASDPIHTFDLYGSEVVTGTVSNKIGVCSLLEPPSQATTKLSSENFRGTLTSLALLPTKRHLLLGSDNGVIRLLA

SEQ ID NO: 14212 - protein, 197 aa, Homo sapiens
  SITE 1: note = misc_feature - Xaa can be any naturally occurring amino acid
XFQAGLYVTESPQPQEAEAVSLGRLSDKSSTSETSLGEERAPDEGGAPVDKSSLRSGDSSQDLKQSEGSEEEEEEEDSCVVLEEEEGEQEEVTGASELTLSDTVLSMETVVAGGSGGDGEEEEEALPEQSEGKEQKILLGPTRQQFTVSSGESPPLSAGNIYQKRPVLGDIVSGPVLSCLLHIARLYGEPVLTYQYL

SEQ ID NO: 14213 - protein, 123 aa, Homo sapiens
  SITE 1: note = misc_feature - Xaa can be any naturally occurring amino acid
XRLLTSCYVGPTRQQFTVSSGESPPLSAGNIYQKRPVLGDIVSGPVLSCLLHIARLYGEPVLTYQYLPYISYLVPKWGPGSDHPVCENHQPHRPHLPAHWTGDGPAAPERARGHLFPGLLSAA

SEQ ID NO: 14214 - protein, 475 aa, Homo sapiens
ARSHTAPVLALAMEQRRGQLATVSQDRTVRIWDLATLQQLYDFTSSEDAPCAVTFHPTRPTFFCGFSSGAVRSFSLEAAEVLVEHTCHRGAVTGLTATPDGRLLFSSCSQGSLAQYSCADPQWHVLRVAADMVCPDAPASPSALAVSRDGRLLAFVGPSRCTVTVMGSASLDELLRVDIGTLDLASSRLDSAMAVCFGPAALGHLLVSTSSNRVVVLDAVSGRIIRELPGVHPEPCPSLTLSEDARFLLIAAGRTIKVWDYATQASPGPQVYIGHSEPVQAVAFSPDQQQVLSAGDAVFLWDVLAPTESDQSFPGAPPACKTGPGAGPLEDAASRASELPRQQVPKPCQASPPRLGVCARPPEGGDGHLPASRQRWVAASEGCRRLQREWAGQHGLEAGHRLLCLHVRPPGGGGGPALWRPAALVRPLCGDLHAGPQPQCPGPGLCLGPKQHDRPLSDPRLGRVWRPLPASHFPP

SEQ ID NO: 14215 - protein, 115 aa, Homo sapiens
EKIPLPFFAMSLSLSPGTHLLAVGFAGLHRPPGCSSRPPATRSLCGRSPASEMQQGLWWWASRLVMPGTWTQAWQRRQVVNGLMLGQARIHVNRLEQAVVNLAPCEYFHTCCPFA

SEQ ID NO: 14216 - protein, 1748 aa, Homo sapiens
MARAWQHPFLNVFRHFRVDEWKRSAKQGDVAVVTDKTLKGAVYRIRGSVSAANYIQLPKSSTQSLGLTGRYLYVLFRPLPSKHFVIHLDVSSKDNQVIRVSFSNLFKEFKSTATWLQFPLVLEARTPQRDLVGLAPSGARWTCLQLDLQDVLLVYLNRCYGHLKSIRLCASLLVRNLYTSDLCFEPAISGAQWAKLPVTPMPREMAFPVPKGESWHDRYIHVRFPSESLKVPSKPIEKSCSPPEAVLLGPGPQPLPCPVASSKPVRFSVSPVVQTPSPTASGRAALAPRPFPEVSLSQERSDASNADGPGFHSLEPWAQLEASDIHTAAAGTHVLTHESAEVPVARTGSCEGFLPDPVLRLKGVIGFGGHGTRQALWTPDGAAVVYPCHAVIVVLLVDTGEQRFFLGHTDKVSALALDGSSSLLASAQARAPSVMRLWDFQTGRCLCLFRSPMHVVCSLSFSDSGALLCGVGKDHHGRTMVVAWGTGQVGLGGEVVVLAKAHTDFDVQAFRVTFFDETRMASCGQGSVRLWRLRGGVLRSCPVDLGEHHALQFTDLAFKQARDGCPEPSAAMLFVCSRSGHILEIDCQRMVVRHARRLLPTRTPGGPHPQKQTFSSGPGIAISSLSVSPAMCAVGSEDGFLRLWPLDFSSVLLEAEHEGPVSSVCVSPDGLRVLSATSSGHLGFLDTLSRVYHMLARSHTAPVLALAMEQRRGQLATVSQDRTVRIWDLATLQQLYDFTSSEDAPCAVTFHPTRPTFFCGFSSGAVRSFSLEAAEVLVEHTCHRGAVTGLTATPDGRLLFSSCSQGSLAQYSCADPQWHVLRVAADMVCPDAPASPSALAVSRDGRLLAFVGPSRCTVTVMGSASLDELLRVDIGTLDLASSRLDSAMAVCFGPAALGHLLVSTSSNRVVVLDAVSGRIIRELPGVHPEPCPSLTLSEDARFLLIAAGRTIKVWDYATQASPGPQVYIGHSEPVQAVAFSPDQQQVLSAGDAVFLWDVLAPTESDQSFPGAPPACKTGPGAGPLEDAASRASELPRQQVPKPCQASPPRLGVCARPPEGGDGARDTRNSGAPRTTYLASCKAFTPARVSCSPHSAKGTCPPPASGGWLRLKAVVGYSGNGRANMVWRPDTGFFAYTCGRLVVVEDLHSGAQQHWSGHSAEISTLALSHSAQVLASASGRSSTTAHCQIRVWDVSGGLCQHLIFPHSTTVLALAFSPDDRLLVTLGDHDGRTLALWGTATYDLVSSTRLPEPVHGVAFNPWDAGELTCVGQGTVTFWLLQQRGADISLQVRREPVPEAVGAGELTSLCYGAPPLLYCGTSSGQVCVWDTRAGRCFLSWEADDGGIGLLLFSGSRLVSGSSTGRLRLWAVGAVSELRCKGSGASSVFMEHELVLDGAVVSASFDDSVDMGVVGTTAGTLWFVSWAEGTSTRLISGHRSKVNEVVFSPGESHCATCSEDGSVRVWALASMELVIQFQVLNQSCLCLAWSPPCCGRPEQQRLAAGYGDGSLRIFSVSRTAMELKMHPHPVALTTVAFSTDGQTVLSGDKDGLVAVSHPCTGTTFRVLSDHQGAPISTICVTCKECEDLGVEGTDLWLAASGDQRVSVWASDWLRNHCELVDWLSFPMPATTETQGHLPPSLAAFCPWDGALLMYVGPGVYKEVIIYNLCQKQVVEKIPLPFFAMSLSLSPGTHLLAVGFAECMLRLVDCAMGTAQDFAGHDNAVHLCRFTPSARLLFTAARNEILVWEVPGL

SEQ ID NO: 14217 - protein, 1750 aa, Homo sapiens
MARAWQHPFLNVFRHFRVDEWKRSAKQGDVAVVTDKTLKGAVYRIRGSVSAANYIQLPKSSTQSLGLTGRYLYVLFRPLPSKHFVIHLDVSSKDNQVIRVSFSNLFKEFKSTATWLQFPLVLEARTPQRDLVGLAPSGARWTCLQLDLQDVLLVYLNRCYGHLKSIRLCASLLVRNLYTSDLCFEPAISGAQWAKLPVTPMPREMAFPVPKGESWHDRYIHVRFPSESLKVPSKPIEKSCSPPEAVLLGPGPQPLPCPVASSKPVRFSVSPVVQTPSPTASGRAALAPRPFPEVSLSQERSDASNADGPGFHSLEPWAQLEASDIHTAAAGTHVLTHESAEVPVARTGSCEGFLPDPVLRLKGVIGFGGHGTRQALWTPDGAAVVYPCHAVIVVLLVDTGEQRFFLGHTDKVSALALDGSSSLLASAQARAPSVMRLWDFQTGRCLCLFRSPMHVVCSLSFSDSGALLCGVGKDHHGRTMVVAWGTGQVGLGGEVVVLAKAHTDFDVQAFRVTFFDETRMASCGQGSVRLWRLRGGVLRSCPVDLGEHHALQFTDLAFKQARDGCPEPSAAMLFVCSRSGHILEIDCQRMVVRHARRLLPTRTPGGPHPQKQTFSSGPGIAISSLSVSPAMCAVGSEDGFLRLWPLDFSSVLLEAEHEGPVSSVCVSPDGLRVLSATSSGHLGFLDTLSRVYHMLARSHTAPVLALAMEQRRGQLATVSQDRTVRIWDLATLQQLYDFTSSEDAPCAVTFHPTRPTFFCGFSSGAVRSFSLEAAEVLVEHTCHRGAVTGLTATPDGRLLFSSCSQGSLAQYSCADPQWHVLRVAADMVCPDAPASPSALAVSRDGRLLAFVGPSRCTVTVMGSASLDELLRVDIGTLDLASSRLDSAMAVCFGPAALGHLLVSTSSNRVVVLDAVSGRIIRELPGVHPEPCPSLTLSEDARFLLIAAGRTIKVWDYATQASPGPQVYIGHSEPVQAVAFSPDQQQVLSAGDAVFLWDVLAPTESDQSFPGAPPACKTGPGAGPLEDAASRASELPRQQVPKPCQASPPRLGVCARPPEGGDGARDTRNSGAPRTTYLASCKAFTPARVSCSPHSAKGTCPPPASGGWLRLKAVVGYSGNGRANMVWRPDTGFFAYTCGRLVVVEDLHSGAQQHWSGHSAEISTLALSHSAQVLASASGRSSTTAHCQIRVWDVSGGLCQHLIFPHSTTVLALAFSPDDRLLVTLGDHDGRTLALWGTATYDLVSSTRLPEPVHGVAFNPWDAGELTCVGQGTVTFWLLQQRGADISLQVRREPVPEAVGAGELTSLCYGAPPLLYCGTSSGQVCVWDTRAGRCFLSWEADDGGIGLLLFSGSRLVSGSSTGRLRLWAVGAVSELRCKGSGARSSSVFMEHELVLDGAVVSASFDDSVDMGVVGTTAGTLWFVSWAEGTSTRLISGHRSKVNEVVFSPGESHCATCSEDGSVRVWALASMELVIQFQVLNQSCLCLAWSPPCCGRPEQQRLAAGYGDGSLRIFSVSRTAMELKMHPHPVALTTVAFSTDGQTVLSGDKDGLVAVSHPCTGTTFRVLSDHQGAPISTICVTCKECEDLGVEGTDLWLAASGDQRVSVWASDWLRNHCELVDWLSFPMPATTETQGHLPPSLAAFCPWDGALLMYVGPGVYKEVIIYNLCQKQVVEKIPLPFFAMSLSLSPGTHLLAVGFAECMLRLVDCAMGTAQDFAGHDNAVHLCRFTPSARLLFTAARNEILVWEVPGL

SEQ ID NO: 14218 - protein, 347 aa, Homo sapiens
MLWFGQPGPGGWNRKCLRPFTLPRGQHPQPSYGFPQVNEVVFSPGESHCATCSEDGSVRVWALASMELVIQFQVLNQSCLCLAWSPPCCGRPEQQRLAAGYGDGSLRIFSVSRTAMELKMHPHPVALTTVAFSTDGQTVLSGDKDGLVAVSHPCTGTTFRVLSDHQGAPISTICVTCKECEDLGVEGTDLWLAASGDQRVSVWASDWLRNHCELVDWLSFPMPATTETQGHLPPSLAAFCPWDGALLMYVGPGVYKEVIIYNLCQKQVVEKIPLPFFAMSLSLSPGTHLLAVGFAECMLRLVDCAMGTAQDFAGHDNAVHLCRFTPSARLLFTAARNEILVWEVPGL

SEQ ID NO: 14219 - protein, 299 aa, Homo sapiens
MLWFGQPGPGGWNRKCLRPFTLPRGQHPQPSYGFPQVNEVVFSPGESHCATCSEDGSVRVWALASMELVIQFQVLNQSCLCLAWSPPCCGRPEQQRLAAGYGDGSLRIFSVSRTAMELKMHPHPVALTTVAFSTDGQTVLSGDKDGLVAVSHPCTGTTFRVLSDHQGAPISTICVTCKETQGHLPPSLAAFCPWDGALLMYVGPGVYKEVIIYNLCQKQVVEKIPLPFFAMSLSLSPGTHLLAVGFAECMLRLVDCAMGTAQDFAGHDNAVHLCRFTPSARLLFTAARNEILVWEVPGL

SEQ ID NO: 14220 - protein, 78 aa, Homo sapiens
  SITE 1: note = misc_feature - Xaa can be any naturally occurring amino acid
XASGDQRVSVWASDWLRNHCELVDWLSFPMPATTETQGHLPPSLAAFCPWDGALLMYVGPGVYKEVIIYNLCQKQSAC

SEQ ID NO: 14221 - protein, 133 aa, Homo sapiens
  SITE 1: note = misc_feature - Xaa can be any naturally occurring amino acid
XPGAGPLEDAASRASELPRQQVPKPCQASPPRLGVCARPPEGGDGARDTRNSGAPRTTYLASCKAFTPARVSCSPHSAKALGHRWPCWAPAASGSPSSQGTCPPPASGGWLRLKAVVGYSGNGRANMVWRPDT

SEQ ID NO: 14222 - protein, 220 aa, Homo sapiens
MPLTGVGPGSCRRQIIRALCLLLLLLHAGSAKNIWKRALPARLAEKSRAEEAGAPGGPRQPRADRCPPPPRTLPPGACQAARCQADSECPRHRRCCYNGCAYACLEAVPPPPVLDWLVQPKPRWLGGNGWLLDGPEEVLQAEACSTTEDGAEPLLCPSGYECHILSPGDVAEGIPNRGQCVKQRRQADGRILRHKLYKEYPEGDSKNVAEPGRGQQKHFQ

SEQ ID NO: 14223 - protein, 220 aa, Homo sapiens; identical to SEQ ID NO: 14222

SEQ ID NO: 14224 - protein, 66 aa, Homo sapiens
MPLTGVGPGSCRRQIIRALCLLLLLLHAGSAKNIWKRALPARLAEKSRVSAWDGEAGAACVGGSQP

SEQ ID NO: 14225 - protein, 79 aa, Homo sapiens
MAPQTLLPVLVLCVLLLQAQGGYRDKKRMQKTQLSPEIKVCQQQPKLYLCKHLCESHRDCQANNICCSTYCGNVCMSIL

SEQ ID NO: 14226 - protein, 73 aa, Homo sapiens
MAPQTLLLVLVLCVLLLQAQGGYRDKMRMQRIKVCEKRPSIDLCIHHCSYFQKCETNKICCSAFCGNICMSIL

SEQ ID NO: 14227 - protein, 89 aa, Homo sapiens
MVSCERRASKSVGQILLWDFGYTCRLSHRRRNSTEILSRNLPALYTGIKVCEKRPSIDLCIHHCSYFQKCETNKICCSAFCGNICMSIL

SEQ ID NO: 14228 - protein, 87 aa, Homo sapiens
MVSLMKLWIPMLMTFFCTVLLSVLGEMRKKRYDRKELLLEECWGKPNVKECTNKCSKAFRCKDKNYTCCWTYCGNICWINVETSGDY

SEQ ID NO: 14229 - protein, 87 aa, Homo sapiens; identical to SEQ ID NO: 14228

SEQ ID NO: 14230 - protein, 87 aa, Homo sapiens; identical to SEQ ID NO: 14228

SEQ ID NO: 14231 - protein, 111 aa, Homo sapiens
MGSSSFLVLMVSLVLVTLVAVEGVKEGIEKAGVCPADNVRCFKSDPPQCHTDQDCLGERKCCYLHCGFKCVIPVKELEEGGNKDEDVSRPYPEPGWEAKCPGSSSTRCPQK

SEQ ID NO: 14232 - protein, 93 aa, Homo sapiens
MKPVLPLQFLVVFCLALQLVPGSPKQRVLKYILEPPPCISAPENCTHLCTMQEDCEKGFQCCSSFCGIVCSSETFQKRNRIKHKGSEVIMPAN

SEQ ID NO: 14233 - protein, 73 aa, Homo sapiens
MLQVQVNLPVSPLPTYPYSFFYPDKEGSCPQVNINFPQLGLCRDQCQVDSQCPGQMKCCRNGCGKVSCVTPNF

SEQ ID NO: 14234 - protein, 76 aa, Homo sapiens
MPACRLGPLAAALLLSLLLFGFTLVSDKEGSCPQVNINFPQLGLCRDQCQVDSQCPGQMKCCRNGCGKVSCVTPNF

SEQ ID NO: 14235 - protein, 102 aa, Homo sapiens
MPACRLGPLAAALLLSLLLFGFTLVSGTGAEKTGVCPELQADQNCTQECVSDSECADNLKCCSAGCATFCSLPNALFHWHLKTRRLWEISGPRPRRPTWDSS

SEQ ID NO: 14236 - protein, 124 aa, Homo sapiens
MPACRLGPLAAALLLSLLLFGFTLVSGTGAEKTGVCPELQADQNCTQECVSDSECADNLKCCSAGCATFCSLPNDKEGSCPQVNINFPQLGLCRDQCQVDSQCPGQMKCCRNGCGKVSCVTPNF

SEQ ID NO: 14237 - protein, 79 aa, Homo sapiens
MPACRLGPLAAALLLSLLLFGFTLVSGTGAEKTGVCPELQADQNCTQECVSDSECADNLKCCSAGCATFCSLPNGQLAE

SEQ ID NO: 14238 - protein, 137 aa, Homo sapiens
MMLSCLFLLKALLALGSLESWITAGEHAKEGECPPHKNPCKELCQGDELCPAEQKCCTTGCGRICRDIPKGRGGDCPKVLVGLCIVGCVMDENCQAGEKCCKSGCGRFCVPPVLPPKLTMNPNWTVRSDSELEIPVP

SEQ ID NO: 14239 - protein, 231 aa, Homo sapiens
MMLSCLFLLKALLALGSLESWITAGEHAKEGECPPHKNPCKELCQGDELCPAEQKCCTTGCGRICRDIPKGRKRDCPRVIRKQSCLKRCITDETCPGVKKCCTLGCNKSCVVPISKQKLAEFGGECPADPLPCEELCDGDASCPQGHKCCSTGCGRTCLGDIEGGRGGDCPKVLVGLCIVGCVMDENCQAGEKCCKSGCGRFCVPPVLPPKLTMNPNWTVRSDSELEIPVP

SEQ ID NO: 14240 - protein, 94 aa, Homo sapiens
MMLSCLFLLKALLALGSLESWITAGEHGRGGDCPKVLVGLCIVGCVMDENCQAGEKCCKSGCGRFCVPPVLPPKLTMNPNWTVRSDSELEIPVP

SEQ ID NO: 14241 - protein, 225 aa, Homo sapiens
  SITE 1: note = misc_feature - Xaa can be any naturally occurring amino acid
XIKEALLALGSLESWITAGEHAKEGECPPHKNPCKELCQGDELCPAEQKCCTTGCGRICRDIPKGRKRDCPRVIRKQSCLKRCITDETCPGVKKCCTLGCNKSCVVPISKQKLAEFGGECPADPLPCEELCDGDASCPQGHKCCSTGCGRTCLGDIEGGRGGDCPKVLVGLCIVGCVMDENCQAGEKCCKSGCGRFCVPPVLPPKLTMNPNWTVRSDSELEIPVP

SEQ ID NO: 14242 - protein, 123 aa, Homo sapiens
MRTQSLLLLGALLAVGSQLPAVFGRKKGEKSGGCPPDDGPCLLSVPDQCVEDSQCPLTRKCCYRACFRQCVPRVSVKLGSCPEDQLRCLSPMNHLCHKDSDCSGKKRCCHSACGRDCRDPARG

SEQ ID NO: 14243 - protein, 224 aa, Homo sapiens
MRTQSLLLLGALLAVGSQLPAVFGRKKGEKSGGCPPDDGPCLLSVPDQCVEDSQCPLTRKCCYRACFRQCVPRVSVKLGSCPEDQLRCLSPMNHLCHKDSDCSGKKRCCHSACGRDCRDPARGTAPGCPGQANSDLGSVALHLSWGPTERVHDGRPGALPAGQHYLYQRWFQPSDNHWPADTSLQPIHPWFLLLGVKVHSLSSEEGLCITPVLCTTAIRASHPS

SEQ ID NO: 14244 - protein, 131 aa, Homo sapiens
MGLSGLLPILVPFILLGDIQEPGHAEGILGKPCPKIKVECEVEEIDQCTKPRDCPENMKCCPFSRGKKCLDFRKIYAVCHRRLAPAWPPYHTGGTIKKTKICSEFIYGGSQGNNNNFQTEAICLVTCKKYH

SEQ ID NO: 14245 - protein, 86 aa, Homo sapiens
MGLSGLLPILVPFILLGDIQEPGHAEGILGKPCPKIKVECEVEEIDQCTKPRDCPENMKCCPFSRGKKCLDFRKVSLTLYHKEELE

SEQ ID NO: 14246 - protein, 241 aa, Homo sapiens
MWTVRTEGGHFPLHSPTFSWRNVAFLLLLSLALEWTSAMLTKKIKHKPGLCPKERLTCTTELPDSCNTDFDCKEYQKCCFFACQKKCMDPFQEPCMLPVRHGNCNHEAQRWHFDFKNYRCTPFKYRGCEGNANNFLNEDACRTACMLIVKDGQCPLFPFTERKECPPSCHSDIDCPQTDKCCESRCGFVCARAWTVKKGFCPRKPLLCTKIDKPKCLQDEECPLVEKCCSHCGLKCMDPRR

SEQ ID NO: 14247 - protein, 241 aa, Homo sapiens; identical to SEQ ID NO: 14246

SEQ ID NO: 14248 - protein, 548 aa, Homo sapiens
MPALRPLLPLLLLLRLTSGAGLLPGLGSHPGVCPNQLSPNLWVDAQSTCERECSRDQDCAAAEKCCINVCGLHSCVAARFPGSPAAPTTAASCEGFVCPQQGSDCDIWDGQPVCRCRDRCEKEPSFTCASDGLTYYNRCYMDAEACLRGLHLHIVPCKHVLSWPPSSPGPPETTARPTPGAAPVPPALYSSPSPQAVQVGGTASLHCDVSGRPPPAVTWEKQSHQRENLIMRPDQMYGNVVVTSIGQLVLYNARPEDAGLYTCTARNAAGLLRADFPLSVVQREPARDAAPSIPAPAECLPDVQACTGPTSPHLVLWHYDPQRGGCMTFPARGCDGAARGFETYEACQQACARGPGDACVLPAVQGPCRGWEPRWAYSPLLQQCHPFVYGGCEGNGNNFHSRESCEDACPVPRTPPCRACRLRSKLALSLCRSDFAIVGRLTEVLEEPEAAGGIARVALEDVLKDDKMGLKFLGTKYLEVTLSGMDWACPCPNMTAGDGPLVIMGEVRDGVAVLDAGSYVRAASEKRVKKILELLEKQACELLNRFQD

SEQ ID NO: 14249 - protein, 483 aa, Homo sapiens
MDVKGKKGPVGMPKEATCDHFMCLQQGSECDIWDGQPVCKCKDRCEKEPSFTCASDGLTYYNRCYMDAEACSKGITLAVVTCRYHFTWPNTSPPPPETTMHPTTASPETPELDMAAPALLNNPVHQSVTMGETVSFLCDVVGRPRPEITWEKQLEDRENVVMRPNHVRGNVVVTNIAQLVIYNAQLQDAGIYTCTARNVAGVLRADFPLSVVRGHQAAATSESSPNGTAFPAAECLKPPDSEDCGEEQTRWHFDAQANNCLTFTFGHCHRNLNHFETYEACMLACMSGPLAACSLPALQGPCKAYAPRWAYNSQTGQCQSFVYGGCEGNGNNFESREACEESCPFPRGNQRCRACKPRQKLVTSFCRSDFVILGRVSELTEEPDSGRALVTVDEVLKDEKMGLKFLGQEPLEVTLLHVDWACPCPNVTVSEMPLIIMGEVDGGMAMLRPDSFVGASSARRVRKLREVMHKKTCDVLKEFLGLH

SEQ ID NO: 14250 - protein, 576 aa, Homo sapiens
MWAPRCRRFWSRWEQVAALLLLLLLLGVPPRSLALPPIRYSHAGICPNDMNPNLWVDAQSTCRRECETDQECETYEKCCPNVCGTKSCVAARYMDVKGKKGPVGMPKEATCDHFMCLQQGSECDIWDGQPVCKCKDRCEKEPSFTCASDGLTYYNRCYMDAEACSKGITLAVVTCRYHFTWPNTSPPPPETTMHPTTASPETPELDMAAPALLNNPVHQSVTMGETVSFLCDVVGRPRPEITWEKQLEDRENVVMRPNHVRGNVVVTNIAQLVIYNAQLQDAGIYTCTARNVAGVLRADFPLSVVRGHQAAATSESSPNGTAFPAAECLKPPDSEDCGEEQTRWHFDAQANNCLTFTFGHCHRNLNHFETYEACMLACMSGPLAACSLPALQGPCKAYAPRWAYNSQTGQCQSFVYGGCEGNGNNFESREACEESCPFPRGNQRCRACKPRQKLVTSFCRSDFVILGRVSELTEEPDSGRALVTVDEVLKDEKMGLKFLGQEPLEVTLLHVDWACPCPNVTVSEMPLIIMGEVDGGMAMLRPDSFVGASSARRVRKLREVMHKKTCDVLKEFLGLH

SEQ ID NO: 14251 - protein, 524 aa, Homo sapiens
MANSAGFLGDLTTEGINKPGFYKGPAGSQVTLSSLGNQTRVLLEEQARHLLNEQEHATMAYYLDEYRGGSVSVEALVMALFKLLNTHAKFSLLSEVRGTISPQDLERFDHLVLRREIESMKARQPPGPGAGDTYSMVSYSDTGSSTGSHGTSTTVSSARNTLDLEETGEAVQGNINALPDVSVDDVRSTSQGLSSFKPLPRPPPLAQGNDLPLGQPRKLGREDLQPPSSMPSCSGTVFSAPQNRSPPAGTAPTPGTSSAQDLPSSPIYASVSPANPSSKRPLDAHLALVNQHPIGPFPRVQSPPHLKSPSAEATVAGGCLLPPSPSGHPDQTGTNQHFVMVEVHRPDSEPDVNEVRALPQTRTASTLSQLSDSGQTLSEDSGVDAGEAEASAPGRGRQSVSTKSRSSKELPRNERPTDGANKPPGLLEPTSTLVRVKKSAATLGIAIEGGANTRQPLPRIVTIQRGGSAHNCGQLKVGHVILEVNGLTLRGKEHREAARIIAEAFKTKDRDYIDFLVTEFNVML

SEQ ID NO: 14252 - protein, 556 aa, Homo sapiens
MHGSLEALLFLPQVTLSLAHAHLICSNAQLEMCVFPHRFLGDLTTEGINKPGFYKGPAGSQVTLSSLGNQTRVLLEEQARHLLNEQEHATMAYYLDEYRGGSVSVEALVMALFKLLNTHAKFSLLSEVRGTISPQDLERFDHLVLRREIESMKARQPPGPGAGDTYSMVSYSDTGSSTGSHGTSTTVSSARNTLDLEETGEAVQGNINALPDVSVDDVRSTSQGLSSFKPLPRPPPLAQGNDLPLGQPRKLGREDLQPPSSMPSCSGTVFSAPQNRSPPAGTAPTPGTSSAQDLPSSPIYASVSPANPSSKRPLDAHLALVNQHPIGPFPRVQSPPHLKSPSAEATVAGGCLLPPSPSGHPDQTGTNQHFVMVEVHRPDSEPDVNEVRALPQTRTASTLSQLSDSGQTLSEDSGVDAGEAEASAPGRGRQSVSTKSRSSKELPRNERPTDGANKPPGLLEPTSTLVRVKKSAATLGIAIEGGANTRQPLPRIVTIQRGGSAHNCGQLKVGHVILEVNGLTLRGKEHREAARIIAEAFKTKDRDYIDFLVTEFNVML

SEQ ID NO: 14253 - protein, 345 aa, Homo sapiens
MNAPLDGLSVSSSSTGSLGSAAGAGGGGGAGLRLLSANVRQLHQALTALLSEAEREQFTHCLNAYHARRNVFDLVRTLRVLLDSPVKRRLLPMLRLVIPRSDQLLFDQYTAEGLYLPATTPYRQPAWGGPDSAGPGEVRLVSLRRAKAHEGLGFSIRGGSEHGVGIYVSLVEPGSLAEKEGLRVGDQILRVNDKSLARVTHAEAVKALKGSKKLVLSVYSAGRIPGGYVTNHIYTWVDPQGRSISPPSGLPQPHGGALRQQEGDRRSTLHLLQGGDEKKVSGVGKGGQPLRHRILPPNPEQQSCLEAARRGWFCPGSVFPQVCTEGWCFFFAFLFDLCSVCYNTG

SEQ ID NO: 14254 - protein, 907 aa, Homo sapiens
MNAPLDGLSVSSSSTGSLGSAAGAGGGGGAGLRLLSANVRQLHQALTALLSEAEREQFTHCLNAYHARRNVFDLVRTLRVLLDSPVKRRLLPMLRLVIPRSDQLLFDQYTAEGLYLPATTPYRQPAWGGPDSAGPGEVRLVSLRRAKAHEGLGFSIRGGSEHGVGIYVSLVEPGSLAEKEGLRVGDQILRVNDKSLARVTHAEAVKALKGSKKLVLSVYSAGRIPGGYVTNHIYTWVDPQGRSISPPSGLPQPHGGALRQQEGDRRSTLHLLQGGDEKKVNLVLGDGRSLGLTIRGGAEYGLGIYITGVDPGSEAEGSGLKVGDQILEVNGRSFLNILHDEAVRLLKSSRHLILTVKDVGRLPHARTTVDETKWIASSRIRETMANSAGFLGDLTTEGINKPGFYKGPAGSQVTLSSLGNQTRVLLEEQARHLLNEQEHATMAYYLDEYRGGSVSVEALVMALFKLLNTHAKFSLLSEVRGTISPQDLERFDHLVLRREIESMKARQPPGPGAGDTYSMVSYSDTGSSTGSHGTSTTVSSARNTLDLEETGEAVQGNINALPDVSVDDVRSTSQGLSSFKPLPRPPPLAQGNDLPLGQPRKLGREDLQPPSSMPSCSGTVFSAPQNRSPPAGTAPTPGTSSAQDLPSSPIYASVSPANPSSKRPLDAHLALVNQHPIGPFPRVQSPPHLKSPSAEATVAGGCLLPPSPSGHPDQTGTNQHFVMVEVHRPDSEPDVNEVRALPQTRTASTLSQLSDSGQTLSEDSGVDAGEAEASAPGRGRQSVSTKSRSSKELPRNERPTDGANKPPGLLEPTSTLVRVKKSAATLGIAIEGGANTRQPLPRIVTIQRGGSAHNCGQLKVGHVILEVNGLTLRGKEHREAARIIAEAFKTKDRDYIDFLVTEFNVML

SEQ ID NO: 14255 - protein, 128 aa, Homo sapiens
GVNCDKANCSTTCFNGGTCFYPGKCICPPGLEGEQCEISKCPQPCRNGGKCIGKSKSVCEPGCGAHGTCHEPNKCQCQEGWHGRHCNKRYEASLIHALRPAGAQLRQHTPSLKKAEERRDPPESNYIW

SEQ ID NO: 14256 - protein, 133 aa, Homo sapiens
MAPFTHDFRKAQQRMPAIPVNIHSMNFTWQAAGQAEYFYEFLSLRSLDKGIMADPTVNVPLLGTVPHKASVVQVGFPCLGKQDGVAAFEVDVIVMNSEGNTILQTPQNAIFFKTCQQAECPGGCRNGGFCNER

SEQ ID NO: 14257 - protein, 379 aa, Homo sapiens
MARRSAFPAAALWLWSILLCLLALRAEAGPPQEESLYLWIDAHQARVLIGFEEDILIVSEGKMAPFTHDFRKAQQRMPAIPVNIHSMNFTWQAAGQAEYFYEFLSLRSLDKGIMADPTVNVPLLGTVPHKASVVQVGFPCLGKQDGVAAFEVDVIVMNSEGNTILQTPQNAIFFKTCQQAECPGGCRNGGFCNERRICECPDGFHGPHCEKALCTPRCMNGGLCVTPGFCICPPGFYGVNCDKANCSTTCFNGGTCFYPGKCICPPGLEGEQCEISKCPQPCRNGGKCIGKSKCKCSKGYQGDLCSKPVCEPGCGAHGTCHEPNKCQCQEGWHGRHCNKRYEASLIHALRPAGAQLRQHTPSLKKAEERRDPPESNYIW

SEQ ID NO: 14258 - protein, 122 aa, Homo sapiens
MRWFLPWTLAAVTAAAASTVLATAGKKCLAVYQPEASMNFTLAGCISTRSYQPKYCGVCMDNRCCIPYKSKTIDVSFQCPDGLGFSRQVLWINACFCNLSCRNPNDIFADLESYPDFSEIAN

SEQ ID NO: 14259 - protein, 280 aa, Homo sapiens
MRWFLPWTLAAVTAAAASTVLATALSPAPTTMDFTPAPLEDTSSRPQFCKWPCECPPSPPRCPLGVSLITDGCECCKMCAQQLGDNCTEAAICDPHRGLYCDYSGDRPRYAIGVCAHAVGEVEAWHRNCIAYTSPWSPCSTSCGLGVSTRISNVNAQCWPEQESRLCNLRPCDVDIHTLIKAGKKCLAVYQPEASMNFTLAGCISTRSYQPKYCGVCMDNRCCIPYKSKTIDVSFQCPDGLGFSRQVLWINACFCNLSCRNPNDIFADLESYPDFSEIAN

SEQ ID NO: 14260 - protein, 367 aa, Homo sapiens
MRWFLPWTLAAVTAAAASTVLATALSPAPTTMDFTPAPLEDTSSRPQFCKWPCECPPSPPRCPLGVSLITDGCECCKMCAQQLGDNCTEAAICDPHRGLYCDYSGDRPRYAIGVCAQVVGVGCVLDGVRYNNGQSFQPNCKYNCTCIDGAVGCTPLCLRVRPPRLWCPHPRRVSIPGHCCEQWVCEDDAKRPRKTAPRDTGAFDAVGEVEAWHRNCIAYTSPWSPCSTSCGLGVSTRISNVNAQCWPEQESRLCNLRPCDVDIHTLIKAGKKCLAVYQPEASMNFTLAGCISTRSYQPKYCGVCMDNRCCIPYKSKTIDVSFQCPDGLGFSRQVLWINACFCNLSCRNPNDIFADLESYPDFSEIAN

SEQ ID NO: 14261 - protein, 155 aa, Homo sapiens
MRWFLPWTLAAVTAAAASTVLATALSPAPTTMDFTPAPLEDTSSRPQFCKWPCECPPSPPRCPLGVSLITDGCECCKMCAQQLGDNCTEAAICDPHRGLYCDYSGDRPRYAIGVCARREEVSGCVPARGIHELHTCGLHQHTLLSTQVLWSLHGQ

SEQ ID NO: 14262 - protein, 36 aa, Homo sapiens
MRWFLPWTLAAVTAAAASTVLATMLWVRWRHGTGTA

SEQ ID NO: 14263 - protein, 218 aa, Homo sapiens
MRGTPKTHLLAFSLLCLLSKVRTQLCPTPCTCPWPPPRCPLGVPLVLDGCGCCRVCARRLGEPCDQLHVCDASQGLVCQPGAGPGGRGALCLCKQDPSFLALSLPCPLVSPAQNGARPGDPARPPVGWAWPPGCPTRTASADWRPSAACACPGPAHPPGVAVHKTVPSRAGLGMGTRCPPSPAGGPVPGPWADGRWSVPRPLAAGNTLAWVHHAEHQY

SEQ ID NO: 14264 - protein, 250 aa, Homo sapiens
MRGTPKTHLLAFSLLCLLSKVRTQLCPTPCTCPWPPPRCPLGVPLVLDGCGCCRVCARRLGEPCDQLHVCDASQGLVCQPGAGPGGRGALCLLAEDDSSCEVNGRLYREGETFQPHCSIRCRCEDGGFTCVPLCSEDVRLPSWDCPHPRRVEVLGKCCPEWVCGQGGGLGTQPLPAQGPQFSGLVSSLPPGVPCPEWSTAWGPCSTTCGLGMATRVSNQNRFCRLETQRRLCLSRPCPPSRGRSPQNSAF

SEQ ID NO: 14265 - protein, 250 aa, Homo sapiens; identical to SEQ ID NO: 14264

SEQ ID NO: 14266 - protein, 321 aa, Homo sapiens [sequence omitted]

SEQ ID NO: 14267 - protein, 130 aa, Homo sapiens
MGISNRVTNENSNCEMRKEKRLCYIQPCDSNILKTIKIPKGKTCQPTFQLSKAEKFVFSGCSSTQSYKPTFCGICLDKRCCIPNKSKMITIQFDCPNEGSFKWKMLWITSCVCQRNCREPGDIFSELKIL

SEQ ID NO: 14268 - protein, 372 aa, Homo sapiens
MNKRRLLYPSGWLHGPSDMQGLLFSTLLLAGLAQFCCRVQGTGPLDTTPEGRPGEVSDAPQRKQFCHWPCKCPQQKPRCPPGVSLVRDGCGCCKICAKQPGEICNEADLCDPHKGLYCDYSVDRPRYETGVCAYLVAVGCEFNQVHYHNGQVFQPNPLFSCLCVSGAIGCTPLFIPKLAGSHCSGAKGGKKSDQSNCSLEPLLQQLSTSYKTMPAYRNLPLIWKKKCLVQATKWTPCSRTCGMGISNRVTNENSNCEMRKEKRLCYIQPCDSNILKTIKIPKGKTCQPTFQLSKAEKFVFSGCSSTQSYKPTFCGICLDKRCCIPNKSKMITIQFDCPNEGSFKWKMLWITSCVCQRNCREPGDIFSELKIL

SEQ ID NO: 14269 - protein, 237 aa, Homo sapiens
MNKRRLLYPSGWLHGPSDMQGLLFSTLLLAGLAQFCCRVQGTGPLDTTPEGRPGEVSDAPQRKQFCHWPCKCPQQKPRCPPGVSLVRDGCGCCKICAKQPGEICNEADLCDPHKGLYCDYSVDRPRYETGVCAYLVAVGCEFNQVHYHNGQVFQPNPLFSCLCVSGAIGCTPLFIPKLAGSHCSGAKGGKKSDQSNCSLEPLLQQLSTSYKTMPDVCQASNLLPALRSLNCCLPSSL

SEQ ID NO: 14270 - protein, 354 aa, Homo sapiens
MQGLLFSTLLLAGLAQFCCRVQGTGPLDTTPEGRPGEVSDAPQRKQFCHWPCKCPQQKPRCPPGVSLVRDGCGCCKICAKQPGEICNEADLCDPHKGLYCDYSVDRPRYETGVCAYLVAVGCEFNQVHYHNGQVFQPNPLFSCLCVSGAIGCTPLFIPKLAGSHCSGAKGGKKSDQSNCSLEPLLQQLSTSYKTMPAYRNLPLIWKKKCLVQATKWTPCSRTCGMGISNRVTNENSNCEMRKEKRLCYIQPCDSNILKTIKIPKGKTCQPTFQLSKAEKFVFSGCSSTQSYKPTFCGICLDKRCCIPNKSKMITIQFDCPNEGSFKWKMLWITSCVCQRNCREPGDIFSELKIL

SEQ ID NO: 14271 - protein, 354 aa, Homo sapiens; identical to SEQ ID NO: 14270

SEQ ID NO: 14272 - protein, 354 aa, Homo sapiens; identical to SEQ ID NO: 14270

SEQ ID NO: 14273 - protein, 219 aa, Homo sapiens
MQGLLFSTLLLAGLAQFCCRVQGTGPLDTTPEGRPGEVSDAPQRKQFCHWPCKCPQQKPRCPPGVSLVRDGCGCCKICAKQPGEICNEADLCDPHKGLYCDYSVDRPRYETGVCAYLVAVGCEFNQVHYHNGQVFQPNPLFSCLCVSGAIGCTPLFIPKLAGSHCSGAKGGKKSDQSNCSLEPLLQQLSTSYKTMPDVCQASNLLPALRSLNCCLPSSL

SEQ ID NO: 14274 - protein, 2382 aa, Homo sapiens
MSGGAAEKQSSTPGSLFLSPPAPAPKNGSSSDSSVGEKLGAAAADAVTGRTEEYRRRRHTMDKDSRGAAATTTTTEHRFFRRSVICDSNATALELPGLPLSLPQPSIPAAVPQSAPPEPHREETVTATATSQVAQQPPAAAAPGEQAVAGPAPSTVPSSTSKDRPVSQPSLVGSKEEPPPARSGSGGGSAKEPQEERSQQQDDIEELETKAVGMSNDGRFLKFDIEIGRGSFKTVYKGLDTETTVEVAWCELQDRKLTKSERQRFKEEAEMLKGLQHPNIVRFYDSWESTVKGKKCIVLVTELMTSGTLKTYLKRFKVMKIKVLRSWCRQILKGLQFLHTRTPPIIHRDLKCDNIFITGPTGSVKIGDLGLATLKRASFAKSVIGTPEFMAPEMYEEKYDESVDVYAFGMCMLEMATSEYPYSECQNAAQIYRRVTSGVKPASFDKVAIPEVKEIIEGCIRQNKDERYSIKDLLNHAFFQEETGVRVELAEEDDGEKIAIKLWLRIEDIKKLKGKYKDNEAIEFSFDLERDVPEDVAQEMVESGYVCEGDHKTMAKAIKDRVSLIKRKREQRQLVREEQEKKKQEESSLKQQVEQSSASQTGIKQLPSASTGIPTASTTSASVSTQVEPEEPEADQHQQLQYQQPSISVLSDGTVDSGQGSSVFTESRVSSQQTVSYGSQHEQAHSTGTVPGHIPSTVQAQSQPHGVYPPSSVAQGQSQGQPSSSSLTGVSSSQPIQHPQQQQGIQQTAPPQQTVQYSLSQTSTSSEATTAQPVSQPQAPQVLPQVSAGKQLPVSQPVPTIQGEPQIPVATQPSVVPVHSGAHFLPVGQPLPTPLLPQYPVSQIPISTPHVSTAQTGFSSLPITMAAGITQPLLTLASSATTAAIPGVSTVVPSQLPTLLQPVTQLPSQVHPQLLQPAVQSMGIPANLGQAAEVPLSSGDVLYQGFPPRLPPQYPGDSNIAPSSNVASVCIHSTVLSPPMPTEVLATPGYFPTVVQPYVESNLLVPMGGVGGQVQVSQPGGSLAQAPTTSSQQAVLESTQGVSQVAPAEPVAVAQTQATQPTTLASSVDSAHSDVASGMSDGNENVPSSSGRHEGRTTKRHYRKSVRSRSRHEKTSRPKLRILNVSNKGDRVVECQLETHNRKMVTFKFDLDGDNPEEIATIMVNNDFILAIERESFVDQVREIIEKADEMLSEDVSVEPEGDQGLESLQGKDDYGFSGSQKLEGEFKQPIPASSMPQQIGIPTSSLTQVVHSAGRRFIVSPVPESRLRESKVFPSEITDTVAASTAQSPGMNLSHSASSLSLQQAFSELRRAQMTEGPNTAPPNFSHTGPTFPVVPPFLSSIAGVPTTAAATAPVPATSSPPNDISTSVIQSEVTVPTEEGIAGVATSTGVVTSGGLPIPPVSESPVLSSVVSSITIPAVVSISTTSPSLQVPTSTSEIVVSSTALYPSVTVSATSASAGGSTATPGPKPPAVVSQQAAGSTTVGATLTSVSTTTSFPSTASQLCIQLSSSTSTPTLAETVVVSAHSLDKTSHSSTTGLAFSLSAPSSSSSPGAGVSSYISQPGGLHPLVIPSVIASTPILPQAAGPTSTPLLPQVPSIPPLVQPVANVPAVQQTLIHSQPQPALLPNQPHTHCPEVDSDTQPKAPGIDDIKTLEEKLRSLFSEHSSSGAQHASVSLETSLVIESTVTPGIPTTAVAPSKLLTSTTSTCLPPTNLPLGTVALPVTPVVTPGQVSTPVSTTTSGVKPGTAPSKPPLTKAPVLPVGTELPAGTLPSEQLPPFPGPSLTQSQQPLEDLDAQLRRTLSPEMITVTSAVGPVSMAAPTAITEAGTQPQKGVSQVKEGPVLATSSGAGVFKMGRFQVSVAADGAQKEGKNKSEDAKSVHFESSTSESSVLSSSSPESTLVKPEPNGITIPGISSDVPESAHKTTASEAKSDTGQPTKVGRFQVTTTANKVGRFSVSKTEDKITDTKKEGPVASPPFMDLEQAVLPAVIPKKEKPELSEPSHLNGPSSDPEAAFLSRDVDDGSGSPHSPHQLSSKSLPSQNLSQSLSNSFNSSYMSSDNESDIEDEDLKLELRRLRDKHLKEIQDLQSRQKHEIESLYTKLGKVPPAVIIPPAAPLSGRRRRPTKSKGSKSSRSSSLGNKSPQLSGNLSGQSAASVLHPQQTLHPPGNIPESGQNQLLQPLKPSPSSDNLYSAFTSDGAISVPSLSAPGQGTSSTNTVGATVNSQAAQAQPPAMTSSRKGTFTDDLHKLVDNWARDAMNLSGRRGSKGHMNYEGPGMARKFSAPGQLCISMTSNLGGSAPISAASATSLGHFTKSMCPPQQYGFPATPFGAQWSGTGGPAPQPLGQFQPVGTASLQNFNISNLQKSISNPPGSNLRTT

SEQ ID NO: 14275 - protein, 2634 aa, Homo sapiens
MSGGAAEKQSSTPGSLFLSPPAPAPKNGSSSDSSVGEKLGAAAADAVTGRTEEYRRRRHTMDKDSRGAAATTTTTEHRFFRRSVICDSNATALELPGLPLSLPQPSIPAAVPQSAPPEPHREETVTATATSQVAQQPPAAAAPGEQAVAGPAPSTVPSSTSKDRPVSQPSLVGSKEEPPPARSGSGGGSAKEPQEERSQQQDDIEELETKAVGMSNDGRFLKFDIEIGRGSFKTVYKGLDTETTVEVAWCELQDRKLTKSERQRFKEEAEMLKGLQHPNIVRFYDSWESTVKGKKCIVLVTELMTSGTLKTYLKRFKVMKIKVLRSWCRQILKGLQFLHTRTPPIIHRDLKCDNIFITGPTGSVKIGDLGLATLKRASFAKSVIGTPEFMAPEMYEEKYDESVDVYAFGMCMLEMATSEYPYSECQNAAQIYRRVTSGVKPASFDKVAIPEVKEIIEGCIRQNKDERYSIKDLLNHAFFQEETGVRVELAEEDDGEKIAIKLWLRIEDIKKLKGKYKDNEAIEFSFDLERDVPEDVAQEMVESGYVCEGDHKTMAKAIKDRVSLIKRKREQRQLVREEQEKKKQEESSLKQQVEQSSASQTGIKQLPSASTGIPTASTTSASVSTQVEPEEPEADQHQQLQYQQPSISVLSDGTVDSGQGSSVFTESRVSSQQTVSYGSQHEQAHSTGTVPGHIPSTVQAQSQPHGVYPPSSVPRRGRSMSVCVPIFLLLPLCPASLPVLFHPTASTVCTSFSFPPPDCPEETFAEKLSKALESVLPMHSASQRKHRRSSLPSLFVSTPQSMAHPCGGTPTYPESQIFFPTIHERPVSFSPPPTCPPKVAISQRRKSTSFLEAQTHHFQPLLRTVGQSLLPPGGSPTNWTPEAVVMLGTTASRVTGESCEIQVHPMFEPSQVYSDYRPGLVLPEEAHYFIPQEAVYVAGVHYQARVAEQYEGIPYNSSVLSSPMKQIPEQKPVQGGPTSSSVFEFPSGQAFLVGHLQNLRLDSGLGPGSPLSSISAPISTDATRLKFHPVFVPHSAPAVLTHNNESRSNCVFEFHVHTPSSSSGEGGGILPQRVYRNRQVAVDLNQEELPPQSVGLHGYLQPVTEEKHNYHAPELTVSVVEPIGQNWPIGSPEYSSDSSQITSSDPSDFQSPPPTGGAAAPFGSDVSMPFIHLPQTVLQESPLFFCFPQGTTSQQVLTASFSSGGSALHPQAQGQSQGQPSSSSLTGVSSSQPIQHPQQQQGIQQTAPPQQTVQYSLSQTSTSSEATTAQPVSQPQAPQVLPQVSAGKQSTQGVSQVAPAEPVAVAQTQATQPTTLASSVDSAHSDVASGMSDGNENVPSSSGRHEGRTTKRHYRKSVRSRSRHEKTSRPKLRILNVSNKGDRVVECQLETHNRKMVTFKFDLDGDNPEEIATIMVNNDFILAIERESFVDQVREIIEKADEMLSEDVSVEPEGDQGLESLQGKDDYGFSGSQKLEGEFKQPIPASSMPQQIGIPTSSLTQVVHSAGRRFIVSPVPESRLRESKVFPSEITDTVAASTAQSPGMNLSHSASSLSLQQAFSELRRAQMTEGPNTAPPNFSHTGPTFPVVPPFLSSIAGVPTTAAATAPVPATSSPPNDISTSVIQSEVTVPTEEGIAGVATSTGVVTSGGLPIPPVSESPVLSSVVSSITIPAVVSISTTSPSLQVPTSTSEIVVSSTALYPSVTVSATSASAGGSTATPGPKPPAVVSQQAAGSTTVGATLTSVSTTTSFPSTASQLCIQLSSSTSTPTLAETVVVSAHSLDKTSHSSTTGLAFSLSAPSSSSSPGAGVSSYISQPGGLHPLVIPSVIASTPILPQAAGPTSTPLLPQVPSIPPLVQPVANVPAVQQTLIHSQPQPALLPNQPHTHCPEVDSDTQPKAPGIDDIKTLEEKLRSLFSEHSSSGAQHASVSLETSLVIESTVTPGIPTTAVAPSKLLTSTTSTCLPPTNLPLGTVALPVTPVVTPGQVSTPVSTTTSGVKPGTAPSKPPLTKAPVLPVGTELPAGTLPSEQLPPFPGPSLTQSQQPLEDLDAQLRRTLSPEMITVTSAVGPVSMAAPTAITEAGTQPQKGVSQVKEGPVLATSSGAGVFKMGRFQVSVAADGAQKEGKNKSEDAKSVHFESSTSESSVLSSSSPESTLVKPEPNGITIPGISSDVPESAHKTTASEAKSDTGQPTKVGRFQVTTTANKVGRFSVSKTEDKITDTKKEGPVASPPFMDLEQAVLPAVIPKKEKPELSEPSHLNGPSSDPEAAFLSRDVDDGSGSPHSPHQLSSKSLPSQNLSQSLSNSFNSSYMSSDNESDIEDEDLKLELRRLRDKHLKEIQDLQSRQKHEIESLYTKLGKVPPAVIIPPAAPLSGRRRRPTKSKGSKSSRSSSLGNKSPQLSGNLSGQSAASVLHPQQTLHPPGNIPESGQNQLLQPLKPSPSSDNLYSAFTSDGAISVPSLSAPGQGTSSTNTVGATVNSQAAQAQPPAMTSSRKGTFTDDLHKLVDNWARDAMNLSGRRGSKGHMNYEGPGMARKFSAPGQLCISMTSNLGGSAPISAASATSLGHFTKSMCPPQQYGFPATPFGAQWSGTGGPAPQPLGQFQPVGTASLQNFNISNLQKSISNPPGSNLRTT

SEQ ID NO: 14276 - protein, 393 aa, Homo sapiens
MSGGAAEKQSSTPGSLFLSPPAPAPKNGSSSDSSVGEKLGAAAADAVTGRTEEYRRRRHTMDKDSRGAAATTTTTEHRFFRRSVICDSNATALELPGLPLSLPQPSIPAAVPQSAPPEPHREETVTATATSQVAQQPPAAAAPGEQAVAGPAPSTVPSSTSKDRPVSQPSLVGSKEEPPPARSGSGGGSAKEPQEERSQQQDDIEELETKAVGMSNDGRFLKFDIEIGRGSFKTVYKGLDTETTVEVAWCELQDRKLTKSERQRFKEEAEMLKGLQHPNIVRFYDSWESTVKGKKCIVLVTELMTSGTLKTYLKRFKVMKIKVLRSWCRQILKGLQFLHTRTPPIIHRDLKCDNIFITGPTGSVKIGDLGLATLKRASFAKSVIGMFQVYLGA

SEQ ID NO: 14277 - protein, 2134 aa, Homo sapiens
MSGGAAEKQSSTPGSLFLSPPAPAPKNGSSSDSSVGEKLGAAAADAVTGRTEEYRRRRHTMDKDSRGAAATTTTTEHRFFRRSVICDSNATALELPGLPLSLPQPSIPAAVPQSAPPEPHREETVTATATSQVAQQPPAAAAPGEQAVAGPAPSTVPSSTSKDRPVSQPSLVGSKEEPPPARSGSGGGSAKEPQEERSQQQDDIEELETKAVGMSNDGRFLKFDIEIGRGSFKTVYKGLDTETTVEVAWCELQDRKLTKSERQRFKEEAEMLKGLQHPNIVRFYDSWESTVKGKKCIVLVTELMTSGTLKTYLKRFKVMKIKVLRSWCRQILKGLQFLHTRTPPIIHRDLKCDNIFITGPTGSVKIGDLGLATLKRASFAKSVIGTPEFMAPEMYEEKYDESVDVYAFGMCMLEMATSEYPYSECQNAAQIYRRVTSGVKPASFDKVAIPEVKEIIEGCIRQNKDERYSIKDLLNHAFFQEETGVRVELAEEDDGEKIAIKLWLRIEDIKKLKGKYKDNEAIEFSFDLERDVPEDVAQEMVESGYVCEGDHKTMAKAIKDRVSLIKRKREQRQLVREEQEKKKQEESSLKQQVEQSSASQTGIKQLPSASTGIPTASTTSASVSTQVEPEEPEADQHQQLQYQQPSISVLSDGTVDSGQGSSVFTESRVSSQQTVSYGSQHEQAHSTGTVPGHIPSTVQAQSQPHGVYPPSSVAQGQSQGQPSSSSLTGVSSSQPIQHPQQQGIQQTAPPQQTVQYSLSQTSTSSEATTAQPVSQPQAPQVLPQVSAGKQSTQGVSQVAPAEPVAVAQTQATQPTTLASSVDSAHSDVASGMSDGNENVPSSSGRHEGRTTKRHYRKSVRSRSRHEKTSRPKLRILNVSNKGDRVVECQLETHNRKMVTFKFDLDGDNPEEIATIMVNNDFILAIERESFVDQVREIIEKADEMLSEDVSVEPEGDQGLESLQGKDDYGFSGSQKLEGEFKQPIPASSMPQQIGIPTSSLTQVVHSAGRRFIVSPVPESRLRESKVFPSEITDTVAASTAQSPGMNLSHSASSLSLQQAFSELRRAQMTEGPNTAPPNFSHTGPTFPVVPPFLSSIAGVPTTAAATAPVPATSSPPNDISTSVIQSEVTVPTEEGIAGVATSTGVVTSGGLPIPPVSESPVLSSVVSSITIPAVVSISTTSPSLQVPTSTSEIVVSSTALYPSVTVSATSASAGGSTATPGPKPPAVVSQQAAGSTTVGATLTSVSTTTSFPSTASQLCIQLSSSTSTPTLAETVVVSAHSLDKTSHSSTTGLAFSLSAPSSSSSPGAGVSSYISQPGGLHPLVIPSVIASTPILPQAAGPTSTPLLPQVPSIPPLVQPVANVPAVQQTLIHSQPQPALLPNQPHTHCPEVDSDTQPKAPGIDDIKTLEEKLRSLFSEHSSSGAQHASVSLETSLVIESTVTPGIPTTAVAPSKLLTSTTSTCLPPTNLPLGTVALPVTPVVTPGQVSTPVSTTTSGVKPGTAPSKPPLTKAPVLPVGTELPAGTLPSEQLPPFPGPSLTQSQQPLEDLDAQLRRTLSPEMITVTSAVGPVSMAAPTAITEAGTQPQKVSQVKEGPVLATSSGAGVFKMGRFQVSVAADGAQKEGKNKSEDAKSVHFESSTSESSVLSSSSPESTLVKPEPNGITIPGISSDVPESAHKTTASEAKSDTGQPTKVGRFQVTTTANKVGRFSVSKTEDKITDTKKEGPVASPPFMDLEQAVLPAVIPKKEKPELSEPSHLNGPSSDPEAAFLSRDVDDGSGSPHSPHQLSSKSLPSQNLSQSLSNSFNSSYMSSDNESDIEDEDLKLELRRLRDKHLKEIQDLQSRQKHEIESLYTKLGKVPPAVIIPPAAPLSGRRRRPTKSKGSKSSRSSSLGNKSPQLSGNLSGQSAASVLHPQQTLHPPGNIPESGQNQLLQPLKPSPSSDNLYSAFTSDGAISVPSLSAPGQGTSSTNTVGATVNSQAAQAQPPAMTSSRKGTFTDDLHKLVDNWARDAMNLSGRRGSKGHMNYEGPGMARKFSAPGQLCISMTSNLGGSAPISAASATSLGHFTKSMCPPQQYGFPATPFGAQWSGTGGPAPQPLGQFQPVGTASLQNFNISNLQKSISNPPGSNLRTT

SEQ ID NO: 14278 - protein, 2833 aa, Homo sapiens
MSGGAAEKQSSTPGSLFLSPPAPAPKNGSSSDSSVGEKLGAAAADAVTGRTEEYRRRRHTMDKDSRGAAATTTTTEHRFFRRSVICDSNATALELPGLPLSLPQPSIPAAVPQSAPPEPHREETVTATATSQVAQQPPAAAAPGEQAVAGPAPSTVPSSTSKDRPVSQPSLVGSKEEPPPARSGSGGGSAKEPQEERSQQQDDIEELETKAVGMSNDGRFLKFDIEIGRGSFKTVYKGLDTETTVEVAWCELQDRKLTKSERQRFKEEAEMLKGLQHPNIVRFYDSWESTVKGKKCIVLVTELMTSGTLKTYLKRFKVMKIKVLRSWCRQILKGLQFLHTRTPPIIHRDLKCDNIFITGPTGSVKIGDLGLATLKRASFAKSVIGTPEFMAPEMYEEKYDESVDVYAFGMCMLEMATSEYPYSECQNAAQIYRRVTSGVKPASFDKVAIPEVKEIIEGCIRQNKDERYSIKDLLNHAFFQEETGVRVELAEEDDGEKIAIKLWLRIEDIKKLKGKYKDNEAIEFSFDLERDVPEDVAQEMVESGYVCEGDHKTMAKAIKDRVSLIKRKREQRQLVREEQEKKKQEESSLKQQVEQSSASQTGIKQLPSASTGIPTASTTSASVSTQVEPEEPEADQHQQLQYQQPSISVLSDGTVDSGQGSSVFTESRVSSQQTVSYGSQHEQAHSTGTVPGHIPSTVQAQSQPHGVYPPSSVPQSMAHPCGGTPTYPESQIFFPTIHERPVSFSPPPTCPPKVAISQRRKSTSFLEAQTHHFQPLLRTVGQSLLPPGGSPTNWTPEAVVMLGTTASRVTGESCEIQVHPMFEPSQVYSDYRPGLVLPEEAHYFIPQEAVYVAGVHYQARVAEQYEGIPYNSSVLSSPMKQIPEQKPVQGGPTSSSVFEFPSGQAFLVGHLQNLRLDSGLGPGSPLSSISAPISTDATRLKFHPVFVPHSAPAVLTHNNESRSNCVFEFHVHTPSSSSGEGGGILPQRVYRNRQVAVDLNQEELPPQSVGLHGYLQPVTEEKHNYHAPELTVSVVEPIGQNWPIGSPEYSSDSSQITSSDPSDFQSPPPTGGAAAPFGSDVSMPFIHLPQTVLQESPLFFCFPQGTTSQQVLTASFSSGGSALHPQAQGQSQGQPSSSSLTGVSSSQPIQHPQQQQGIQQTAPPQQTVQYSLSQTSTSSEATTAQPVSQPQAPQVLPQVSAGKQLPVSQPVPTIQGEPQIPVATQPSVVPVHSGAHFLPVGQPLPTPLLPQYPVSQIPISTPHVSTAQTGFSSLPITMAAGITQPLLTLASSATTAAIPGVSTVVPSQLPTLLQPVTQLPSQVHPQLLQPAVQSMGIPANLGQAAEVPLSSGDVLYQGFPPRLPPQYPGDSNIAPSSNVASVCIHSTVLSPPMPTEVLATPGYFPTVVQPYVESNLLVPMGGVGGQVQVSQPGGSLAQAPTTSSQQAVLESTQGVSQVAPAEPVAVAQTQATQPTTLASSVDSAHSDVASGMSDGNENVPSSSGRHEGRTTKRHYRKSVRSRSRHEKTSRPKLRILNVSNKGDRVVECQLETHNRKMVTFKFDLDGDNPEEIATIMVNNDFILAIERESFVDQVREIIEKADEMLSEDVSVEPEGDQGLESLQGKDDYGFSGSQKLEGEFKQPIPASSMPQQIGIPTSSLTQVVHSAGRRFIVSPVPESRLRESKVFPSEITDTVAASTAQSPGMNLSHSASSLSLQQAFSELRRAQMTEGPNTAPPNFSHTGPTFPVVPPFLSSIAGVPTTAAATAPVPATSSPPNDISTSVIQSEVTVPTEEGIAGVATSTGVVTSGGLPIPPVSESPVLSSVVSSITIPAVVSISTTSPSLQVPTSTSEIVVSSTALYPSVTVSATSASAGGSTATPGPKPPAVVSQQAAGSTTVGATLTSVSTTTSFPSTASQLCIQLSSSTSTPTLAETVVVSAHSLDKTSHSSTTGLAFSLSAPSSSSSPGAGVSSYISQPGGLHPLVIPSVIASTPILPQAAGPTSTPLLPQVPSIPPLVQPVANVPAVQQTLIHSQPQPALLPNQPHTHCPEVDSDTQPKAPGIDDIKTLEEKLRSLFSEHSSSGAQHASVSLETSLVIESTVTPGIPTTAVAPSKLLTSTTSTCLPPTNLPLGTVALPVTPVVTPGQVSTPVSTTTSGVKPGTAPSKPPLTKAPVLPVGTELPAGTLPSEQLPPFPGPSLTQSQQPLEDLDAQLRRTLSPEMITVTSAVGPVSMAAPTAITEAGTQPQKGVSQVKEGPVLATSSGAGVFKMGRFQVSVAADGAQKEGKNKSEDAKSVHFESSTSESSVLSSSSPESTLVKPEPNGITIPGISSDVPESAHKTTASEAKSDTGQPTKVGRFQVTTTANKVGRFSVSKTEDKITDTKKEGPVASPPFMDLEQAVLPAVIPKKEKPELSEPSHLNGPSSDPEAAFLSRDVDDGSGSPHSPHQLSSKSLPSQNLSQSLSNSFNSSYMSSDNESDIEDEDLKLELRRLRDKHLKEIQDLQSRQKHEIESLYTKLGKVPPAVIIPPAAPLSGRRRRPTKSKGSKSSRSSSLGNKSPQLSGNLSGQSAASVLHPQQTLHPPGNIPESGQNQLLQPLKPSPSSDNLYSAFTSDGAISVPSLSAPGQGCAKFNCASEQVTFKPGGRRTRFLRKMVKKVCPCNQLCRTSSTNTVGATVNSQAAQAQPPAMTSSRKGTFTDDLHKLVDNWARDAMNLSGRRGSKGHMNYEGPGMARKFSAPGQLCISMTSNLGGSAPISAASATSLGHFTKSMCPPQQYGFPATPFGAQWSGTGGPAPQPLGQFQPVGTASLQNFNISNLQKSISNPPGSNLRTT

SEQ ID NO: 14279 - protein, 2642 aa, Homo sapiens
MSGGAAEKQSSTPGSLFLSPPAPAPKNGSSSDSSVGEKLGAAAADAVTGRTEEYRRRRHTMDKDSRGAAATTTTTEHRFFRRSVICDSNATALELPGLPLSLPQPSIPAAVPQSAPPEPHREETVTATATSQVAQQPPAAAAPGEQAVAGPAPSTVPSSTSKDRPVSQPSLVGSKEEPPPARSGSGGGSAKEPQEERSQQQDDIEELETKAVGMSNDGRFLKFDIEIGRGSFKTVYKGLDTETTVEVAWCELQDRKLTKSERQRFKEEAEMLKGLQHPNIVRFYDSWESTVKGKKCIVLVTELMTSGTLKTYLKRFKVMKIKVLRSWCRQILKGLQFLHTRTPPIIHRDLKCDNIFITGPTGSVKIGDLGLATLKRASFAKSVIGTPEFMAPEMYEEKYDESVDVYAFGMCMLEMATSEYPYSECQNAAQIYRRVTSGVKPASFDKVAIPEVKEIIEGCIRQNKDERYSIKDLLNHAFFQEETGVRVELAEEDDGEKIAIKLWLRIEDIKKLKGKYKDNEAIEFSFDLERDVPEDVAQEMVESGYVCEGDHKTMAKAIKDRVSLIKRKREQRQLVREEQEKKKQEESSLKQQVEQSSASQTGIKQLPSASTGIPTASTTSASVSTQVEPEEPEADQHQQLQYQQPSISVLSDGTVDSGQGSSVFTESRVSSQQTVSYGSQHEQAHSTGTVPGHIPSTVQAQSQPHGVYPPSSVPQSMAHPCGGTPTYPESQIFFPTIHERPVSFSPPPTCPPKVAISQRRKSTSFLEAQTHHFQPLLRTVGQSLLPPGGSPTNWTPEAVVMLGTTASRVTGESCEIQVHPMFEPSQVYSDYRPGLVLPEEAHYFIPQEAVYVAGVHYQARVAEQYEGIPYNSSVLSSPMKQIPEQKPVQGGPTSSSVFEFPSGQAFLVGHLQNLRLDSGLGPGSPLSSISAPISTDATRLKFHPVFVPHSAPAVLTHNNESRSNCVFEFHVHTPSSSSGEGGGILPQRVYRNRQVAVDLNQEELPPQSVGLHGYLQPVTEEKHNYHAPELTVSVVEPIGQNWPIGSPEYSSDSSQITSSDPSDFQSPPPTGGAAAPFGSDVSMPFIHLPQTVLQESPLFFCFPQGTTSQQVLTASFSSGGSALHPQAQGQSQGQPSSSSLTGVSSSQPIQHPQQQQGIQQTAPPQQTVQYSLSQTSTSSEATTAQPVSQPQAPQVLPQVSAGKQGFPPRLPPQYPGDSNIAPSSNVASVCIHSTVLSPPMPTEVLATPGYFPTVVQPYVESNLLVPMGGVGGQVQVSQPGGSLAQAPTTSSQQAVLESTQGVSQVAPAEPVAVAQTQATQPTTLASSVDSAHSDVASGMSDGNENVPSSSGRHEGRTTKRHYRKSVRSRSRHEKTSRPKLRILNVSNKGDRVVECQLETHNRKMVTFKFDLDGDNPEEIATIMVNNDFILAIERESFVDQVREIIEKADEMLSEDVSVEPEGDQGLESLQGKDDYGFSGSQKLEGEFKQPIPASSMPQQIGIPTSSLTQVVHSAGRRFIVSPVPESRLRESKVFPSEITDTVAASTAQSPGMNLSHSASSLSLQQAFSELRRAQMTEGPNTAPPNFSHTGPTFPVVPPFLSSIAGVPTTAAATAPVPATSSPPNDISTSVIQSEVTVPTEEGIAGVATSTGVVTSGGLPIPPVSESPVLSSVVSSITIPAVVSISTTSPSLQVPTSTSEIVVSSTALYPSVTVSATSASAGGSTATPGPKPPAVVSQQAAGSTTVGATLTSVSTTTSFPSTASQLCIQLSSSTSTPTLAETVVVSAHSLDKTSHSSTTGLAFSLSAPSSSSSPGAGVSSYISQPGGLHPLVIPSVIASTPILPQAAGPTSTPLLPQVPSIPPLVQPVANVPAVQQTLIHSQPQPALLPNQPHTHCPEVDSDTQPKAPGIDDIKTLEEKLRSLFSEHSSSGAQHASVSLETSLVIESTVTPGIPTTAVAPSKLLTSTTSTCLPPTNLPLGTVALPVTPVVTPGQVSTPVSTTTSGVKPGTAPSKPPLTKAPVLPVGTELPAGTLPSEQLPPFPGPSLTQSQQPLEDLDAQLRRTLSPEMITVTSAVGPVSMAAPTAITEAGTQPQKGVSQVKEGPVLATSSGAGVFKMGRFQVSVAADGAQKEGKNKSEDAKSVHFESSTSESSVLSSSSPESTLVKPEPNGITIPGISSDVPESAHKTTASEAKSDTGQPTKVGRFQVTTTANKVGRFSVSKTEDKITDTKKEGPVASPPFMDLEQAVLPAVIPKKEKPELSEPSHLNGPSSDPEAAFLSRDVDDGSGSPHSPHQLSSKSLPSQNLSQSLSNSFNSSYMSSDNESDIEDEDLKLELRRLRDKHLKEIQDLQSRQKHEIESLYTKLGKVPPAVIIPPAAPLSGRRRRPTKSKGSKSSRSSSLGNKSPQLSGNLSGQSAASVLHPQQTLHPPGNIPESGQNQLLQPLKPSPSSDNLYSAFTSDGAISVPSLSAPGQGTSSTNTVGATVNSQAAQAQPPAMTSSRKGTFTDDLHKLVDNWARDAMNLSGRRGSKGHMNYEGPGMARKFSAPGQLCISMTSNLGGSAPISAASATSLGHFTKSMCPPQQYGFPATPFGAQWSGTGGPAPQPLGQFQPVGTASLQNFNISNLQKSISNPPGSNLRTT

SEQ ID NO: 14280 - protein, 434 aa, Homo sapiens
MYELLVLFMLIQPQSMAHPCGGTPTYPESQIFFPTIHERPVSFSPPPTCPPKVAISQRRKSTSFLEAQTHHFQPLLRTVGQSLLPPGGSPTNWTPEAVVMLGTTASRVTGESCEIQVHPMFEPSQVYSDYRPGLVLPEEAHYFIPQEAVYVAGVHYQARVAEQYEGIPYNSSVLSSPMKQIPEQKPVQGGPTSSSVFEFPSGQAFLVGHLQNLRLDSGLGPGSPLSSISAPISTDATRLKFHPVFVPHSAPAVLTHNNESRSNCVFEFHVHTPSSSSGEGGGILPQRVYRNRQVAVDLNQEELPPQSVGLHGYLQPVTEEKHNYHAPELTVSVVEPIGQNWPIGSPEYSSDSSQITSSDPSDFQSPPPTGGAAAPFGSDVSMPFIHLPQTVLQESPLFFCFPQGTTSQQVLTASFSSGGSALHPQVIGKLPQLF

SEQ ID NO: 14281 - protein, 240 aa, Homo sapiens
PHSAPAVLTHNNESRSNCVFEFHVHTPSSSSGEGGGILPQRVYRNRQVAVDLNQEELPPQSVGLHGYLQPVTEEKHNYHAPELTVSVVEPIGQNWPIGSPEYSSDSSQITSSDPSDFQSPPPTGGAAAPFGSDVSMPFIHLPQTVLQESPLFFCFPQGTTSQQVLTASFSSGGSALHPQAQGQSQGQPSSSSLTGVSSSQPIQHPQQQQGIQQTAPPQQTVQYSLSQTSTSSEATTAQPV

SEQ ID NO: 14282 - protein, 67 aa, Homo sapiens
SDNLYSAFTSDGAISVPSLSAPGQGCAKFNCASEQVTFKPGGRRTRFLSTPCLALWKMVKKVCPCNQ

SEQ ID NO: 14283 - protein, 245 aa, Homo sapiens
SQPHGVYPPSSVQGIQQTAPPQQTVQYSLSQTSTSSEATTAQPVSQPQAPQVLPQVSAGKQLPVSQPVPTIQGEPQIPVATQPSVVPVHSGAHFLPVGQPLPTPLLPQYPVSQIPISTPHVSTAQTGFSSLPITMAAGITQPLLTLASSATTAAIPGVSTVVPSQLPTLLQPVTQLPSQVHPQLLQPAVQSMGIPANLGQAAEVPLSSGDVLYQGFPPRLPPQYPGDSNIAPSSNVASVCIHSTV

SEQ ID NO: 14284 - protein, 195 aa, Homo sapiens [sequence omitted]

SEQ ID NO: 14285 - protein, 218 aa, Homo sapiens
  SITE 1: note = misc_feature - Xaa can be any naturally occurring amino acid
XADGTVDSGQGSSVFTESRVSSQQTVSYGSQHEQAHSTGTVPGHIPSTVQAQSQPHGVYPPSSVQQGIQQTAPPQQTVQYSLSQTSTSSEATTAQPVSQPQAPQVLPQVSAGKQSTQGVSQVAPAEPVAVAQTQATQPTTLASSVDSAHSDVASGMSDGNENVPSSSGRHEGRTTKRHYRKSVRSRSRHEKTSRPKLRILNVSNKGDRVVECQLETHN

SEQ ID NO: 14286 - protein, 177 aa, Homo sapiens
  SITE 1: note = misc_feature - Xaa can be any naturally occurring amino acid
XEQAHSTGTVPGHIPSTVQAQSQPHGVYPPSSVAQGQSQGQPSSSSLTGVSSSQPIQHPQQQQGIQQTAPPQQTVQYSLSQTSTSSEATTAQPVSQPQAPQVLPQVSAGKQGFPPRLPPQYPGDSNIAPSSNVASVCIHSTVLSPPMPTEVLATPGYFPTVVQPYVESNLLVPMGGV

SEQ ID NO: 14287 - protein, 76 aa, Homo sapiens
  SITE 1: note = misc_feature - Xaa can be any naturally occurring amino acid
XSDNLYSAFTSDGAISVPSLSAPGQGKMVKKVCPCNQLCRTSSTNTVGATVNSQAAQAQPPAMTSSRKGTFTDDLH

SEQ ID NO: 14288 - protein, 370 aa, Homo sapiens
MGLWALLPGWVSATLLLALAALPAALAANSSGRWWGIVNVASSTNLLTDSKSLQLVLEPSLQLLSRKQRRLIRQNPGILHSVSGGLQSAVRECKWQFRNRRWNCPTAPGPHLFGKIVNRGCRETAFIFAITSAGVTHSVARSCSEGSIESCTCDYRRRGPGGPDWHWGGCSDNIDFGRLFGREFVDSGEKGRDLRFLMNLHNNEAGRTTVFSEMRQECKCHGMSGSCTVRTCWMRLPTLRAVGDVLRDRFDGASRVLYGNRGSNRASRAELLRLEPEDPAHKPPSPHDLVYFEKSPNFCTYSGRLGTAGTAGRACNSSSPALDGCELLCCGRGHRTRTQRVTERCNCTFHWCCHVSCRNCTHTRVLHECL

SEQ ID NO: 14289 - protein, 359 aa, Homo sapiens
MGLWALLPGWVSATLLLALAALPAALAANSSGRWWGIVNVASSTNLLTDSKSLQLVLEPSLQLLSRKQRRLIRQNPGILHSVSGGLQSAVRECKWQFRNRRWNCPTAPGPHLFGKIVNRGCRETAFIFAITSAGVTHSVARSCSEGSIESCTCDYRRRGPGGPDWHWGGCSDNIDFGRLFGREFVDSGEKGRDLRFLMNLHNNEAGRTTVFSEMRQECKCHGMSGSCTVRTCWMRLPTLRAVGDVLRDRFDGASRVLYGNRGSNRASRAELLRLEPDLVYFEKSPNFCTYSGRLGTAGTAGRACNSSSPALDGCELLCCGRGHRTRTQRVTERCNCTFHWCCHVSCRNCTHTRVLHECL

SEQ ID NO: 14290 - protein, 102 aa, Homo sapiens
MLEEPRPRPPPSGLAGLLFLALCSRALSNEILGLKLPGEPPLTANTVCLTLSGLSKRQLGLCLRNPDVTASALQGLHIAVHECQHQLRDQRWNCSALEGGGR

SEQ ID NO: 14291 - protein, 191 aa, Homo sapiens
MLEEPRPRPPPSGLAGLLFLALCSRALSNEILGLKLPGEPPLTANTVCLTLSGLSKRQLGLCLRNPDVTASALQGLHIAVHECQHQLRDQRWNCSALEGGGRLPHHSAILKRGFRESAFSFSMLAAGVMHAVATACSLGKLVSCGCGWKGSGEQDRLRAKLLQLQALSRGKLPGTSRHECESTTTGWGARW

SEQ ID NO: 14292 - protein, 389 aa, Homo sapiens
MLEEPRPRPPPSGLAGLLFLALCSRALSNEILGLKLPGEPPLTANTVCLTLSGLSKRQLGLCLRNPDVTASALQGLHIAVHECQHQLRDQRWNCSALEGGGRLPHHSAILKRGFRESAFSFSMLAAGVMHAVATACSLGKLVSCGCGWKGSGEQDRLRAKLLQLQALSRGKSFPHSLPSPGPGSSPSPGPQDTWEWGGCNHDMDFGEKFSRDFLDSREAPRDIQARMRIHNNRVGRQVVTENLKRKCKCHGTSGSCQFKTCWRAAPEFRAVGAALRERLGRAIFIDTHNRNSGAFQPRLRPRRLSGELVYFEKSPDFCERDPTMGSPGTRGRACNKTSRLLDGCGSLCCGRGHNVLRQTRVERCHCRFHWCCYVLCDECKVTEWVNVCK

SEQ ID NO: 14293 - protein, 173 aa, Homo sapiens
MLEEPRPRPPPSGLAGLLFLALCSRALSNEILGLKLPGEPPLTANTVCLTLSGLSKRQLGLCLRNPDVTASALQGLHIAVHECQHQLRDQRWNCSALEGGGRLPHHSAILKRGFRESAFSFSMLAAGVMHAVATACSLGKLVSCGCGWKGSGKLPGTSRHECESTTTGWGARW

SEQ ID NO: 14294 - protein, 132 aa, Homo sapiens
MLEEPRPRPPPSGLAGLLFLALCSRALSNEILGLKLPGEPPLTANTVCLTLSGLSKRQLGLCLRNPDVTASALQGLHIAVHECQHQLRDQRWNCSALEGGGRLPHHSAILKRGPGVGEGLDTQMVSEKVLFP

SEQ ID NO: 14295 - protein, 5 aa, Homo sapiens
MRARP

SEQ ID NO: 14296 - protein, 354 aa, Homo sapiens
MRARPQVCEALLFALALQTGVCYGIKWLALSKTPSALALNQTQHCKQLEGLVSAQVQLCRSNLELMHTVVHAAREVMKACRRAFADMRWNCSSIELAPNYLLDLERGTRESAFVYALSAAAISHAIARACTSGDLPGCSCGPVPGEPPGPGNRWGGCADNLSYGLLMGAKFSDAPMKVKKTGSQANKLMRLHNSEVGRQALRASLEMKCKCHGVSGSCSIRTCWKGLQELQDVAADLKTRYLSATKVVHRPMGTRKHLVPKDLDIRPVKDSELVYLQSSPDFCMKNEKVGSHGTQDRQCNKTSNGSDSCDLMCCGRGYNPYTDRVVERCHCKYHWCCYVTCRRCERTVERYVCK

SEQ ID NO: 14297 - protein, 262 aa, Homo sapiens
MRARPQVCEALLFALALQTGVCYGIKWLALSKTPSALALNQTQHCKQLEGLVSAQVQLCRSNLELMHTVVHAAREVMKACRRAFADMRWNCSSIELAPNYLLDLERGTRESAFVYALSAAAISHAIARACTSGDLQELQDVAADLKTRYLSATKVVHRPMGTRKHLVPKDLDIRPVKDSELVYLQSSPDFCMKNEKVGSHGTQDRQCNKTSNGSDSCDLMCCGRGYNPYTDRVVERCHCKYHWCCYVTCRRCERTVERYVCK

SEQ ID NO: 14298 - protein, 365 aa, Homo sapiens
MDRAALLGLARLCALWAALLVLFPYGAQGNWMWLGIASFGVPEKLGCANLPLNSRQKELCKRKPYLLPSIREGARLGIQECGSQFRHERWNCMITAAATTAPMGASPLFGYELSSGTKETAFIYAVMAAGLVHSVTRSCSAGNMTECSCDTTLQNGGSASEGWHWGGCSDDVQYGMWFSRKFLDFPIGNTTGKENKVLLAMNLHNNEAGRQAVAKLMSVDCRCHGVSGSCAVKTCWKTMSSFEKIGHLLKDKYENSIQISDKTKRKMRRREKDQRKIPIHKDDLLYVNKSPNYCVEDKKLGIPGTQGRECNRTSEGADGCNLLCCGRGYNTHVVRHVERCECKFIWCCYVRCRRCESMTDVHTCK

SEQ ID NO: 14299 - protein, 355 aa, Homo sapiens
MQLTTCLRETLFTGASQKTSLWWLGIASFGVPEKLGCANLPLNSRQKELCKRKPYLLPSIREGARLGIQECGSQFRHERWNCMITAAATTAPMGASPLFGYELSSGTKETAFIYAVMAAGLVHSVTRSCSAGNMTECSCDTTLQNGGSASEGWHWGGCSDDVQYGMWFSRKFLDFPIGNTTGKENKVLLAMNLHNNEAGRQAVAKLMSVDCRCHGVSGSCAVKTCWKTMSSFEKIGHLLKDKYENSIQISDKTKRKMRRREKDQRKIPIHKDDLLYVNKSPNYCVEDKKLGIPGTQGRECNRTSEGADGCNLLCCGRGYNTHVVRHVERCECKFIWCCYVRCRRCESMTDVHTCK

SEQ ID NO: 14300 - protein, 110 aa, Homo sapiens
MNAPLGGIWLWLPLLLTWLTPEVNSSWWYMRATGGSSRVMCDNVPGLVSSQRQLCHRHPDVMRAISQGVAEWTAECQHQFRQHRWNCNTLDRDHSLFGRVLLRRPVAKEK

SEQ ID NO: 14301 - protein, 153 aa, Homo sapiens
MNAPLGGIWLWLPLLLTWLTPEVNSSWWYMRATGGSSRVMCDNVPGLVSSQRQLCHRHPDVMRAISQGVAEWTAECQHQFRQHRWNCNTLDRDHSLFGRVLLRSCKAVLETRVQVPRGERLMYSQDMLAGHGRLQENGRLSLEEVQWGHPGGH

SEQ ID NO: 14302 - protein, 360 aa, Homo sapiens
MNAPLGGIWLWLPLLLTWLTPEVNSSWWYMRATGGSSRVMCDNVPGLVSSQRQLCHRHPDVMRAISQGVAEWTAECQHQFRQHRWNCNTLDRDHSLFGRVLLRSSRESAFVYAISSAGVVFAITRACSQGEVKSCSCDPKKMGSAKDSKGIFDWGGCSDNIDYGIKFARAFVDAKERKGKDARALMNLHNNRAGRKAVKRFLKQECKCHGVSGSCTLRTCWLAMADFRKTGDYLWRKYNGAIQVVMNQDGTGFTVANERFKKPTKNDLVYFENSPDYCIRDREAGSLGTAGRVCNLTSRGMDSCEVMCCGRGYDTSHVTRMTKCGCKFHWCCAVRCQDCLEALDVHTCKAPKNADWTTAT

SEQ ID NO: 14303 - protein, 355 aa, Homo sapiens
MEPHLLGLLLGLLLGGTRVLAGYPIWWSLALGQQYTSLGSQPLLCGSIPGLVPKQLRFCRNYIEIMPSVAEGVKLGIQECQHQFRGRRWNCTTIDDSLAIFGPVLDKATRESAFVHAIASAGVAFAVTRSCAEGTSTICGCDSHHKGPPGEGWKWGGCSEDADFGVLVSREFADARENRPDARSAMNKHNNEAGRTTILDHMHLKCKCHGLSGSCEVKTCWWAQPDFRAIGDFLKDKYDSASEMVVEKHRESRGWVETLRAKYSLFKPPTERDLVYYENSPNFCEPNPETGSFGTRDRTCNVTSHGIDGCDLLCCGRGHNTRTEKRKEKCHCIFHWCCYVSCQECIRIYDVHTCK

SEQ ID NO: 14304 - protein, 352 aa, Homo sapiens
MAPLGYFLLLCSLKQALGSYPIWWSLAVGPQYSSLGSQPILCASIPGLVPKQLRFCRNYVEIMPSVAEGIKIGIQECQHQFRGRRWNCTTVHDSLAIFGPVLDKATRESAFVHAIASAGVAFAVTRSCAEGTAAICGCSSRHQGSPGKGWKWGGCSEDIEFGGMVSREFADARENRPDARSAMNRHNNEAGRQAIASHMHLKCKCHGLSGSCEVKTCWWSQPDFRAIGDFLKDKYDSASEMVVEKHRESRGWVETLRPRYTYFKVPTERDLVYYEASPNFCEPNPETGSFGTRDRTCNVSSHGIDGCDLLCCGRGHNARAERRREKCRCVFHWCCYVSCQECTRVYDVHTCK

SEQ ID NO: 14305 - protein, 365 aa, Homo sapiens
MAGSAMSSKFFLVALAIFFSFAQVVIEANSWWSLGMNNPVQMSEVYIIGAQPLCSQLAGLSQGQKKLCHLYQDHMQYIGEGAKTGIKECQYQFRHRRWNCSTVDNTSVFGRVMQIGSRETAFTYAVSAAGVVNAMSRACREGELSTCGCSRAARPKDLPRDWLWGGCGDNIDYGYRFAKEFVDARERERIHAKGSYESARILMNLHNNEAGRRTVYNLADVACKCHGVSGSCSLKTCWLQLADFRKVGDALKEKYDSAAAMRLNSRGKLVQVNSRFNSPTTQDLVYIDPSPDYCVRNESTGSLGTQGRLCNKTSEGMDGCELMCCGRGYDQFKTVQTERCHCKFHWCCYVKCKKCTEIVDQFVCK

SEQ ID NO: 14306 - protein, 214 aa, Homo sapiens
MAGSAMSSKFFLVALAIFFSFAQVVIEANSWWSLGMNNPVQMSEVYIIGAQPLCSQLAGLSQGQKKLCHLYQDHMQYIGEGAKTGIKECQYQFRHRRWNCSTVDNTSVFGRVMQIGSRETAFTYAVSAAGVVNAMSRACREGELSTCGCSRAARPKDLPRDWLWGGCGDNIDYGYRFAKEFVDARERERIHAKGSYESARILMNLHNNEAGRRV

SEQ ID NO: 14307 - protein, 380 aa, Homo sapiens
MKKSIGILSPGVALGMAGSAMSSKFFLVALAIFFSFAQVVIEANSWWSLGMNNPVQMSEVYIIGAQPLCSQLAGLSQGQKKLCHLYQDHMQYIGEGAKTGIKECQYQFRHRRWNCSTVDNTSVFGRVMQIGSRETAFTYAVSAAGVVNAMSRACREGELSTCGCSRAARPKDLPRDWLWGGCGDNIDYGYRFAKEFVDARERERIHAKGSYESARILMNLHNNEAGRRTVYNLADVACKCHGVSGSCSLKTCWLQLADFRKVGDALKEKYDSAAAMRLNSRGKLVQVNSRFNSPTTQDLVYIDPSPDYCVRNESTGSLGTQGRLCNKTSEGMDGCELMCCGRGYDQFKTVQTERCHCKFHWCCYVKCKKCTEIVDQFVCK

SEQ ID NO: 14308 - protein, 380 aa, Homo sapiens; identical to SEQ ID NO: 14307

SEQ ID NO: 14309 - protein, 112 aa, Homo sapiens
MPSLLLLFTAALLSSWAQLLTDANSWWSLALNPVQRPEMFIIGAQPVCSQLPGLSPGQRKLCQLYQEHMAYIGEGAKTGIKECQHQFRQRRWNCSTADNASVFGRVMQIGCV

SEQ ID NO: 14310 - protein, 118 aa, Homo sapiens
MPSLLLLFTAALLSSWAQLLTDANSWWSLALNPVQRPEMFIIGAQPVCSQLPGLSPGQRKLCQLYQEHMAYIGEGAKTGIKECQHQFRQRRWNCSTADNASVFGRVMQIGSRETAFTH

SEQ ID NO: 14311 - protein, 157 aa, Homo sapiens
MPSLLLLFTAALLSSWAQLLTDANSWWSLALNPVQRPEMFIIGAQPVCSQLPGLSPGQRKLCQLYQEHMAYIGEGAKTGIKECQHQFRQRRWNCSTADNASVFGRVMQIGSRETAFTHAVSAAGVVNAISRACREGELSTCGCSRTARPKDLPRDWL

SEQ ID NO: 14312 - protein, 254 aa, Homo sapiens
MPSLLLLFTAALLSSWAQLLTDANSWWSLALNPVQRPEMFIIGAQPVCSQLPGLSPGQRKLCQLYQEHMAYIGEGAKTGIKECQHQFRQRRWNCSTADNASVFGRVMQIGSRETAFTHAVSAAGVVNAISRACREGELSTCGCSRTARPKDLPRDWLWGGCGDNVEYGYRFAKEFVDAREREKNFAKGSEEQGRVLMNLQNNEAGRRAVYKMADVACKCHGVSGSCSLKTCWLQLAEFRKVGDRLKEKYDSAAA

SEQ ID NO: 14313 - protein, 359 aa, Homo sapiens
MPSLLLLFTAALLSSWAQLLTDANSWWSLALNPVQRPEMFIIGAQPVCSQLPGLSPGQRKLCQLYQEHMAYIGEGAKTGIKECQHQFRQRRWNCSTADNASVFGRVMQIGSRETAFTHAVSAAGVVNAISRACREGELSTCGCSRTARPKDLPRDWLWGGCGDNVEYGYRFAKEFVDAREREKNFAKGSEEQGRVLMNLQNNEAGRRAVYKMADVACKCHGVSGSCSLKTCWLQLAEFRKVGDRLKEKYDSAAAMRVTRKGRLELVNSRFTQPTPEDLVYVDPSPDYCLRNESTGSLGTQGRLCNKTSEGMDGCELMCCGRGYNQFKSVQVERCHCKFHWCCFVRCKKCTEIVDQYICK

SEQ ID NO: 14314 - protein, 359 aa, Homo sapiens; identical to SEQ ID NO: 14313

SEQ ID NO: 14315 - protein, 359 aa, Homo sapiens; identical to SEQ ID NO: 14313

SEQ ID NO: 14316 - protein, 365 aa, Homo sapiens
MLPPLPSRLGLLLLLLLCPAHVGGLWWAVGSPLVMDPTSICRKARRLAGRQAELCQAEPEVVAELARGARLGVRECQFQFRFRRWNCSSHSKAFGRILQQDIRETAFVFAITAAGASHAVTQACSMGELLQCGCQAPRGRAPPRPSGLPGTPGPPGPAGSPEGSAAWEWGGCGDDVDFGDEKSRLFMDARHKRGRGDIRALVQLHNNEAGRLAVRSHTRTECKCHGLSGSCALRTCWQKLPPFREVGARLLERFHGASRVMGTNDGKALLPAVRTLKPPGRADLLYAADSPDFCAPNRRTGSPGTRGRACNSSAPDLSGCDLLCCGRGHRQESVQLEENCLCRFHWCCVVQCHRCRVRKELSLCL

SEQ ID NO: 14317 - protein, 349 aa, Homo sapiens
MNRKARRCLGHLFLSLGMVYLRIGGFSSVVALGASIICNKIPGLAPRQRAICQSRPDAIIVIGEGSQMGLDECQFQFRNGRWNCSALGERTVFGKELKVGSREAAFTYAIIAAGVAHAITAACTQGNLSDCGCDKEKQGQYHRDEGWKWGGCSADIRYGIGFAKVFVDAREIKQNARTLMNLHNNEAGRKILEENMKLECKCHGVSGSCTTKTCWTTLPQFRELGYVLKDKYNEAVHVEPVRASRNKRPTFLKIKKPLSYRKPMDTDLVYIEKSPNYCEEDPVTGSVGTQGRACNKTAPQASGCDLMCCGRGYNTHQYARVWQCNCKFHWCCYVKCNTCSERTEMYTCK

SEQ ID NO: 14318 - protein, 57 aa, Homo sapiens
MGINECQYQFRFGRWNCSALGEKTVFGQELRVGSREAAFTYAITAAGVAHAVTAACS

SEQ ID NO: 14319 - protein, 205 aa, Homo sapiens
MHRNFRKWIFYVFLCFGVLYVKLGALSSVVALGANIICNKIPGLAPRQRAICQSRPDAIIVIGEGAQMGINECQYQFRFGRWNCSALGEKTVFGQELRVGSREAAFTYAITAAGVAHAVTAACSQGNLSNCGCDREKQGYYNQAEGWKWGGCSADVRYGIDFSRRFVDAREIKKNARRLMNLHNNEAGRKGLLGQPRVTSSPLFP

SEQ ID NO: 14320 - protein, 349 aa, Homo sapiens
MHRNFRKWIFYVFLCFGVLYVKLGALSSVVALGANIICNKIPGLAPRQRAICQSRPDAIIVIGEGAQMGINECQYQFRFGRWNCSALGEKTVFGQELRVGSREAAFTYAITAAGVAHAVTAACSQGNLSNCGCDREKQGYYNQAEGWKWGGCSADVRYGIDFSRRFVDAREIKKNARRLMNLHNNEAGRKVLEDRMQLECKCHGVSGSCTTKTCWTTLPKFREVGHLLKEKYNAAVQVEVVRASRLRQPTFLRIKQLRSYQKPMETDLVYIEKSPNYCEEDAATGSVGTQGRLCNRTSPGADGCDTMCCGRGYNTHQYTKVWQCNCKFHWCCFVKCNTCSERTEVFTCK

SEQ ID NO: 14321 - protein, 353 aa, Homo sapiens
MLLLSPRSALVSVYCPQIFLLLSSGSYLALSSVVALGANIICNKIPGLAPRQRAICQSRPDAIIVIGEGAQMGINECQYQFRFGRWNCSALGEKTVFGQELRVGSREAAFTYAITAAGVAHAVTAACSQGNLSNCGCDREKQGYYNQAEGWKWGGCSADVRYGIDFSRRFVDAREIKKNARRLMNLHNNEAGRKVLEDRMQLECKCHGVSGSCTTKTCWTTLPKFREVGHLLKEKYNAAVQVEVVRASRLRQPTFLRIKQLRSYQKPMETDLVYIEKSPNYCEEDAATGSVGTQGRLCNRTSPGADGCDTMCCGRGYNTHQYTKVWQCNCKFHWCCFVKCNTCSERTEVFTCK

SEQ ID NO: 14322 - protein, 333 aa, Homo sapiens
MSAPPFYRALSSVVALGANIICNKIPGLAPRQRAICQSRPDAIIVIGEGAQMGINECQYQFRFGRWNCSALGEKTVFGQELRVGSREAAFTYAITAAGVAHAVTAACSQGNLSNCGCDREKQGYYNQAEGWKWGGCSADVRYGIDFSRRFVDAREIKKNARRLMNLHNNEAGRKVLEDRMQLECKCHGVSGSCTTKTCWTTLPKFREVGHLLKEKYNAAVQVEVVRASRLRQPTFLRIKQLRSYQKPMETDLVYIEKSPNYCEEDAATGSVGTQGRLCNRTSPGADGCDTMCCGRGYNTHQYTKVWQCNCKFHWCCFVKCNTCSERTEVFTCK

SEQ ID NO: 14323 - protein, 355 aa, Homo sapiens
MGNLFMLWAALGICCAAFSASAWSVNNFLITGPKAYLTYTTSVALGAQSGIEECKFQFAWERWNCPENALQLSTHNRLRSATRETSFIHAISSAGVMYIITKNCSMGDFENCGCDGSNNGKTGGHGWIWGGCSDNVEFGERISKLFVDSLEKGKDARALMNLHNNRAGRLAVRATMKRTCKCHGISGSCSIQTCWLQLAEFREMGDYLKAKYDQALKIEMDKRQLRAGNSAEGHWVPAEAFLPSAEAELIFLEESPDYCTCNSSLGIYGTEGRECLQNSHNTSRWERRSCGRLCTECGLQVEERKTEVISSCNCKFQWCCTVKCDQCRHVVSKYYCARSPGSAQSLGRVWFGVYI

SEQ ID NO: 14324 - protein, 351 aa, Homo sapiens
MGNLFMLWAALGICCAAFSASAWSVNNFLITGPKAYLTYTTSVALGAQSGIEECKFQFAWERWNCPENALQLSTHNRLRSATRETSFIHAISSAGVMYIITKNCSMGDFENCGCDGSNNGKTGGHGWIWGGCSDNVEFGERISKLFVDSLEKGKDARALMNLHNNRAGRLAVRATMKRTCKCHGISGSCSIQTCWLQLAEFREMGDYLKAKYDQALKIEMDKRQLRAGNSAEGHWVPAEAFLPSAEAELIFLEESPDYCTCNSSLGIYGTEGRECLQNSHNTSRWERRSCGRLCTECGLQVEERKTEVISSCNCKFQWCCTVKCDQCRHVVSKYYCARSPGSAQSLGKGSA

SEQ ID NO: 14325 - protein, 369 aa, Homo sapiens
MLCCIQCLCLVSPFPTLTPCQGGPHCLIPIHLCLTFSLFGRSVNNFLITGPKAYLTYTTSVALGAQSGIEECKFQFAWERWNCPENALQLSTHNRLRSATRETSFIHAISSAGVMYIITKNCSMGDFENCGCDGSNNGKTGGHGWIWGGCSDNVEFGERISKLFVDSLEKGKDARALMNLHNNRAGRLAVRATMKRTCKCHGISGSCSIQTCWLQLAEFREMGDYLKAKYDQALKIEMDKRQLRAGNSAEGHWVPAEAFLPSAEAELIFLEESPDYCTCNSSLGIYGTEGRECLQNSHNTSRWERRSCGRLCTECGLQVEERKTEVISSCNCKFQWCCTVKCDQCRHVVSKYYCARSPGSAQSLGKGSA

SEQ ID NO: 14326 - protein, 360 aa, Homo sapiens
MLCCIQCLCLVSPFPTLTPCQGGPHCLIPIHLCLTFSLFGRSVNNFLITGPKAYLTYTTSVALGAQSGIEECKFQFAWERWNCPENALQLSTHNRLRSATRETSFIHAISSAGVMYIITKNCSMGDFENCGCDGSNNGKTGGHGWIWGGCSDNVEFGERISKLFVDSLEKGKDARALMNLHNNRAGRLAVRATMKRTCKCHGISGSCSIQTCWLQLAEFREMGDYLKAKYDQALKIEMDKRQLRAGNSAEGHWVPAEAFLPSAEAELIFLEESPDYCTCNSSLGIYGTEGRECLQNSHNTSRWERRSCGRLCTECGLQVEERKTEVISSCNCKFQWCCTVKCDQCRHVTMSNPAVLLGIR

SEQ ID NO: 14327 - protein, 351 aa, Homo sapiens
MFLSKPSVYICLFTCVLQLSHSWSVNNFLMTGPKAYLIYSSSVAAGAQSGIEECKYQFAWDRWNCPERALQLSSHGGLRSANRETAFVHAISSAGVMYTLTRNCSLGDFDNCGCDDSRNGQLGGQGWLWGGCSDNVGFGEAISKQFVDALETGQDARAAMNLHNNEAGRKAVKGTMKRTCKCHGVSGSCTTQTCWLQLPEFREVGAHLKEKYHAALKVDLLQGAGNSAAGRGAIADTFRSISTRELVHLEDSPDYCLENKTLGLLGTEGRECLRRGRALGRWERRSCRRLCGDCGLAVEERRAETVSSCNCKFHWCCAVRCEQCRRRVTKYFCSRAERPRGGAAHKPGRKP

SEQ ID NO: 14328 - protein, 365 aa, Homo sapiens
MLDGSPLARWLAAAFGLTLLLAALRPSAAYFGLTGSEPLTILPLTLEPEAAAQAHYKACDRLKLERKQRRMCRRDPGVAETLVEAVSMSALECQFQFRFERWNCTLEGRYRASLLKRGFKETAFLYAISSAGLTHALAKACSAGRMERCTCDEAPDLENREAWQWGGCGDNLKYSSKFVKEFLGRRSSKDLRARVDFHNNLVGVKVIKAGVETTCKCHGVSGSCTVRTCWRQLAPFHEVGKHLKHKYETALKVGSTTNEAAGEAGAISPPRGRASGAGGSDPLPRTPELVHLDDSPSFCLAGRFSPGTAGRRCHREKNCESICCGRGHNTQSRVVTRPCQCQVRWCCYVECRQCTQREEVYTCKG

SEQ ID NO: 14329 - protein, 133 aa, Homo sapiens
MKGRAVSFDPLACQGLNASPGSLTSPLRRIRSLTGREVLTPFPGLGTAAAPAQGGAHLKQCDLLKLSRRQKQLCRREPGLAETLRDAAHLGLLECQFQFRHERWNCSLEGRMGLLKRGFKETAFLYAVSSAAL

SEQ ID NO: 14330 - protein, 357 aa, Homo sapiens
MRPPPALALAGLCLLALPAAAASYFGLTGREVLTPFPGLGTAAAPAQGGAHLKQCDLLKLSRRQKQLCRREPGLAETLRDAAHLGLLECQFQFRHERWNCSLEGRMGLLKRGFKETAFLYAVSSAALTHTLARACSAGRMERCTCDDSPGLESRQAWQWGVCGDNLKYSTKFLSNFLGSKRGNKDLRARADAHNTHVGIKAVKSGLRTTCKCHGVSGSCAVRTCWKQLSPFRETGQVLKLRYDSAVKVSSATNEALGRLELWAPARQGSLTKGLAPRSGDLVYMEDSPSFCRPSKYSPGTAGRVCSREASCSSLCCGRGYDTQSRLVAFSCHCQVQWCCYVECQQCVQEELVYTCKH

SEQ ID NO: 14331 - protein, 329 aa, Homo sapiens
MRPPPALALAGLCLLALPAAAASYFGLTGREVLTPFPGLGTAAAPAQGGAHLKQCDLLKLSRRQKQLCRREPGLAETLRDAAHLGLLECQFQFRHERWNCSLEGRMGLLKRGFKETAFLYAVSSAALTHTLARACSAGRMERCTCDDSPGLESRQAWQWGVCGDNLKYSTKFLSNFLGSKRGNKDLRARADAHNTHVGIKAVKSGLRTTCKCHGVSGSCAVRTCWKQLSPFRETGQVLKLRYDSAVKVSSATNEALGRLELWAPARQGSLTKGLAPRSGDLVYMEDSPSFCRPSKYSPGTAGWSAVARSQLITTSTSRIQAILPSQLPE

SEQ ID NO: 14332 - protein, 78 aa, Homo sapiens
MASFPPRVNEKEIAPAAPFDKKCGRENWTVAFAPDGSYFAWSQGHRTVKLVPWSQCLQNFLLHGTKNVTNSSSLRLPR

SEQ ID NO: 14333 - protein, 213 aa, Homo sapiens
MASFPPRVNEKEIDGSYFAWSQGHRTVKLVPWSQCLQNFLLHGTKNVTNSSSLRLPRQNSDGGQKNKPREHIIDCGDIVWSLAFGSSVPEKQSRCVNIEWHRFRFGQDQLLLATGLNNGRIKIWDVYTGKLLLNLVDHTEVVRDLTFAPDGSLILVSASRDKTLRVWDLKDDGNMMKVLRGHQNWVYSCAFSPDSSMLCSVGASKAVVAAILV

SEQ ID NO: 14334 - protein, 143 aa, Homo sapiens
MASFPPRVNEKEIGKLLLNLVDHTEVVRDLTFAPDGSLILVSASRDKTLRVWDLKDDGNMMKVLRGHQNWVYSCAFSPDSSMLCSVGASKAVFLWNMDKYTMIRKLEGHHHDVVACDFSPDGALLATASYDTRVYIWDPHNGD

SEQ ID NO: 14335 - protein, 275 aa, Homo sapiens
MASFPPRVNEKEIGKLLLNLVDHTEVVRDLTFAPDGSLILVSASRDKTLRVWDLKDDGNMMKVLRGHQNWVYSCAFSPDSSMLCSVGASKAVFLWNMDKYTMIRKLEGHHHDVVACDFSPDGALLATASYDTRVYIWDPHNGDILMEFGHLFPPPTPIFAGGANDRWVRSVSFSHDGLHVASLADDKMVRFWRIDEDYPVQVAPLSNGLCCAFSTDGSVLAAGTHDGSVYFWATPRQVPSLQHLCRMSIRRVMPTQEVQELPIPSKLLEFLSYRI

SEQ ID NO: 14336 - protein, 98 aa, Homo sapiens
MASFPPRVNEKEIGKLLLNLVDHTEVVRDLTFAPDGSLILVSASRDKTLRVWDLKDDGNMMKVLRGHQNWVYSCAFSPDSSMLCSVGASKAVVAAILV

SEQ ID NO: 14337 - protein, 54 aa, Homo sapiens
MASFPPRVNEKEIGNMMKVLRGHQNWVYSCAFSPDSSMLCSVGASKAVVAAILV

SEQ ID NO: 14338 - protein, 207 aa, Homo sapiens
MASFPPRVNEKEIVFLFFLLVRLRTIGELLAPAAPFDKKCGRENWTVAFAPDGSYFAWSQGHRTVKLVPWSQCLQNFLLHGTKNVTNSSSLRLPRQNSDGGQKNKPREHIIDCGDIVWSLAFGSSVPEKQSRCVNIEWHRFRFGQDQLLLATGLNNGRIKIWDVYTGKLLLNLVDHTEVVRDLTFAPDGSLILVSASRDKTLRVWDL

SEQ ID NO: 14339 - protein, 421 aa, Homo sapiens
MASFPPRVNEKEIVRLRTIGELLAPAAPFDKKCGRENWTVAFAPDGSYFAWSQGHRTVKLVPWSQCLQNFLLHGTKNVTNSSSLRLPRQNSDGGQKNKPREHIIDCGDIVWSLAFGSSVPEKQSRCVNIEWHRFRFGQDQLLLATGLNNGRIKIWDVYTGKLLLNLVDHTEVVRDLTFAPDGSLILVSASRDKTLRVWDLKDDGNMMKVLRGHQNWVYSCAFSPDSSMLCSVGASKAVFLWNMDKYTMIRKLEGHHHDVVACDFSPDGALLATASYDTRVYIWDPHNGDILMEFGHLFPPPTPIFAGGANDRWVRSVSFSHDGLHVASLADDKMVRFWRIDEDYPVQVAPLSNGLCCAFSTDGSVLAAGTHDGSVYFWATPRQVPSLQHLCRMSIRRVMPTQEVQELPIPSKLLEFLSYRI

SEQ ID NO: 14340 - protein, 247 aa, Homo sapiens
MASFPPRVNEKEIVRLRTIGELLAPAAPFDKKCGRENWTVAFAPDGSYFAWSQGHRTVKLVPWSQCLQNFLLHGTKNVTNSSSLRLPRQNSDGGQKNKPREHIIDCGDIVWSLAFGSSVPEKQSRCVNIEWHRFRFGQDQLLLATGLNNGRIKIWDVYTGKLLLNLVDHTEVVRDLTFAPDGSLILVSASRDKTLRVWDLKDDGNMMKVLRGHQNWVYSCAFSPDSSMLCSVGASKAVRVKVLVHSL

SEQ ID NO: 14341 - protein, 74 aa, Homo sapiens
MASFPPRVNEKEIVRLRTIGELLAPAAPFDKKCGRENWTVAFAPDGSYFAWSQGHRTVKLVPWSQCLQNLKTPP

SEQ ID NO: 14342 - protein, 459 aa, Homo sapiens
MAEQGRCCDLAALGEQGGAPPWEKSLGTYIGCFSDDGHERTLKGAVFYDLRKMTVSHCQDACAERSYVYAGLEAGAECYCGNRLPAVSVGLEECNHECKGEKGSVCGAVDRLSVYRVDELQPGSRKRRTATYRGCFRLPENITHAFPSSLIQANVTVGTCSGFCSQKEFPLAILRGWECYCAYPTPRFNLRDAMDSSVCGQDPEAQRLAEYCEVYQTPVQDTRCTDRRFLPNKSKVFVALSSFPGAGNTWARHLIEHATGFYTGSYYFDGTLYNKGFKGEKDHWRSRRTICVKTHESGRREIEMFDSAILLIRNPYRSLVAEFNRKCAGHLGYAADRNWKSKEWPDFVNSYASWWSSHVLDWLKYGKRLLVVHYEELRRSLVPTLREMVAFLNVSVSEERLLCVENNKEGSFRRRGRRSHDPEPFTPEMKDLINGYIRTVDQALRDHNWTGLPREYVPR

SEQ ID NO: 14343 - protein, 45 aa, Homo sapiens
MAKPFFRLQKFLRRTQFLLFFLTAAYLMTGSLLLLQRVRVALPQG

SEQ ID NO: 14344 - protein, 87 aa, Homo sapiens
MAKPFFRLQKFLRRTQFLLFFLTAAYLMTGSLLLLQRVRVALPQGPRAPGPLQTLPVAAVALGVGLLDSRALHDPRVSPELLLGVDM

SEQ ID NO: 14345 - protein, 181 aa, Homo sapiens
MAKPFFRLQKFLRRTQFLLFFLTAAYLMTGSLLLLQRVRVALPQGPRAPGPLQTLPVAAVALGVGLLDSRALHDPRVSPELLLGVDMLQSPLTRPRPGPRWLRSRNSELRQLRRRWFHHFMSDSQGPPALGPEAARPAIHSRGTYIGCFSDDGHERTLKGAVFYDLRKMTVSHCQDACAER

SEQ ID NO: 14346 - protein, 575 aa, Homo sapiens
MAKPFFRLQKFLRRTQFLLFFLTAAYLMTGSLLLLQRVRVALPQGPRAPGPLQTLPVAAVALGVGLLDSRALHDPRVSPELLLGVDMLQSPLTRPRPGPRWLRSRNSELRQLRRRWFHHFMSDSQGPPALGPEAARPAIHSRGTYIGCFSDDGHERTLKGAVFYDLRKMTVSHCQDACAERSYVYAGLEAGAECYCGNRLPAVSVGLEECNHECKGEKGSVCGAVDRLSVYRVDELQPGSRKRRTATYRGCFRLPENITHAFPSSLIQANVTVGTCSGFCSQKEFPLAILRGWECYCAYPTPRFNLRDAMDSSVCGQDPEAQRLAEYCEVYQTPVQDTRCTDRRFLPNKSKVFVALSSFPGAGNTWARHLIEHATGFYTGSYYFDGTLYNKGFKGEKDHWRSRRTICVKTHESGRREIEMFDSAILLIRNPYRSLVAEFNRKCAGHLGYAADRNWKSKEWPDFVNSYASWWSSHVLDWLKYGKRLLVVHYEELRRSLVPTLREMVAFLNVSVSEERLLCVENNKEGSFRRRGRRSHDPEPFTPEMKDLINGYIRTVDQALRDHNWTGLPREYVPR

SEQ ID NO: 14347 - protein, 575 aa, Homo sapiens; identical to SEQ ID NO: 14346

SEQ ID NO: 14348 - protein, 575 aa, Homo sapiens; identical to SEQ ID NO: 14346

SEQ ID NO: 14349 - protein, 575 aa, Homo sapiens; identical to SEQ ID NO: 14346

SEQ ID NO: 14350 - protein, 26 aa, Homo sapiens
MTVSHCQDACAERSYVYAGLEAGAEC

SEQ ID NO: 14351 - protein, 136 aa, Homo sapiens
  SITE 1: note = misc_feature - Xaa can be any naturally occurring amino acid
XGSLLLLQRVRVALPQGPRAPGPLQTLPVAAVALGVGLLDSRALHDPRVSPELLLGVDMLQSPLTRPRPGPRWLRSRNSELRQLRRRWFHHFMSDSQGPPALGPEAARPAIHSRGPMSTPAWRPGRSVTAGTGCQR

SEQ ID NO: 14352 - protein, 565 aa, Homo sapiens
MAKLWFKFQRYFRRKPVRFFTFLALYLTAGSLVFLHSGFVGQPAVSGNQANPAAAGGPAEGAELSFLGDMHLGRGFRDTGEASSIARRYGPWFKGKDGNERAKLGDYGGAWSRALKGRVVREKEEERAKYIGCYLDDTQSRALRGVSFFDYKKMTIFRCQDNCAERGYLYGGLEFGAECYCGHKIQATNVSEAECDMECKGERGSVCGGANRLSVYRLQLAQESARRYGSAVFRGCFRRPDNLSLALPVTAAMLNMSVDKCVDFCTEKEYPLAALAGTACHCGFPTTRFPLHDREDEQLCAQKCSAEEFESCGTPSYFIVYQTQVQDNRCMDRRFLPGKSKQLIALASFPGAGNTWARHLIELATGFYTGSYYFDGSLYNKGFKGERDHWRSGRTICIKTHESGQKEIEAFDAAILLIRNPYKALMAEFNRKYGGHIGFAAHAHWKGKEWPEFVRNYAPWWATHTLDWLKFGKKVLVVHFEDLKQDLFVQLGRMVSLLGVAVREDRLLCVESQKDGNFKRSGLRKLEYDPYTADMQKTISAYIKMVDAALKGRNLTGVPDDYYPR

SEQ ID NO: 14353 - protein, 565 aa, Homo sapiens; identical to SEQ ID NO: 14352

SEQ ID NO: 14354 - protein, 585 aa, Homo sapiens
MAKLWFKFQRYFRRKPVRFFTFLALYLTAGSLVFLHSGFVGQPAVSGNQANPAAAGGPAEGAELSFLGDMHLGRGFRDTGEASSIARRYGPWFKGKDGNERAKLGDYGGAWSRALKGRVVREKEEERAKYIGCYLDDTQSRALRGVSFFDYKKMTIFRCQDNCAERGYLYGGLEFGAECYCGHKIQATNVSEAECDMECKGERGSVCGGANRLSVYRLQLAQESARRYGSAVFRGCFRRPDNLSLALPVTAAMLNMSVDKCVDFCTEKEYPLAALAGTACHCGFPTTRFPLHDREDEQLCAQKCSAEEFESCGTPSYFIVYQTQVQDNRCMDRRFLPGKSKQLIALASFPGAGNTWARHLIELATGFYTGSYYFDGSLYNKGFKGERDHWRSGRTICIKTHESGQKEIEAFDAAILLIRNPYKALMAEFNRKYGGHIGFAAHAHWKGKGAVPGSLQILFRSICTASVGEWPEFVRNYAPWWATHTLDWLKFGKKVLVVHFEDLKQDLFVQLGRMVSLLGVAVREDRLLCVESQKDGNFKRSGLRKLEYDPYTADMQKTISAYIKMVDAALKGRNLTGVPDDYYPR

SEQ ID NO: 14355 - protein, 124 aa, Homo sapiens
MTIFRCQDNCAERGYLYGGLEFGAECYCGHKIQATNVSEAECDMECKGERGSVCGGANRLSVYRLQLAQESARRYGSAVFRGCFRRPDNLSLALPVTAAMLNMSVDKCVDFCTEKEYPLAALAG

SEQ ID NO: 14356 - protein, 114 aa, Homo sapiens
MRLLILALLGICSLTAYIVEGVGSEVSDKRTCVSLTTQRLPVSRIKTYTITEGSLRAVIFITKRGLKVCADPQATWVRDVVRSMDRKSNTRNNMIQTKPTGTQQSTNTAVTLTG

SEQ ID NO: 14357 - protein, 114 aa, Homo sapiens
MRLLILALLGICSLTAYIVEGVGSEVSHRRTCVSLTTQRLPVSRIKTYTITEGSLRAVIFITKRGLKVCADPQATWVRDVVRSMDRKSNTRNNMIQTKPTGTQQSTNTAVTLTG

SEQ ID NO: 14358 - protein, 674 aa, Homo sapiens
MARAHWGCCPWLVLLCACAWGHTKPVDLGGQDVRNCSTNPPYLPVTVVNTTMSLTALRQQMQTQNLSAYIIPGTDAHMNEYIGQHDERRAWITGFTGSAGTAVVTMKKAAVWTDSRYWTQAERQMDCNWELHKEVGTTPIVTWLLTEIPAGGRVGFDPFLLSIDTWESYDLALQGSNRQLVSITTNLVDLVWGSERPPVPNQPIYALQEAFTGSTWQEKVSGVRSQMQKHQKVPTAVLLSALEETAWLFNLRASDIPYNPFFYSYTLLTDSSIRLFANKSRFSSETLSYLNSSCTGPMCVQIEDYSQVRDSIQAYSLGDVRIWIGTSYTMYGIYEMIPKEKLVTDTYSPVMMTKAVKNSKEQALLKASHVRDAVAVIRYLVWLEKNVPKGTVDEFSGAEIVDKFRGEEQFSSGPSFETISASGLNAALAHYSPTKELNRKLSSDEMYLLDSGGQYWDGTTDITRTVHWGTPSAFQKEAYTRVLIGNIDLSRLIFPAATSGRMVEAFARRALWDAGLNYGHGTGHGIGNFLCVHEWPVGFQSNNIAMAKGMFTSIEPGYYKDGEFGIRLEDVALVVEAKTKYPGSYLTFEVVSFVPYDRNLIDVSLLSPEHLQYLNRYYQTIREKVGPELQRRQLLEEFEWLQQHTEPLAARAPDTASWASVLVVSTLAILGWSV

SEQ ID NO: 14359 - protein, 183 aa, Homo sapiens
MARAHWGCCPWLVLLCACAWGHTKPVDLGGQDVRNCSTNPPYLPVTVVNTTMSLTALRQQMQTQNLSAYIIPGTDAHMNEYIGQHDERRAWITGFTGSAGTAVVTMKKAAVWTDSRYWTQAERQMDCNWELHKEVGTTPIVTWLLTEIPAGGRVGFDPFLLSIGMLFLQSLNLSMLTRVTQLP

SEQ ID NO: 14360 - protein, 393 aa, Homo sapiens
MGLLRGGLPCARAMARLGAVRSHYCALLLAAALAVCAFYYLGSGRETFSSATKRLKEARAGAPAAPSPPALELARGSVAPAPGAKAKSLEGGGAGPVDYHLLMMFTKAEHNAALQAKARVALRSLLRLAKFEAHEVLNLHFVSEEASREVAKGLLRELLPPAAGFKCKVIFHDVAVLTDKLFPIVEAMQKHFSAGLGTYYSDSIFFLSVAMHQIMPKEILQIIQLDLDLKFKTNIRELFEEFDSFLPGAIIGIAREMQPVYRHTFWQFRHENPQTRVGGPPPEGLPGFNSGVMLLNLEAMRQSPLYSRLLEPAQVQQLADKYHFRGHLGDQDFFTMIGMEHPKLFHVLDCTWNRQLCTWWRDHGYSDVFEAYFRCEGHVKIYHGNCNTPIPED

SEQ ID NO: 14361 - protein, 187 aa, Homo sapiens
MNGMSVLMKETLKSSVTPSPYEETGERQPSVNWAVSPHQTQNQWARWSWTSQPLELHTFWQFRHENPQTRVGGPPPEGLPGFNSGVMLLNLEAMRQSPLYSRLLEPAQVQQLADKYHFRGHLGDQDFFTMIGMEHPKLFHVLDCTWNRQLCTWWRDHGYSDVFEAYFRCEGHVKIYHGNCNTPIPED

SEQ ID NO: 14362 - protein, 84 aa, Homo sapiens
MVRCVPSAVIVCFLRPPQPGRTVIFHDVAVLTDKLFPIVEAMQKHFSAGLGTYYSDSIFFLSVAMHQIMPKECTPLVQGRTSCT

SEQ ID NO: 14363 - protein, 247 aa, Homo sapiens
MVRCVPSAVIVCFLRPPQPGRTVIFHDVAVLTDKLFPIVEAMQKHFSAGLGTYYSDSIFFLSVAMHQIMPKEILQIIQLDLDLKFKTNIRELFEEFDSFLPGAIIGIAREMQPVYRHTFWQFRHENPQTRVGGPPPEGLPGFNSGVMLLNLEAMRQSPLYSRLLEPAQVQQLADKYHFRGHLGDQDFFTMIGMEHPKLFHVLDCTWNRQLCTWWRDHGYSDVFEAYFRCEGHVKIYHGNCNTPIPED

SEQ ID NO: 14364 - protein, 190 aa, Homo sapiens
MWPPRCKDPGRQSAEILQIIQLDLDLKFKTNIRELFEEFDSFLPGAIIGIAREMQPVYRHTFWQFRHENPQTRVGGPPPEGLPGFNSGVMLLNLEAMRQSPLYSRLLEPAQVQQLADKYHFRGHLGDQDFFTMIGMEHPKLFHVLDCTWNRQLCTWWRDHGYSDVFEAYFRCEGHVKIYHGNCNTPIPED

SEQ ID NO: 14365 - protein, 114 aa, Homo sapiens
  SITE 1: note = misc_feature - Xaa can be any naturally occurring amino acid
XSPPALELARGSVAPAPGAKAKSLEGGGAGPVDYHLLMMFTKAEHNAALQAKARVALRSLLRLAKFEAHEVLNLHFVSEEASREVAKGLLRELLPPAAGFKCKFLTSEDGTGHQ

SEQ ID NO: 14366 - protein, 959 aa, Homo sapiens
MVAAPCARRLARRSHSALLAALTVLLLQTLVVWNFSSLDSGAGERRGGAAVGGGEQPPPAPAPRRERRDLPAEPAAARGGGGGGGGGGGGRGPQARARGGGPGEPRGQQPASRGALPARALDPHPSPLITLETQDGYFSHRPKEKVRTDSNNENSVPKDFENVDNSNFAPRTQKQKHQPELAKKPPSRQKELLKRKLEQQEKGKGHTFPGKGPGEVLPPGDRAAANSSHGKDVSRPPHARKTGGSSPETKYDQPPKCDISGKEAISALSRAKSKHCRQEIGETYCRHKLGLLMPEKVTRFCPLEGKANKNVQWDEDSVEYMPANPVRIAFVLVVHGRASRQLQRMFKAIYHKDHFYYIHVDKRSNYLHRQVLQVSRQYSNVRVTPWRMATIWGGASLLSTYLQSMRDLLEMTDWPWDFFINLSAADYPIRTNDQLVAFLSRYRDMNFLKSHGRDNARFIRKQGLDRLFLECDAHMWRLGDRRIPEGIAVDGGSDWFLLNRRFVEYVTFSTDDLVTKMKQFYSYTLLPAESFFHTVLENSPHCDTMVDNNLRITNWNRKLGCKCQYKHIVDWCGCSPNDFKPQDFHRFQQTARPTFFARKFEAVVNQEIIGQLDYYLYGNYPAGTPGLRSYWENVYDEPDGIHSLSDVTLTLYHSFARLGLRRAETSLHTDGENSCRYYPMGHPASVHLYFLADRFQGFLIKHHATNLAVSKLETLETWVMPKKVFKIASPPSDFGRLQFSEVGTDWDAKERLFRNFGGLLGPMDEPVGMQKWGKGPNVTVTVIWVDPVNVIAATYDILIESTAEFTHYKPPLNLPLRPGVWTVKILHHWVPVAETKFLVAPLTFSNRQPIKPEEALKLHNGPLRNAYMEQSFQSLNPVLSLPINPAQVEQARRNAASTGTALEGWLDSLVGGMWTAMDICATGPTACPVMQTCSQTAWSSFSPDPKSELGAVKPDGRLR

SEQ ID NO: 14367 - protein, 117 aa, Homo sapiens
CQYKHIVDWCGCSPNDFKPQDFLRLQQVSRPTFFARKFESTVNQEVLEILDFHLYGSYPPGTPALKAYWENTYDAADGPSGLSDVMLTAYTAFARLSLHHAATAAPPMGTPLCRATW

SEQ ID NO: 14368 - protein, 46 aa, Homo sapiens
ETLEMWLMPQGSLKLLGRSDQASRLQSLEVGQVPHLLSPNPHPDLG

SEQ ID NO: 14369 - protein, 45 aa, Homo sapiens
MVASARVQKLVRRYKLAIATALAILLLQGLKGRQRKPRPLDPGEG

SEQ ID NO: 14370 - protein, 865 aa, Homo sapiens [sequence omitted]

SEQ ID NO: 14371 - protein, 639 aa, Homo sapiens
MVASARVQKLVRRYKLAIATALAILLLQGLVVWSFSGLEEDEAGEKGRQRKPRPLDPGEGSKDTDSSAGRRGSTGRRHGRWRGRAESPGVPVAKVVRAVTSRQRASRRVPPAPPPEAPGRQNLSGAAAGEALVGAAGFPPHGDTGSVEGAPQPTDNGFTPKCEIVGKDALSALARASTKQCQQEIANVVCLHQAGSLMPKAVPRHCQLTGKMSPGIQWDESQAQQPMDGPPVRIAYMLVVHGRAIRQLKRLLKAVYHEQHFFYIHVDKRSDYLHREVVELAQGYDNVRVTPWRMVTIWGGASLLRMYLRSMRDLLEVPGWAWDFFINLSATDYPTRTNEELVAFLSKNRDKNFLKSHGRDNSRFIKKQGLDRLFHECDSHMWRLGERQIPAGIVVDGGSDWFVLTRSFVEYVVYTDDPLVAQLRQFYTYTLLPAESFFHTVLENSLACETLVDNNLRVTNWNRKLGCKCQYKHIVDWCGCSPNDFKPQDFLRLQQVSRPTFFARKFESTVNQEVLEILDFHLYGSYPPGTPALKAYWENTYDAADGPSGLSDVMLTAYTAFARLSLHHAATAAPPMGTPLCRLALIGTPKSVFSGTLGGYWGRWTSLWPCSAGPGAPTSQPQWSGSTQPMWWPHLMTSQ

SEQ ID NO: 14372 - protein, 676 aa, Homo sapiens
MVASARVQKLVRRYKLAIATALAILLLQGLVVWSFSGLEEDEAGEKGRQRKPRPLDPGEGSKDTDSSAGRRGSTGRRHGRWRGRAESPGVPVAKVVRAVTSRQRASRRVPPAPPPEAPGRQNLSGAAAGEALVGAAGFPPHGDTGSVEGAPQPTDNGFTPKCEIVGKDALSALARASTKQCQQEIANVVCLHQAGSLMPKAVPRHCQLTGKMSPGIQWDESQAQQPMDGPPVRIAYMLVVHGRAIRQLKRLLKAVYHEQHFFYIHVDKRSDYLHREVVELAQGYDNVRVTPWRMVTIWGGASLLRMYLRSMRDLLEVPGWAWDFFINLSATDYPTRTNEELVAFLSKNRDKNFLKSHGRDNSRFIKKQGLDRLFHECDSHMWRLGERQIPAGIVVDGGSDWFVLTRSFVEYVVYTDDPLVAQLRQFYTYTLLPAESFFHTVLENSLACETLVDNNLRVTNWNRKLGCKCQYKHIVDWCGCSPNDFKPQDFLRLQQVSRPTFFARKFESTVNQEVLEILDFHLYGSYPPGTPALKAYWENTYDAADGPSGLSDVMLTAYTAFARLSLHHAATAAPPMGTPLCRFEPRGLPSSVHLYFYDDHFQGYLVTQAVQPSAQGPAETLEMWLMPQGSLKLLGRSDQASRLQSLENRGLSMLPRLVSNSWPQAVLPLQPPKALG

SEQ ID NO: 14373 - protein, 252 aa, Homo sapiens
MSSEVSARRDAKKLVRSPSGLRMVPEHRAFGSPFGLEEPQWVPDKECRRCMQCDAKFDFLTRKHHCRRCGKCFCDRCCSQKVPLRRMCFVDPVRQCAECALVSLKEAEFYDKQLKVLLSGATFLVTFGNSEKPETMTCRLSNNQRYLFLDGDSHYEIEIVHISTVQILTEGFPPGEKDIHAYTSLRGSQPASEGGNARATGMFLQYTVPGTEGVTQLKLTVVEDVTVGRRQAVAWLVAMHKAAKLLYESRDQ

SEQ ID NO: 14374 - protein, 234 aa, Homo sapiens
MSSEVSARRDAKKLVRSPSGLRMVPEHRAFGSPFGLEEPQWVPDKECRRCMQCDAKFDFLTRKHHCRRCGKCFCDRCCSQKVPLRRMCFVDPVRQCAECALVSLKEAEFYDKQLKVLLSGATFLVTFGNSEKPETMTCRLSNNQRYLFLDGDSHYEIEIVHISTVQILTEGFPPGGGNARATGMFLQYTVPGTEGVTQLKLTVVEDVTVGRRQAVAWLVAMHKAAKLLYESRDQ

SEQ ID NO: 14375 - protein, 93 aa, Homo sapiens
MSSEVSARRDAKKLVRSPSGLRMVPEHRAFGSPFGLEEPQWVPDKECRRCMQCDAKFDFLTRKVRRIPAAWWGAQGLATGGARVQRPAQGPRV

SEQ ID NO: 14376 - protein, 62 aa, Homo sapiens
MSSEVSARRDAKKLVRSPSGLRMVPEHRAFGSPFGLEEPQWVPDKEEPPSSSRLETQRNLKL

SEQ ID NO: 14377 - protein, 115 aa, Homo sapiens
  SITE 1: note = misc_feature - Xaa can be any naturally occurring amino acid
XKVLLSGATFLVTFGNSEKPETMTCRLSNNQRYLFLDGDSHYEIEIVHISTVQILTEGFPPGEKDIHAYTSLRGSQPASEGQPLPPHRGSPHAAGPFLPSPPGFCPRGGPCQGSL

SEQ ID NO: 14378 - protein, 167 aa, Homo sapiens
MLTVALLALLCASASGNAIQARSSSYSGEYGGGGGKRFSHSGNQLDGPITALRVRVNTYYIVGLQVRYGKVWSDYVGGRNGDLEEIFLHPGESVIQVSGKYKWYLKKLVFVTDKGRYLSFGKDSGTSFNAVPLHPNTVLRFISGRSGSLIDAIGLHWDVYPSSCSRC

SEQ ID NO: 14379 - protein, 208 aa, Homo sapiens
MGAQGAQESIKAMWRVPGTTRRPVTGESPGMHRPEAMLLLLTLALLGGPTWAGKMYGPGGGKYFSTTEDYDHEITGLRVSVGLLLVKSVQVKLGDSWDVKLGALGGNTQEVTLQPGEYITKVFVAFQAFLRGMVMYTSKDRYFYFGKLDGQISSAYPSQEGQVLVGIYGQYQLLGIKSIGFEWNYPLEEPTTEPPVNLTYSANSPVGR

SEQ ID NO: 14380 - protein, 178 aa, Homo sapiens
MHRPEAMLLLLTLALLGGPTWAGKMYGPGGGKYFSTTEDYDHEITGLRVSVGLLLVKSVQVKLGDSWDVKLGALGGNTQEVTLQPGEYITKVFVAFQAFLRGMVMYTSKDRYFYFGKLDGQISSAYPSQEGQVLVGIYGQYQLLGIKSIGFEWNYPLEEPTTEPPVNLTYSANSPVGR

SEQ ID NO: 14381 - protein, 95 aa, Homo sapiens
  SITE 1: note = misc_feature - Xaa can be any naturally occurring amino acid
XAQGAQESIKAMWRVPGTTRRPVTGESPGMHRPEAMLLLLTLALLGGPTWAGKMYGPGGGKYFSTTEDYDHEITGLRVSVGLLLVKRFLEGVIYE

SEQ ID NO: 14382 - protein, 69 aa, Homo sapiens
  SITE 1: note = misc_feature - Xaa can be any naturally occurring amino acid
XRRPVTGESPGMHRPEAMLLLLTLALLGGPTWAGKMYGPGGGKYFSTTEDYDHEITGLRVSVGLLLVKR

SEQ ID NO: 14383 - protein, 372 aa, Homo sapiens
MNGPCQSLRKAEGLLEGCTSAVTVFRKLPLDSKAQSQKMRYKTSLVMRKRLRLYRNTLKESSSSSGHHGPQLTAASSPSVFPGLHEEPPQASPSRPLNGLLRLGLPGDMYARPEPFPPGPAARSDALAAAAALHGYGGMNLTVNLAAPHGPGAFFRYMRQPIKQELICKWLAADGTATPSLCSKTFSTMHELVTHVTVEHVGGPEQANHICFWEECPRQGKPFKAKYKLVNHIRVHTGEKPFPCPFPGCGKVFARSENLKIHKRTHTGEKPFRCEFEGCERRFANSSDRKKHSHVHTSDKPYTCKVRGCDKCYTHPSSLRKHMKVHGRSPPPSSGYDSATPSALVSPSSDCGHKSQVASSAAVAARTADLSE

SEQ ID NO: 14384 - protein, 384 aa, Homo sapiens
MPPFCRNAKLGLLSFLICAGRSLLPLGKNAFWLERIENNNTLWEKAQSQKMRYKTSLVMRKRLRLYRNTLKESSSSSGHHGPQLTAASSPSVFPGLHEEPPQASPSRPLNGLLRLGLPGDMYARPEPFPPGPAARSDALAAAAALHGYGGMNLTVNLAAPHGPGAFFRYMRQPIKQELICKWLAADGTATPSLCSKTFSTMHELVTHVTVEHVGGPEQANHICFWEECPRQGKPFKAKYKLVNHIRVHTGEKPFPCPFPGCGKVFARSENLKIHKRTHTGEKPFRCEFEGCERRFANSSDRKKHSHVHTSDKPYTCKVRGCDKCYTHPSSLRKHMKVHGRSPPPSSGYDSATPSALVSPSSDCGHKSQVASSAAVAARTADLSE

SEQ ID NO: 14385 - protein, 128 aa, Homo sapiens
MRYKTSLVMRKRLRLYRNTLKESSEKPFRCEFEGCERRFANSSDRKKHSHVHTSDKPYTCKVRGCDKCYTHPSSLRKHMKVHGRSPPPSSGYDSATPSALVSPSSDCGHKSQVASSAAVAARTADLSE

SEQ ID NO: 14386 - protein, 68 aa, Homo sapiens
MRYKTSLVMRKRLRLYRNTLKESSSSSGHHGPQLTAASSPSVFPGLHEEPPQASPSRPLNGLLRLGLP

SEQ ID NO: 14387 - protein, 77 aa, Homo sapiens
MRYKTSLVMRKRLRLYRNTLKESSSSSGHHGPQLTAASSPSVFPGLHEEPPQASPSRPLNGLLRLGLPGDMYARPEP

SEQ ID NO: 14388 - protein, 229 aa, Homo sapiens
MRYKTSLVMRKRLRLYRNTLKESSSSSGHHGPQLTAASSPSVFPGLHEEPPQASPSRPLNGLLRLGLPGDMYARPEPFPPGPAARSDALAAAAALHGYGGMNLTVNLAAPHGPGAFFRYMRQPIKQELICKWLAADGTATPSLCSKTFSTMHELVTHVTVEHVGGPEQANHICFWEECPRQGKPFKAKYKLVNHIRVHTGEKPFPCPFPGCGKVFARSENLKIHKRTHT

SEQ ID NO: 14389 - protein, 334 aa, Homo sapiens
MRYKTSLVMRKRLRLYRNTLKESSSSSGHHGPQLTAASSPSVFPGLHEEPPQASPSRPLNGLLRLGLPGDMYARPEPFPPGPAARSDALAAAAALHGYGGMNLTVNLAAPHGPGAFFRYMRQPIKQELICKWLAADGTATPSLCSKTFSTMHELVTHVTVEHVGGPEQANHICFWEECPRQGKPFKAKYKLVNHIRVHTGEKPFPCPFPGCGKVFARSENLKIHKRTHTGEKPFRCEFEGCERRFANSSDRKKHSHVHTSDKPYTCKVRGCDKCYTHPSSLRKHMKVHGRSPPPSSGYDSATPSALVSPSSDCGHKSQVASSAAVAARTADLSE

SEQ ID NO: 14390 - protein, 334 aa, Homo sapiens; identical to SEQ ID NO: 14389

SEQ ID NO: 14391 - protein, 334 aa, Homo sapiens; identical to SEQ ID NO: 14389

SEQ ID NO: 14392 - protein, 497 aa, Homo sapiens
MAMSSLGCLCALTVLIRYCNRDFDDEKILIQHQKAKHFKCHICHKKLYTGPGLAIHCMQVHKETIDAVPNAIPGRTDIELEIYGMEGIPEKDMDERRRLLEQKTQESQKKKQQDDSDEYDDDDSAASTSFQPQPVQPQQGYIPPMAQPGLPPVPGAPGMPPGIPPLMPGVPPLMPGMPPVMPGMPPGLHHQRKYTQSFCGENIMMPMGGMMPPGPGIPPLMPGMPPGMPPPVPRPGIPPMTQAQAVSAPGILNRPPAPTATVPAPQPPVTKPLFPSAGQMGTPVTSSSTASSNSESLSASSKALFPSTAQAQAAVQGPVGTDFKPLNSTPATTTEPPKPTFPAYTQSTASTTSTTNSTAAKPAASITSKPATLTTTSATSKLIHPDEDISLEERRAQLPKYQRNLPRPGQAPIGNPPVGPIGGMMPPQPGIPQQQGMRPPMPPHGQYGGHHQGMPGYLPGAMPPYGQGPPMVPPYQGGPPRPPMGMRPPVMSQGGRY

SEQ ID NO: 14393 - protein, 494 aa, Homo sapiens
MGRKKKKQLKPWCWYCNRDFDDEKILIQHQKAKHFKCHICHKKLYTGPGLAIHCMQVHKETIDAVPNAIPGRTDIELEIYGMEGIPEKDMDERRRLLEQKTQESQKKKQQDDSDEYDDDDSAASTSFQPQPVQPQQGYIPPMAQPGLPPVPGAPGMPPGIPPLMPGVPPLMPGMPPVMPGMPPGLHHQRKYTQSFCGENIMMPMGGMMPPGPGIPPLMPGMPPGMPPPVPRPGIPPMTQAQAVSAPGILNRPPAPTATVPAPQPPVTKPLFPSAGQMGTPVTSSSTASSNSESLSASSKALFPSTAQAQAAVQGPVGTDFKPLNSTPATTTEPPKPTFPAYTQSTASTTSTTNSTAAKPAASITSKPATLTTTSATSKLIHPDEDISLEERRAQLPKYQRNLPRPGQAPIGNPPVGPIGGMMPPQPGIPQQQGMRPPMPPHGQYGGHHQGMPGYLPGAMPPYGQGPPMVPPYQGGPPRPPMGMRPPVMSQGGRY

SEQ ID NO: 14394 - protein, 463 aa, Homo sapiens
MGRKKKKQLKPWCWYCNRDFDDEKILIQHQKAKHFKCHICHKKLYTGPGLAIHCMQVHKETIDAVPNAIPGRTDIELEIYGMEGIPEKDMDERRRLLEQKTQESQKKKQQDDSDEYDDDDSAASTSFQPQPVQPQQGYIPPMAQPGLPPVPGAPGMPPGIPPLMPGVPPLMPGMPPVMPGMPPGLHHQRKYTQSFCGENIMMPMGGMMPPGPGIPPLMPGMPPGMPPPVPRPGIPPMTQAQAVSAPGILNRPPAPTATVPAPQPPVTKPLFPSAGQAQAAVQGPVGTDFKPLNSTPATTTEPPKPTFPAYTQSTASTTSTTNSTAAKPAASITSKPATLTTTSATSKLIHPDEDISLEERRAQLPKYQRNLPRPGQAPIGNPPVGPIGGMMPPQPGIPQQQGMRPPMPPHGQYGGHHQGMPGYLPGAMPPYGQGPPMVPPYQGGPPRPPMGMRPPVMSQGGRY

SEQ ID NO: 14395 - protein, 493 aa, Homo sapiens
MGRKKKKQLKPWCWYCNRDFDDEKILIQHQKAKHFKCHICHKKLYTGPGLAIHCMQVHKETIDAVPNAIPGRTDIELEIYGMEGIPEKDMDERRRLLEQKTQESQKKKQQDDSDEYDDDDSAASTSFQPQPVQPQQGYIPPMAQPGLPPVPGAPGMPPGIPPLMPGVPPLMPGMPPVMPGMPPGLHHQRKYTQSFCGENIMMPMGGMMPPGPGIPPLMPGMPPGMPPPVPRPGIPPMTQAQAVSAPGILNRPPAPTATVPAPQPPVTKPLFPSAGQMGTPVTSSSTASSNSESLSASSKALFPSTAQAQAAVQGPVGTDFKPLNSTPATTTEPPKPTFPAYTQSTASTTSTTNSTAAKPAASITSKPATLTTTSATSKLIHPDEDISLEERRAQLPKYQRNLPRPGQAPIGNPPVGPIGGMMPPQPGIPQQQGMRPPMPPHGQYGGHHQGMPGYLPGAMPPYGQGPPMVPPYQGGPPRPPMGMRPPVMSQALP

SEQ ID NO: 14396 - protein, 478 aa, Homo sapiens
MGRKKKKQLKPWCWYCNRDFDDEKILIQHQKAKHFKCHICHKKLYTGPGLAIHCMQVHKETIDAVPNAIPGRTDIELEIYGMEGIPEKDMDERRRLLEQKTQESQKKKQQDDSDEYDDDDSAASTSFQPQPVQPQQGYIPPMAQPGLPPVPGAPGMPPGIPPLMPGVPPLMPGMPPVMPGMPPGMMPMGGMMPPGPGIPPLMPGMPPGMPPPVPRPGIPPMTQAQAVSAPGILNRPPAPTATVPAPQPPVTKPLFPSAGQMGTPVTSSSTASSNSESLSASSKALFPSTAQAQAAVQGPVGTDFKPLNSTPATTTEPPKPTFPAYTQSTASTTSTTNSTAAKPAASITSKPATLTTTSATSKLIHPDEDISLEERRAQLPKYQRNLPRPGQAPIGNPPVGPIGGMMPPQPGIPQQQGMRPPMPPHGQYGGHHQGMPGYLPGAMPPYGQGPPMVPPYQGGPPRPPMGMRPPVMSQGGRY

SEQ ID NO: 14397 - protein, 46 aa, Homo sapiens
MQVHKETIDAVPNAIPGRTDIELEIYGMEGIPEKDMDERRRLLEQK

SEQ ID NO: 14398 - protein, 74 aa, Homo sapiens
MQVHKETIDAVPNAIPGRTDIELEIYGMEGIPEKDMDERRRLLEQKTQESQKKKQQDDSDEYDDDDSAASTSFQ

SEQ ID NO: 14399 - protein, 93 aa, Homo sapiens
MQVHKETIDAVPNAIPGRTDIELEIYGMEGIPEKDMDERRRLLEQKTQESQKKKQQDDSDEYDDDDSAASTSFQPQPVQPQQGYIPPMAQPGL

SEQ ID NO: 14400 - protein, 96 aa, Homo sapiens
MQVHKETIDAVPNAIPGRTDIELEIYGMEGIPEKDMDERRRLLEQKTQESQKKKQQDDSDEYDDDDSAASTSFQPQPVQPQQGYIPPMAQPGLPPV

SEQ ID NO: 14401 - protein, 198 aa, Homo sapiens
MQVHKETIDAVPNAIPGRTDIELEIYGMEGIPEKDMDERRRLLEQKTQESQKKKQQDDSDEYDDDDSAASTSFQPQPVQPQQGYIPPMAQPGLPPVPGAPGMPPGIPPLMPGVPPLMPGMPPVMPGMPPGLHHQRKYTQSFCGENIMMPMGGMMPPGPGIPPLMPGMPPGMPPPVPRPGIPPMTQAQAVSAPGILNRP

SEQ ID NO: 14402 - protein, 341 aa, Homo sapiens
  SITE 1: note = misc_feature - Xaa can be any naturally occurring amino acid
XGMPPGIPPLMPGVPPLMPGMPPVMPGMPPGLHHQRKYTQSFCGENIMMPMGGMMPPGPGIPPLMPGMPPGMPPPVPRPGIPPMTQAQAVSAPGILNRPPAPTATVPAPQPPVTKPLFPSAGQMGTPVTSSSTASSNSESLSASSKALFPSTAQAQAAVQGPVGTDFKPLNSTPATTTEPPKPTFPAYTQSTASTTSTTNSTAAKPAASITSKPATLTTTSATSKLIHPDEDISLEERRAQLPKYQRNLPRPGQAPIGNPPVGPIGGMMPPQPGIPQQQGMRPPMPPHGQYGGHHQGMPGYLPGAMPPYGQGPPMVPPYQGGPPRPPMGMRPPVMSQGGRY

SEQ ID NO: 14403 - protein, 80 aa, Homo sapiens
MATSFRTASCWGLLSFKDISMEFTWDEWQLLDSTQKYLYRDVILENYHNLISVDGWEEWYQNNQDELESIERSYACSVLG

SEQ ID NO: 14404 - protein, 533 aa, Homo sapiens
MATSFRTASCWGLLSFKDISMEFTWDEWQLLDSTQKYLYRDVILENYHNLISVGYHGTKPDLIFKLEQGEDPWIINAKISRQSCPDGWEEWYQNNQDELESIERSYACSVLGRLNLSKTHDSSRQRLYNTRGKSLTQNSAPSRSYLRKNPDKFHGYEEPYFLKHQRAHSIEKNCVCSECGKAFRCKSQLIVHLRIHTGERPYECSKCERAFSAKSNLNAHQRVHTGEKPYSCSECEKVFSFRSQLIVHQEIHTGGKPYGCSECGKAYSWKSQLLLHQRSHTGVKPYECSECGKAFSLKSPFVVHQRTHTGVKPHKCSECGKAFRSKSYLLVHIRMHTGEKPYQCSDCGKAFNMKTQLIVHQGVHTGNNPYQCGECGKAFGRKEQLTAHLRAHAGEKPYGCSECGKAFSSKSYLVIHRRTHTGERPYECSLCERAFCGKSQLIIHQRTHSTEKPYECNECEKAYPRKASLQIHQKTHSGEKPFKCSECGKAFTQKSSLSEHQRVHTGEKPWKCSECGKSFCWNSGLRIHRKTHK

SEQ ID NO: 14405 - protein, 153 aa, Homo sapiens
MATSFRTASCWVVLLRRSLLMSSSVKFGNLLGVPWAQGNSALPEGLLSFKDISMEFTWDEWQLLDSTQKYLYRDVILENYHNLISVGYHGTKPDLIFKLEQGEDPWIINAKISRQSCPDGWEEWYQNNQDELESIERSYACSVLGRLNLSKTH

SEQ ID NO: 14406 - protein, 513 aa, Homo sapiens
MEFTWDEWQLLDSTQKYLYRDVILENYHNLISVGYHGTKPDLIFKLEQGEDPWIINAKISRQSCPDGWEEWYQNNQDELESIERSYACSVLGRLNLSKTHDSSRQRLYNTRGKSLTQNSAPSRSYLRKNPDKFHGYEEPYFLKHQRAHSIEKNCVCSECGKAFRCKSQLIVHLRIHTGERPYECSKCERAFSAKSNLNAHQRVHTGEKPYSCSECEKVFSFRSQLIVHQEIHTGGKPYGCSECGKAYSWKSQLLLHQRSHTGVKPYECSECGKAFSLKSPFVVHQRTHTGVKPHKCSECGKAFRSKSYLLVHIRMHTGEKPYQCSDCGKAFNMKTQLIVHQGVHTGNNPYQCGECGKAFGRKEQLTAHLRAHAGEKPYGCSECGKAFSSKSYLVIHRRTHTGERPYECSLCERAFCGKSQLIIHQRTHSTEKPYECNECEKAYPRKASLQIHQKTHSGEKPFKCSECGKAFTQKSSLSEHQRVHTGEKPWKCSECGKSFCWNSGLRIHRKTHK

SEQ ID NO: 14407 - protein, 264 aa, Homo sapiens
MAALFLSAPPQAEVTFEDVAVYLSREEWGRLGPAQRGLYRDVMLETYGNLVSLALGTRTEYKELTSQETFGEEDPQGSEPVEACDHISKSEGSLEKLVEQRGPRAVTLTNGESSRESGGNLRLLSRPVPDQRPHKCDICEQSFEQRSYLNNHKRVHRSKKTNTVRNSGEIFSANLVVKEDQKIPTGKKLHYCSYCGKTFRYSANLVKHQRLHTEEKPYKCDECGKAFSQSCEFINHRRMHSGEIPYRCDECGKTFTRRPNLMKH

SEQ ID NO: 14408 - protein, 539 aa, Homo sapiens
MAALFLSAPPQAEVTFEDVAVYLSREEWGRLGPAQRGLYRDVMLETYGNLVSLGVGPAGPKPGVISQLERGDEPWVLDVQGTSGKEHLRVNSPALGTRTEYKELTSQETFGEEDPQGSEPVEACDHISKSEGSLEKLVEQRGPRAVTLTNGESSRESGGNLRLLSRPVPDQRPHKCDICEQSFEQRSYLNNHKRVHRSKKTNTVRNSGEIFSANLVVKEDQKIPTGKKLHYCSYCGKTFRYSANLVKHQRLHTEEKPYKCDECGKAFSQSCEFINHRRMHSGEIPYRCDECGKTFTRRPNLMKHQRIHTGEKPYKCGECGKHFSAYSSLIYHQRIHTGEKPYKCNDCGKAFSDGSILIRHRRTHTGEKPFECKECGKGFTQSSNLIQHQRIHTGEKPYKCNECEKAFIQKTKLVEHQRSHTGEKPYECNDCGKVFSQSTHLIQHQRIHTGEKPYKCSECGKAFHNSSRLIHHQRLHHGEKPYRCSDCKKAFSQSTYLIQHRRIHTGEKPYKCSECGKAFRHSSNMCQHQRIHLREDFSM

SEQ ID NO: 14409 - protein, 158 aa, Homo sapiens
MLLLLSDQLLLTALRKPNPQAMAALFLSAPPQAEVTFEDVAVYLSREEWGRLGPAQRGLYRDVMLETYGNLVSLALGTRTEYKELTSQETFGEEDPQGSEPVEACDHISKSEGSLEKLVEQRGPRAVTLTNGESSRESGGNLRLLSRPVPDQRPHKCD

SEQ ID NO: 14410 - protein, 560 aa, Homo sapiens
MLLLLSDQLLLTALRKPNPQAMAALFLSAPPQAEVTFEDVAVYLSREEWGRLGPAQRGLYRDVMLETYGNLVSLGVGPAGPKPGVISQLERGDEPWVLDVQGTSGKEHLRVNSPALGTRTEYKELTSQETFGEEDPQGSEPVEACDHISKSEGSLEKLVEQRGPRAVTLTNGESSRESGGNLRLLSRPVPDQRPHKCDICEQSFEQRSYLNNHKRVHRSKKTNTVRNSGEIFSANLVVKEDQKIPTGKKLHYCSYCGKTFRYSANLVKHQRLHTEEKPYKCDECGKAFSQSCEFINHRRMHSGEIPYRCDECGKTFTRRPNLMKHQRIHTGEKPYKCGECGKHFSAYSSLIYHQRIHTGEKPYKCNDCGKAFSDGSILIRHRRTHTGEKPFECKECGKGFTQSSNLIQHQRIHTGEKPYKCNECEKAFIQKTKLVEHQRSHTGEKPYECNDCGKVFSQSTHLIQHQRIHTGEKPYKCSECGKAFHNSSRLIHHQRLHHGEKPYRCSDCKKAFSQSTYLIQHRRIHTGEKPYKCSECGKAFRHSSNMCQHQRIHLREDFSM

SEQ ID NO: 14411 - protein, 464 aa, Homo sapiens
MAAAALRDPAQGYVTFEDVAVYFSQEEWRLLDDAQRLLYRNVMLENFTLLASLGCWHGAEAEEAPEQIASVGLLSSNIQQHQKQHCGEKPLKRQEGRVPVLRSCKVHLSEKSLQSREVGKALLISSGVLKHQVTHTGEKSHRSSKSREAFHAGKRHYKCSECGKAFGQKYLLVQHQRLHAGKKTYECSECGKLFRDMSNLFIHQIVHTGERPYGCSNCGKSFSRNAHLIEHQRVHTGEKPFTCSECGKAFRHNSTLVQHHKIHTGVRPYECSECGKLFSFNSSLMKHQRIHTGERPYKCSECGKFYSHKSNLIKHWRVHTGERPYKCSDCGKFFTQCSSLMQHQKVHTGEKPFKCNECGRFFRENSTLVRHQRVHTGAKPYECRECGKFFSQSSTLMQHRKVHIGEKPFKCNECGRLFRENSSLVKHQRVHTGAKPYECRECGKFFRHNSSLFKHRRIHTGEMQ

SEQ ID NO: 14412 - protein, 113 aa, Homo sapiens
MAAAALRDPAQGYVTFEDVAVYFSQEEWRLLDDAQRLLYRNVMLENFTLLASLGKVLTPHPSILSWARLFLLFLGRGLFFPKLNCGHSFLLQYPEVAIVIGLGCVYYHLLSPS

SEQ ID NO: 14413 - protein, 497 aa, Homo sapiens
MAAAALRDPAQGYVTFEDVAVYFSQEEWRLLDDAQRLLYRNVMLENFTLLASLGLASSKTHEITQLESWEEPFMPAWEVVTSAIPRGCWHGAEAEEAPEQIASVGLLSSNIQQHQKQHCGEKPLKRQEGRVPVLRSCKVHLSEKSLQSREVGKALLISSGVLKHQVTHTGEKSHRSSKSREAFHAGKRHYKCSECGKAFGQKYLLVQHQRLHAGKKTYECSECGKLFRDMSNLFIHQIVHTGERPYGCSNCGKSFSRNAHLIEHQRVHTGEKPFTCSECGKAFRHNSTLVQHHKIHTGVRPYECSECGKLFSFNSSLMKHQRIHTGERPYKCSECGKFYSHKSNLIKHWRVHTGERPYKCSDCGKFFTQCSSLMQHQKVHTGEKPFKCNECGRFFRENSTLVRHQRVHTGAKPYECRECGKFFSQSSTLMQHRKVHIGEKPFKCNECGRLFRENSSLVKHQRVHTGAKPYECRECGKFFRHNSSLFKHRRIHTGEMQ

SEQ ID NO: 14414 - protein, 121 aa, Homo sapiens
MAAAALRDPAQQGYVTFEDVAVYFSQEEWRLLDDAQRLLYRNVMLENFTLLASLGCWHGAEAEEAPEQIASVGLLSSNIQQHQKQHCGEKPLKRQEGRVPVLRSCKVHLSEKSLQSREVGK

SEQ ID NO: 14415 - protein, 442 aa, Homo sapiens
MAAAALRDPAQQGYVTFEDVAVYFSQEEWRLLDDAQRLLYRNVMLENFTLLASLGLASSKTHEITQLESWEEPFMPAWEVVTSAIPRGCWHGAEAEEAPEQIASVGLLSSNIQQHQKQHCGEKPLKRQEGRVPVLRSCKVHLSEKSLQSREVGKALLISSGVLKHQVTHTGEKSHRSSKSREAFHAGKRHYKCSECGKAFGQKYLLVQHQRLHAGKKTYECSECGKLFRDMSNLFIHQIVHTGERPYGCSNCGKSFSRNAHLIEHQRVHTGEKPFTCSECGKAFRHNSTLVQHHKIHTGVRPYECSECGKLFSFNSSLMKHQRIHTGERPYKCSECGKFYSHKSNLIKHWRVHTGERPYKCSDCGKFFTQCSSLMQHQKVHTGEKPFKCNECGRFFRENSSLVKHQRVHTGAKPYECRECGKFFRHNSSLFKHRRIHTGEMQ

SEQ ID NO: 14416 - protein, 498 aa, Homo sapiens
MAAAALRDPAQQGYVTFEDVAVYFSQEEWRLLDDAQRLLYRNVMLENFTLLASLGLASSKTHEITQLESWEEPFMPAWEVVTSAIPRGCWHGAEAEEAPEQIASVGLLSSNIQQHQKQHCGEKPLKRQEGRVPVLRSCKVHLSEKSLQSREVGKALLISSGVLKHQVTHTGEKSHRSSKSREAFHAGKRHYKCSECGKAFGQKYLLVQHQRLHAGKKTYECSECGKLFRDMSNLFIHQIVHTGERPYGCSNCGKSFSRNAHLIEHQRVHTGEKPFTCSECGKAFRHNSTLVQHHKIHTGVRPYECSECGKLFSFNSSLMKHQRIHTGERPYKCSECGKFYSHKSNLIKHWRVHTGERPYKCSDCGKFFTQCSSLMQHQKVHTGEKPFKCNECGRFFRENSTLVRHQRVHTGAKPYECRECGKFFSQSSTLMQHRKVHIGEKPFKCNECGRLFRENSSLVKHQRVHTGAKPYECRECGKFFRHNSSLFKHRRIHTGEMQ

SEQ ID NO: 14417 - protein, 97 aa, Homo sapiens
MAAAALRDPAQQGYVTFEDVAVYFSQEEWRLLDDAQRLLYRNVMLENFTLLASLGLASSKTHEITQLESWEEPFMPAWEVVTSAIPRGSWWVELREV

SEQ ID NO: 14418 - protein, 173 aa, Homo sapiens
MAAAALRDPAQVPVAADLLTDHEEGYVTFEDVAVYFSQEEWRLLDDAQRLLYRNVMLENFTLLASLGCWHGAEAEEAPEQIASVGLLSSNIQQHQKQHCGEKPLKRQEGRVPVLRSCKVHLSEKSLQSREVGKALLISSGVLKHQVTHTGEKSHRSSKSREAFHAGKRHYKCS

SEQ ID NO: 14419 - protein, 87 aa, Homo sapiens
MAAAALRDPAQVPVAADLLTDHEEGYVTFEDVAVYFSQEEWRLLDDAQRLLYRNVMLENFTLLASLGKVLTPHPSILSWARLFLLFL

SEQ ID NO: 14420 - protein, 510 aa, Homo sapiens
MAAAALRDPAQVPVAADLLTDHEEGYVTFEDVAVYFSQEEWRLLDDAQRLLYRNVMLENFTLLASLGLASSKTHEITQLESWEEPFMPAWEVVTSAIPRGCWHGAEAEEAPEQIASVGLLSSNIQQHQKQHCGEKPLKRQEGRVPVLRSCKVHLSEKSLQSREVGKALLISSGVLKHQVTHTGEKSHRSSKSREAFHAGKRHYKCSECGKAFGQKYLLVQHQRLHAGKKTYECSECGKLFRDMSNLFIHQIVHTGERPYGCSNCGKSFSRNAHLIEHQRVHTGEKPFTCSECGKAFRHNSTLVQHHKIHTGVRPYECSECGKLFSFNSSLMKHQRIHTGERPYKCSECGKFYSHKSNLIKHWRVHTGERPYKCSDCGKFFTQCSSLMQHQKVHTGEKPFKCNECGRFFRENSTLVRHQRVHTGAKPYECRECGKFFSQSSTLMQHRKVHIGEKPFKCNECGRLFRENSSLVKHQRVHTGAKPYECRECGKFFRHNSSLFKHRRIHTGEMQ

SEQ ID NO: 14421 - protein, 478 aa, Homo sapiens
MAAAALRDPAQVPVAADLLTDHEEQGYVTFEDVAVYFSQEEWRLLDDAQRLLYRNVMLENFTLLASLGCWHGAEAEEAPEQIASVGLLSSNIQQHQKQHCGEKPLKRQEGRVPVLRSCKVHLSEKSLQSREVGKALLISSGVLKHQVTHTGEKSHRSSKSREAFHAGKRHYKCSECGKAFGQKYLLVQHQRLHAGKKTYECSECGKLFRDMSNLFIHQIVHTGERPYGCSNCGKSFSRNAHLIEHQRVHTGEKPFTCSECGKAFRHNSTLVQHHKIHTGVRPYECSECGKLFSFNSSLMKHQRIHTGERPYKCSECGKFYSHKSNLIKHWRVHTGERPYKCSDCGKFFTQCSSLMQHQKVHTGEKPFKCNECGRFFRENSTLVRHQRVHTGAKPYECRECGKFFSQSSTLMQHRKVHIGEKPFKCNECGRLFRENSSLVKHQRVHTGAKPYECRECGKFFRHNSSLFKHRRIHTGEMQ

SEQ ID NO: 14422 - protein, 115 aa, Homo sapiens [sequence omitted]

SEQ ID NO: 14423 - protein, 511 aa, Homo sapiens
MAAAALRDPAQVPVAADLLTDHEEQGYVTFEDVAVYFSQEEWRLLDDAQRLLYRNVMLENFTLLASLGLASSKTHEITQLESWEEPFMPAWEVVTSAIPRGCWHGAEAEEAPEQIASVGLLSSNIQQHQKQHCGEKPLKRQEGRVPVLRSCKVHLSEKSLQSREVGKALLISSGVLKHQVTHTGEKSHRSSKSREAFHAGKRHYKCSECGKAFGQKYLLVQHQRLHAGKKTYECSECGKLFRDMSNLFIHQIVHTGERPYGCSNCGKSFSRNAHLIEHQRVHTGEKPFTCSECGKAFRHNSTLVQHHKIHTGVRPYECSECGKLFSFNSSLMKHQRIHTGERPYKCSECGKFYSHKSNLIKHWRVHTGERPYKCSDCGKFFTQCSSLMQHQKVHTGEKPFKCNECGRFFRENSTLVRHQRVHTGAKPYECRECGKFFSQSSTLMQHRKVHIGEKPFKCNECGRLFRENSSLVKHQRVHTGAKPYECRECGKFFRHNSSLFKHRRIHTGEMQ

SEQ ID NO: 14424 - protein, 110 aa, Homo sapiens
MAAAALRDPAQVPVAADLLTDHEEQGYVTFEDVAVYFSQEEWRLLDDAQRLLYRNVMLENFTLLASLGLASSKTHEITQLESWEEPFMPAWEVVTSAIPRGSWWVELREV

SEQ ID NO: 14425 - protein, 50 aa, Homo sapiens
MLENFTLLASLGCWHGAEAEEAPEQIASVGLLSSNIQQHQKQHCGEKPLK

SEQ ID NO: 14426 - protein, 77 aa, Homo sapiens
MASFGASLWPDLGACSQHLSLYHSVTVELAASTARHPASSLQEDSVAFEDVAVTFTQEEWALLDPSQKNLCRDVMQE

SEQ ID NO: 14427 - protein, 207 aa, Homo sapiens
MDSVAFEDVAVTFTQEEWALLDPSQKNLCRDVMQETFRNLASIGKKWKPQNIYVEYENLRRNLRIVGERLFESKEGHQHGEILTQVPDDMLKKTTTGVKSCESSVYGEVGSAHSSLNRHIRDDTGHKAYEYQEYGQKPYKCKYCKKPFNCLSSVQTHERAHSGRKLYVCEECGKTFISHSNLQRHRIMHRGDGPYKCKFCGKALMFL

SEQ ID NO: 14428 - protein, 77 aa, Homo sapiens
MFQDSVAFEDVAVTFTQEEWALLDPSQKNLCRDVMQETFRNLASIGKKWKPQNIYVEYENLRRNLRIVGERLFESKE

SEQ ID NO: 14429 - protein, 41 aa, Homo sapiens
MGDRNCRENHASMPGKVSGSLEVMKSMFKVLTDLVPGFSGL

SEQ ID NO: 14430 - protein, 117 aa, Homo sapiens
MLVLSILLYTCEMFQDSVAFEDVAVTFTQEEWALLDPSQKNLCRDVMQETFRNLASIGKKWKPQNIYVEYENLRRNLRIVGERLFESKEGHQHGEILTQVPDDMLKKTTTGVKSCES

SEQ ID NO: 14431 - protein, 166 aa, Homo sapiens
MLVLSILLYTCEMFQDSVAFEDVAVTFTQEEWALLDPSQKNLCRDVMQETFRNLASIGKKWKPQNIYVEYENLRRNLRIVGERLFESKEGHQHGEILTQVPDDMLKKTTTGVKSCESSVYGEVGSAHSSLNRHIRDDTGHKAYEYQEYGQKPYKCKYCKKPFNCLS

SEQ ID NO: 14432 - protein, 673 aa, Homo sapiens
MMFQDSVAFEDVAVTFTQEEWALLDPSQKNLCRDVMQETFRNLASIGKKWKPQNIYVEYENLRRNLRIVGERLFESKEGHQHGEILTQVPDDMLKKTTTGVKSCESSVYGEVGSAHSSLNRHIRDDTGHKAYEYQEYGQKPYKCKYCKKPFNCLSSVQTHERAHSGRKLYVCEECGKTFISHSNLQRHRIMHRGDGPYKCKFCGKALMFLSLYLIHKRTHTGEKPYQCKQCGKAFSHSSSLRIHERTHTGEKPYKCNECGKAFHSSTCLHAHKRTHTGEKPYECKQCGKAFSSSHSFQIHERTHTGEKPYECKECGKAFKCPSSVRRHERTHSRKKPYECKHCGKVLSYLTSFQNHLGMHTGEISHKCKICGKAFYSPSSLQTHEKTHTGEKPYKCNQCGKAFNSSSSFRYHERTHTGEKPYECKQCGKAFRSASLLQTHGRTHTGEKPYACKECGKPFSNFSFFQIHERMHREEKPYECKGYGKTFSLPSLFHRHERTHTGGKTYECKQCGRSFNCSSSFRYHGRTHTGEKPYECKQCGKAFRSASQLQIHGRTHTGEKPYECKQCGKAFGSASHLQMHGRTHTGEKPYECKQCGKSFGCASRLQMHGRTHTGEKPYKCKQCGKAFGCPSNLRRHGRTHTGEKPYKCNQCGKVFRCSSQLQVHGRAHCIDTP

SEQ ID NO: 14433 - protein, 52 aa, Homo sapiens
MQETFRNLASIGKKWKPQNIYVEYENLRRNLRIVGERLFESKEGHQHGEILT

SEQ ID NO: 14434 - protein, 119 aa, Homo sapiens
MQETFRNLASIGKKWKPQNIYVEYENLRRNLRIVGERLFESKEGHQHGEILTQVPDDMLKKTTTGVKSCESSVYGEVGSAHSSLNRHIRDDTGHKAYEYQEYGQKPYKCKYCKKPFNCL

SEQ ID NO: 14435 - protein, 638 aa, Homo sapiens
MQETFRNLASIGKKWKPQNIYVEYENLRRNLRIVGERLFESKEGHQHGEILTQVPDDMLKKTTTGVKSCESSVYGEVGSAHSSLNRHIRDDTGHKAYEYQEYGQKPYKCKYCKKPFNCLSSVQTHERAHSGRKLYVCEECGKTFISHSNLQRHRIMHRGDGPYKCKFCGKALMFLSLYLIHKRTHTGEKPYQCKQCGKAFSHSSSLRIHERTHTGEKPYKCNECGKAFHSSTCLHAHKRTHTGEKPYECKQCGKAFSSSHSFQIHERTHTGEKPYECKECGKAFKCPSSVRRHERTHSRKKPYECKHCGKVLSYLTSFQNHLGMHTGEISHKCKICGKAFYSPSSLQTHEKTHTGEKPYKCNQCGKAFNSSSSFRYHERTHTGEKPYECKQCGKAFRSASLLQTHGRTHTGEKPYACKECGKPFSNFSFFQIHERMHREEKPYECKGYGKTFSLPSLFHRHERTHTGGKTYECKQCGRSFNCSSSFRYHGRTHTGEKPYECKQCGKAFRSASQLQIHGRTHTGEKPYECKQCGKAFGSASHLQMHGRTHTGEKPYECKQCGKSFGCASRLQMHGRTHTGEKPYKCKQCGKAFGCPSNLRRHGRTHTGEKPYKCNQCGKVFRCSSQLQVHGRAHCIDTP

SEQ ID NO: 14436 - protein, 518 aa, Homo sapiens
MAVALGCAIQASLNQGSVFQEYDTDCEVFRQRFRQFQYREAAGPHEAFNKLWELCCQWLKPKMRSKEQILELLVLEQFLTILPTEIETWVREHCPENRERVVSLIEDLQRELEIPEQQVDMHDMLLEELAPVGTAHIPPTMHLESPALQVMGPAQEAPVAEAWIPQAGPPELNYGATGECQNFLDPGYPLPKLDMNFSLENREEPWVKELQDSKEMKQLLDSKIGFEIGIENEEDTSKQKKMETMYPFIVTLEGNALQGPILQKDYVQLENQWETPPEDLQTDLAKLVDQQNPTLGETPENSNLEEPLNPKPHKKKSPGEKPHRCPQCGKCFARKSQLTGHQRIHSGEEPHKCPECGKRFLRSSDLYRHQRLHTGERPYECTVCKKRFTRRSHLIGHQRTHSEEETYKCLECGKSFCHGSSLKRHLKTHTGEKPHRCHNCGKSFSRLTALTLHQRTHTEERPFKCNYCGKSFRQRPSLVIHLRIHTGEKPYKCTHCSKSFRQRAGLIMHQVTHFRGLI

SEQ ID NO: 14437 - protein, 164 aa, Homo sapiens
MAVALGCAIQASLNQGSVFQEYDTDCEVFRQRFRQFQYREAAGPHEAFNKLWELCCQWLKPKMRSKEQILELLVLEQFLTILPTEIETWVREHCPENRERVVSLIEDLQRELEIPEQQVRKECGIFVIGPKEVAEAAGTRPHICLYVIPQPQDFSRVLFLFLFC

SEQ ID NO: 14438 - protein, 233 aa, Homo sapiens
MKDRQVDAQAQEREHDDPTGQPGAPQLTQNIPRGPAGSKVFSVWPSGARSEQRSAFSKPTKRPAERPELTSVFPAGESADALGELSGLLNTTDLACWGRLSTPKLLVGDLWNLQALPQNAPLCSTFLGAPTLWLEHTQAQVPPPSSSSTTSWALLPPTLTSLGLSTQNWCAKCNLSFRLTSDLVFHMRSHHKKEHAGPDPHSQKRREEALACPVCQEHFRERHHLSRHMTSHS

SEQ ID NO: 14439 - protein, 340 aa, Homo sapiens
MPEWPPCLSVAPALVITMAAGKGAPLSPSAENRWRLSEPELGRGCKPVLLEKTNRLGPEAAVGRAGRDVGSAELALLVAPGKPRPGKPLPPKTRGEQRQSAFTELPRMKDRQVDAQAQEREHDDPTGQPGAPQLTQNIPRGPAGSKVFSVWPSGARSEQRSAFSKPTKRPAERPELTSVFPAGESADALGELSGLLNTTDLACWGRLSTPKLLVGDLWNLQALPQNAPLCSTFLGAPTLWLEHTQAQVPPPSSSSTTSWALLPPTLTSLGLSTQNWCAKCNLSFRLTSDLVFHMRSHHKKEHAGPDPHSQKRREEALACPVCQEHFRERHHLSRHMTSHS

SEQ ID NO: 14440 - protein, 252 aa, Homo sapiens
MQLPPALCARLAAGPGAAEPLPVERDPAAGAAPFRFVARPVRFPREHQFFEDGDVQRHLYLQDVIMQVADVPEKPRVPAFACQVAGCCQVFDALDDYEHHYHTLHGNVCSFCKRAFPSGHLLDAHILEWHDSLFQILSERQDMYQCLVEGCTEKFKTSRDRKDHMVRMHLYPADFRFDKPKKSRSPASAEAPGDSGERSEGEAMEICSEPVAASPAPAGERRIYRHRIPSTICFGQGAARGFKSNKKKTKQC

SEQ ID NO: 14441 - protein, 262 aa, Homo sapiens
MQLPPALCARLAAGPGAAEPLPVERDPAAGAAPFRFVARPVRFPREHQFFEDGDVQRHLYLQDVIMQVADVPEKPRVPAFACQVAGCCQVFDALDDYEHHYHTLHGNVCSFCKRAFPSGHLLDAHILEWHDSLFQILSERQDMYQCLVEGCTEKFKTSRDRKDHMVRMHLYPADFRFDKPKKSRSPASAEAPGDSGERSEGEAMEICSEPVAASPAPAGERRIYRHRSVSELFLKPVLNMCSVLRILGCTWAAALLILNSER

SEQ ID NO: 14442 - protein, 86 aa, Homo sapiens
MAVGLLKAMYQELVTFRDVAVDFSQEEWDCLDSSQRHLYSNVMLENYRILVSLGLCFSKPSVILLLEQGKAPWMVKRELTKGLCSG

SEQ ID NO: 14443 - protein, 148 aa, Homo sapiens
MAVGLLKAMYQELVTFRDVAVDFSQEEWDCLDSSQRHLYSNVMLENYRILVSLGLCFSKPSVILLLEQGKAPWMVKRELTKGLCSGWEPICETEELTPKQDFYEEHQSQKIIETLTSYNLEYSSLREEWKCEGYFERQPGNQKACFKE

SEQ ID NO: 14444 - protein, 536 aa, Homo sapiens
MAVGLLKAMYQELVTFRDVAVDFSQEEWDCLDSSQRHLYSNVMLENYRILVSLGLCFSKPSVILLLEQGKAPWMVKRELTKGLCSGWEPICETEELTPKQDFYEEHQSQKIIETLTSYNLEYSSLREEWKCEGYFERQPGNQKACFKEEIITHEEPLFDEREQEYKSWGSFHQNPLLCTQKIIPKEEKVHKHDTQKRSFKKNLMAIKPKSVCAEKKLLKCNDCEKVFSQSSSLTLHQRIHTGEKPYKCIECGKAFSQRSNLVQHQRIHTGEKPYECKECRKAFSQNAHLVQHLRVHTGEKPYECKVCRKAFSQFAYLAQHQRVHTGEKPYECIECGKAFSNRSSIAQHQRVHTGEKPYECNVCGKAFSLRAYLTVHQRIHTGERPYECKECGKAFSQNSHLAQHQRIHTGEKPYKCQECRKAFSQIAYLAQHQRVHTGEKPYECIECGKAFSNDSSLTQHQRVHTGEKPYECTVCGKAFSYCGSLAQHQRIHTGERPYECKECKKTFRQHAHLAHHQRIHIGESLSPPNPVNHQVL

SEQ ID NO: 14445 - protein, 592 aa, Homo sapiens
MCMYLFFLDFSIVGSGLRSGVWVSGSSSQAICVTPVRVESSEATAISQEKSQEEERMAVGLLKAMYQELVTFRDVAVDFSQEEWDCLDSSQRHLYSNVMLENYRILVSLGLCFSKPSVILLLEQGKAPWMVKRELTKGLCSGWEPICETEELTPKQDFYEEHQSQKIIETLTSYNLEYSSLREEWKCEGYFERQPGNQKACFKEEIITHEEPLFDEREQEYKSWGSFHQNPLLCTQKIIPKEEKVHKHDTQKRSFKKNLMAIKPKSVCAEKKLLKCNDCEKVFSQSSSLTLHQRIHTGEKPYKCIECGKAFSQRSNLVQHQRIHTGEKPYECKECRKAFSQNAHLVQHLRVHTGEKPYECKVCRKAFSQFAYLAQHQRVHTGEKPYECIECGKAFSNRSSIAQHQRVHTGEKPYECNVCGKAFSLRAYLTVHQRIHTGERPYECKECGKAFSQNSHLAQHQRIHTGEKPYKCQECRKAFSQIAYLAQHQRVHTGEKPYECIECGKAFSNDSSLTQHQRVHTGEKPYECTVCGKAFSYCGSLAQHQRIHTGERPYECKECKKTFRQHAHLAHHQRIHIGESLSPPNPVNHQVL

SEQ ID NO: 14446 - protein, 44 aa, Homo sapiens
MCMYLFFLDFSIVSVTVLLDFMTRDRERKVVWPDRLTSKQTWPY

SEQ ID NO: 14447 - protein, 44 aa, Homo sapiens
MLENYRILVSLGLCFSKPSVILLLEQGKAPWMVKRELTKGLCSG

SEQ ID NO: 14448 - protein, 306 aa, Homo sapiens
MAQISSGGGGQSRCLLFALGSEMGSEKEQSPEPHLPEEGEGGKPWRVDDSEGSWIPPGEKEHGQESLSDELQETHPKKPWQKVTVRARELGDPIAHPRHEADEKPFICAQCGKTFNNTSNLRTHQRIHTGEKPYKCSECGKSFSRSSNRIRHERIHLEEKHYKCPKCQESFRRRSDLTTHQQDHLGKRPYRCDICGKSFSQSATLAVHHRTHLEPAPYICCECGKSFSNSSSFGVHHRTHTGERPYECTECGRTFSDISNFGAHQRTHRGEKPYRCTVCGKHFSRSSNLIRHQKTHLGEQAGKDSS

SEQ ID NO: 14449 - protein, 306 aa, Homo sapiens; identical to SEQ ID NO: 14448

SEQ ID NO: 14450 - protein, 133 aa, Homo sapiens
MAQISSGGGGQSRCLLFALVLAICVHSQGSEMGSEKEQSPEPHLPEEGEGGKPWRVDDSEGSWIPPGEKEHGQESLSDELQETHPKKPWQKVTVRARELGDPIAHPRHEADEKPFICAQCGKTFNNTSNLRTH

SEQ ID NO: 14451 - protein, 284 aa, Homo sapiens
MGSEKEQSPEPHLPEEGEGGKPWRVDDSEGSWIPPGEKEHGQESLSDELQETHPKKPWQKVTVRARELGDPIAHPRHEADEKPFICAQCGKTFNNTSNLRTHQRIHTGEKPYKCSECGKSFSRSSNRIRHERIHLEEKHYKCPKCQESFRRRSDLTTHQQDHLGKRPYRCDICGKSFSQSATLAVHHRTHLEPAPYICCECGKSFSNSSSFGVHHRTHTGERPYECTECGRTFSDISNFGAHQRTHRGEKPYRCTVCGKHFSRSSNLIRHQKTHLGEQAGKDSS

SEQ ID NO: 14452 - protein, 284 aa, Homo sapiens; identical to SEQ ID NO: 14451

SEQ ID NO: 14453 - protein, 284 aa, Homo sapiens; identical to SEQ ID NO: 14451

SEQ ID NO: 14454 - protein, 315 aa, Homo sapiens
MSLCSPTHSAEMSLFLQGPEEMLPLSSEGSEMGSEKEQSPEPHLPEEGEGGKPWRVDDSEGSWIPPGEKEHGQESLSDELQETHPKKPWQKVTVRARELGDPIAHPRHEADEKPFICAQCGKTFNNTSNLRTHQRIHTGEKPYKCSECGKSFSRSSNRIRHERIHLEEKHYKCPKCQESFRRRSDLTTHQQDHLGKRPYRCDICGKSFSQSATLAVHHRTHLEPAPYICCECGKSFSNSSSFGVHHRTHTGERPYECTECGRTFSDISNFGAHQRTHRGEKPYRCTVCGKHFSRSSNLIRHQKTHLGEQAGKDSS

SEQ ID NO: 14455 - protein, 296 aa, Homo sapiens
MSLCSPTHSAEMSLFLQGPEEMLPLSSEGSEMGSEKEQSPEPHLPEEGEGGKPWRVDDSEGSWIPPGEKEHGQESLSDELQETHPKKPWQKVTVRARELGDPIAHPRHEADEKPFICAQCGKTFNNTSNLRTHQRIHTGEKPYKCSECGKSFSRSSNRIRHERIHLEEKHYKCPKCQESFRRRSDLTTHQQDHLGKRPYRCDICGKSFSQSATLAVHHRTHLEPAPYICCECGKSFSNSSSFGVHHRTHTGERPYECTECGRTFSDISNFGAHQRTHRGEKPYRCTVCGKHFSRSS

SEQ ID NO: 14456 - protein, 130 aa, Homo sapiens
MLENYRNLVFVGIAASKPDLITCLEQGKEPWNVKRHEMVTEPPVVYSYFAQDLWPKQGKKNYFQKVILRTYKKCGRENLQLRKYCKSMDECKVHKECYNGLNQCLTTTQNKIFQYDKYVKVFHKFSNSNR

SEQ ID NO: 14457 - protein, 87 aa, Homo sapiens
MPGPLGSLEMGVLTFRDVALEFSLEEWQCLDTAQQNLYRNVMLENYRNLVFVGIAASKPDLITCLEQGKEPWNVKRHEMVTEPPGLQ

SEQ ID NO: 14458 - protein, 572 aa, Homo sapiens
MPGPLGSLEMGVLTFRDVALEFSLEEWQCLDTAQQNLYRNVMLENYRNLVFVGIAASKPDLITCLEQGKEPWNVKRHEMVTEPPVVYSYFAQDLWPKQGKKNYFQKVILRTYKKCGRENLQLRKYCKSMDECKVHKECYNGLNQCLTTTQNKIFQYDKYVKVFHKFSNSNRHKIGHTGKKSFKCKECEKSFCMLSHLAQHKRIHSGEKPYKCKECGKAYNEASNLSTHKRIHTGKKPYKCEECGKAFNRLSHLTTHKIIHTGKKPYKCEECGKAFNQSANLTTHKRIHTGEKPYKCEECGRAFSQSSTLTAHKIIHAGEKPYKCEECGKAFSQSSTLTTHKIIHTGEKFYKCEECGKAFSRLSHLTTHKRIHSGEKPYKCEECGKAFKQSSTLTTHKRIHAGEKFYKCEVCSKAFSRFSHLTTHKRIHTGEKPYKCEECGKAFNLSSQLTTHKIIHTGEKPYKCEECGKAFNQSSTLSKHKVIHTGEKPYKCEECGKAFNQSSHLTTHKMIHTGEKPYKCEECGKAFNNSSILNRHKMIHTGEKLYKPESCNNACDNIAKISKYKRNCAGEK

SEQ ID NO: 14459 - protein, 131 aa, Homo sapiens
MSEETLQSKLAAAKKKLPWGAVQGSRAMSDLLLLLLDLTLLLLLMLLGFAGYSGQLAGVAVSAGSPPIPTSSMWSPMVRLGGFSPELQHLPQTLLHRCPLGQPCMGVLTFRDVALEFSLEEWQCLDTAQQN

SEQ ID NO: 14460 - protein, 75 aa, Homo sapiens
MEAFALGPARRGRRRTRAAGSLLSRAAILLFISAFLVRVPSSGEGPRRPAGSAGTTAASPTLRIAFSCVTCIRFI

SEQ ID NO: 14461 - protein, 350 aa, Homo sapiens
MEAFALGPARRGRRRTRAAGSLLSRAAILLFISAFLVRVPSSVGHLVRLPRAFRLTKDSVKIVGSTSFPVKAYVMLHQKSPHVLCVTQQLRNAELIDPSFQWYGPKGKVVSENRTAQITSTGSLVFQNFEESMSGIYTCFLEYKPTVEEIVKRLQLKYAIYAYREPHYYYQFTARYHAAPCNSIYNISFEKKLLQILSKLLLDLSCEISLLKSECHRVKMQRAGLQNELFFAFSVSSLDTEKGPKRCTDHNCEPYKRLFKAKNLIERFFNQQVEILGRRAEQLPQIYYIEGTLQMVWINRCFPGYGMNVQQHPKCPECCVICSPGSYNPRDGIHCLQCNSSLVYGAKTCL

SEQ ID NO: 14462 - protein, 351 aa, Homo sapiens
MEAFALGPARRGRRRTRAAGSLLSRAAILLFISAFLVRVPSSVGHLVRLPRAFRLTKDSVKIVGSTSFPVKAYVMLHQKSPHVLCVTQQLRNAELIDPSFQWYGPKGKVVSVENRTAQITSTGSLVFQNFEESMSGIYTCFLEYKPTVEEIVKRLQLKYAIYAYREPHYYYQFTARYHAAPCNSIYNISFEKKLLQILSKLLLDLSCEISLLKSECHRVKMQRAGLQNELFFAFSVSSLDTEKGPKRCTDHNCEPYKRLFKAKNLIERFFNQQVEILGRRAEQLPQIYYIEGTLQMVWINRCFPGYGMNVQQHPKCPECCVICSPGSYNPRDGIHCLQCNSSLVYGAKTCL

SEQ ID NO: 14463 - protein, 72 aa, Homo sapiens
MFLVGHLVRLPRAFRLTKDSVKIVGSTSFPVKAYVMLHQKSPHVLCVTQQLRNAELIDPSFQWYGPKGKVVS

SEQ ID NO: 14464 - protein, 218 aa, Homo sapiens
MMRTCVLLSAVLWCLTGAYREPDYSYQMAVRFTTRSCIGRYNDVFFRVLKKILDSLISDLSCHVIEPSYKCHSVEIPEHGLIHELFIAFQVNPFAPGWKGACNGSVDCEDTTNHNILQARDRIEDFFRSQAYIFYHNFNKTLPAMHFVDHSLQVVRLDSCRPGFGKNERLHSNCASCCVVCSPATFSPDVNVTCQTCVSVLTYGAKSCPQTSNKNQQY

SEQ ID NO: 14465 - protein, 316 aa, Homo sapiens
MMRTCVLLSAVLWCLTGDKIYVELHQNSPVLICMDFKLSKKEIVDPTYLWIGPNEKTLTGNNRINITETGQLMVKDFLEPLSGLYTCTLSYKTVKAETQEEKTVKKRYDFMVFAYREPDYSYQMAVRFTTRSCIGRYNDVFFRVLKKILDSLISDLSCHVIEPSYKCHSVEIPEHGLIHELFIAFQVNPFAPGWKGACNGSVDCEDTTNHNILQARDRIEDFFRSQAYIFYHNFNKTLPAMHFVDHSLQVVRLDSCRPGFGKNERLHSNCASCCVVCSPATFSPDVNVTCQTCVSVLTYGAKSCPQTSNKNQQYED

SEQ ID NO: 14466 - protein, 338 aa, Homo sapiens
MMRTCVLLSAVLWCLTGVQCPRFTLFNKKGFIYGKTGQPDKIYVELHQNSPVLICMDFKLSKKEIVDPTYLWIGPNEKTLTGNNRINITETGQLMVKDFLEPLSGLYTCTLSYKTVKAETQEEKTVKKRYDFMVFAYREPDYSYQMAVRFTTRSCIGRYNDVFFRVLKKILDSLISDLSCHVIEPSYKCHSVEIPEHGLIHELFIAFQVNPFAPGWKGACNGSVDCEDTTNHNILQARDRIEDFFRSQAYIFYHNFNKTLPAMHFVDHSLQVVRLDSCRPGFGKNERLHSNCASCCVVCSPATFSPDVNVTCQTCVSVLTYGAKSCPQTSNKNQQYED

SEQ ID NO: 14467 - protein, 265 aa, Homo sapiens
MMRTCVLLSAVLWCLTGVQCPRFTLFNKKGFIYGKTGQPDKIYVELHQNSPVLICMDFKLSKKEIVDPTYLWIGPNEKTLTGNNRINITETGQLMVKDFLEPLSGLYTCTLSYKTVKAETQEEKTVKKRYDFMVFVNPFAPGWKGACNGSVDCEDTTNHNILQARDRIEDFFRSQAYIFYHNFNKTLPAMHFVDHSLQVVRLDSCRPGFGKNERLHSNCASCCVVCSPATFSPDVNVTCQTCVSVLTYGAKSCPQTSNKNQQYED

SEQ ID NO: 14468 - protein, 330 aa, Homo sapiens
EQCPENGEEAVTLVEDLEREPGRPRSSVTVSVKGQEVRLEKMTPPKSSQELLSVRQESVEPQPRGVPKKERARSPDLGPQEQMNPKEKLKPFQRSGLPFPKSGVVSRLEQGEPWIPDLLGSKEKELPSGSHIGDRRVHADLLPSKKDRRSWVEQDHWSFEDEKVAGVHWGYEETRTLLAILSQTEFYEALRNCHRNSQVYGAVAERLREYGFLRTLEQCRTKFKGLQKSYRKVKSGHPPETCPFFEEMEALMSAQVIALPSNGLEAAASHSGLVGSDAETEEPGQRGWQHEEGAEEAVAQESDSDDMDLEATPQDPNSAAPVVFRSPGGA

SEQ ID NO: 14469 - protein, 462 aa, Homo sapiens
MAKSALRENGTNSETFRQRFRRFHYQEVAGPREAFSQLWELCCRWLRPEVRTKEQIVELLVLEQFLTVLPGEIQNWVQEQCPENGEEAVTLVEDLEREPGRPRSSVTVSVKGQEVRLEKMTPPKSSQELLSVRQESVEPQPRGVPKKERARSPDLGPQEQMNPKEKLKPFQRSGFEAGFENEDNSKRDISEEVQLHRTLLARSERKIPRYLHQGKGNESDCRSGRQWAKTSGEKRGKLTLPEKSLSEVLSQQRPCLGERPYKYLKYSKSFGPNSLLMHQVSHQVENPYKCADCGKSFSRSARLIRHRRIHTGEKPYKCLDCGKSFRDSSNFITHRRIHTGEKPYQCGECGKCFNQSSSLIIHQRTHTGEKPYQCEECGKSFNNSSHFSAHRRIHTGERPHVCPDCGKSFSKSSDLRAHHRTHTGEKPYGCHDCGKCFSKSSALNKHGEIHAREKLLTQSAPK

SEQ ID NO: 14470 - protein, 556 aa, Homo sapiens
MAKSALRENGTNSETFRQRFRRFHYQEVAGPREAFSQLWELCCRWLRPEVRTKEQIVELLVLEQFLTVLPGEIQNWVQEQCPENGEEAVTLVEDLEREPGRPRSSVTVSVKGQEVRLEKMTPPKSSQELLSVRQESVEPQPRGVPKKERARSPDLGPQEQMNPKEKLKPFQRSGLPFPKSGVVSRLEQGEPWIPDLLGSKEKELPSGSHIGDRRVHADLLPSKKDRRSWVEQDHWSFEDEKVAGVHWGYEETRTLLAILSQTEFYEALRNCHRNSQVYGAVAERLREYGFLRTLEQCRTKFKGLQKSYRKVKSGHPPETCPFFEEMEALMSAQVIALPSNGLEAAASHSGLVGSDAETEEPGQRGWQHEEGAEEAVAQESDSDDMDLEATPQDPNSAAPVVFRSPGGVHWGYEETKTYLAILSETQFYEALRNCHRNSQLYGAVAERLWEYGFLRTPEQCRTKFKSLQTSYRKVKNGQAPETCPFFEEMDALVLKLDLRMKIIQNGIFLRKYNCIGHYLQDLKGKFPGIFIRVKAMRVTVDQEDSGQRPQGRKEEN

SEQ ID NO: 14471 - protein, 21 aa, Homo sapiens
MMAKSALRENGTNSETFRQRF

SEQ ID NO: 14472 - protein, 852 aa, Homo sapiens
MMAKSALRENGTNSETFRQRFRRFHYQEVAGPREAFSQLWELCCRWLRPEVRTKEQIVELLVLEQFLTVLPGEIQNWVQEQCPENGEEAVTLVEDLEREPGRPRSSVTVSVKGQEVRLEKMTPPKSSQELLSVRQESVEPQPRGVPKKERARSPDLGPQEQMNPKEKLKPFQRSGLPFPKSGVVSRLEQGEPWIPDLLGSKEKELPSGSHIGDRRVHADLLPSKKDRRSWVEQDHWSFEDEKVAGVHWGYEETRTLLAILSQTEFYEALRNCHRNSQVYGAVAERLREYGFLRTLEQCRTKFKGLQKSYRKVKSGHPPETCPFFEEMEALMSAQVIALPSNGLEAAASHSGLVGSDAETEEPGQRGWQHEEGAEEAVAQESDSDDMDLEATPQDPNSAAPVVFRSPGGVHWGYEETKTYLAILSETQFYEALRNCHRNSQLYGAVAERLWEYGFLRTPEQCRTKFKSLQTSYRKVKNGQAPETCPFFEEMDALVSVRVAAPPNDGQEETASCPVQGTSEAEAQKQAEEADEATEEDSDDDEEDTEIPPGAVITRAPVLFQSPRGFEAGFENEDNSKRDISEEVQLHRTLLARSERKIPRYLHQGKGNESDCRSGRQWAKTSGEKRGKLTLPEKSLSEVLSQQRPCLGERPYKYLKYSKSFGPNSLLMHQVSHQVENPYKCADCGKSFSRSARLIRHRRIHTGEKPYKCLDCGKSFRDSSNFITHRRIHTGEKPYQCGECGKCFNQSSSLIIHQRTHTGEKPYQCEECGKSFNNSSHFSAHRRIHTGERPHVCPDCGKSFSKSSDLRAHHRTHTGEKPYGCHDCGKCFSKSSALNKHGEIHAREKLLTQSAPK

SEQ ID NO: 14473 - protein, 199 aa, Homo sapiens
MMAKSALRENGTNSETFRQRFRRFHYQEVAGPREAFSQLWELCCRWLRPEVRTKEQIVELLVLEQFLTVLPGEIQNWVQEQCPENGEEAVTLVEDLEREPGRPRSSVTVSVKGQEVRLEKMTPPKSSQELLSVRQESVEPQPRGVPKKERARSPDLGPQEQMNPKEKLKPFQRSGWSKESHGSQICWALRRKNFQVAAT

SEQ ID NO: 14474 - protein, 316 aa, Homo sapiens
MSRKWRGGSDSRGRFRKRAWKTIFGHSLCEGAGSALGEDDTPEIITRVIKCSAGVSGTPAQGCTQEREGKKPRPGTTGADEPKGEAQTFSKERLEQGEPWIPDLLGSKEKELPSGSHIGDRRVHADLLPSKKDRRSWVEQDHWSFEDEKVAGVHWGYEETRTLLAILSQTEFYEALRNCHRNSQVYGAVAERLREYGFLRTLEQCRTKFKGLQKSYRKVKSGHPPETCPFFEEMEALMSAQVIALPSNGLEAAASHSGLVGSDAETEEPGQRGWQHEEGAEEAVAQESDSDDMDLEATPQDPNSAAPVVFRSPGGA

SEQ ID NO: 14475-14483 - skipped (9 entries)

SEQ ID NO: 14484 - protein, 594 aa, synthetic construct
  REGION 1..594: note = Synthetic Sequence
MGSSLDDEHILSALLQSDDELVGEDSDSEVSDHVSEDDVQSDTEEAFIDEVHEVQPTSSGSEILDEQNVIEQPGSSLASNRILTLPQRTIRGKNKHCWSTSKSTRRSRVSALNIVRSQRGPTRMCRNIYDPLLCFKLFFTDEIISEIVKWTNAEISLKRRESMTSATFRDTNEDEIYAFFGILVMTAVRKDNHMSTDDLFDRSLSMVYVSVMSRDRFDFLIRCLRMDDKSIRPTLRENDVFTPVRKIWDLFIHQCIQNYTPGAHLTIDEQLLGFRGRCPFRVYIPNKPSKYGIKILMMCDSGTKYMINGMPYLGRGTQTNGVPLGEYYVKELSKPVHGSCRNITCDNWFTSIPLAKNLLQEPYKLTIVGTVRSNKREIPEVLKNSRSRPVGTSMFCFDGPLTLVSYKPKPAKMVYLLSSCDEDASINESTGKPQMVMYYNQTKGGVDTLDQMCSVMTCSRKTNRWPMALLYGMINIACINSFIIYSHNVSSKGEKVQSRKKFMRNLYMSLTSSFMRKRLEAPTLKRYLRDNISNILPKEVPGTSDDSTEEPVMKKRTYCTYCPSKIRRKANASCKKCKKVICREHNIDMCQSCF

SEQ ID NO: 14485 - protein, 340 aa, synthetic construct
  REGION 1..340: note = Synthetic Sequence
MGKSKEISQDLRKKIVDLHKSGSSLGAISKRLKVPRSSVQTIVRKYKHHGTTQPSYRSGRRRVLSPRDERTLVRKVQINPRTTAKDLVKMLEETGTKVSISTVKRVLYRHNLKGRSARKKPLLQNRHKKARLRFATAHGDKDRTFWRNVLWSDETKIELFGHNDHRYVWRKKGEACKPKNTIPTVKHGGGSIMLWGCFAAGGTGALHKIDGIMRKENYVDILKQHLKTSVRKLKLGRKWVFQMDNDPKHTSKVVAKWLKDNKVKVLEWPSQSPDLNPIENLWAELKKRVRARRPTNLTQLHQLCQEEWAKIHPTYCGKLVEGYPKRLTQVKQFKGNATKY

SEQ ID NO: 14486 - protein, 340 aa, synthetic construct
  REGION 1..340: note = Synthetic Sequence
MGKSKEISQDLRKRIVDLHKSGSSLGAISKRLAVPRSSVQTIVRKYKHHGTTQPSYRSGRRRVLSPRDERTLVRKVQINPRTTAKDLVKMLEETGTKVSISTVKRVLYRHNLKGHSARKKPLLQNRHKKARLRFATAHGDKDRTFWRNVLWSDETKIELFGHNDHRYVWRKKGEACKPKNTIPTVKHGGGSIMLWGCFAAGGTGALHKIDGIMDAVQYVDILKQHLKTSVRKLKLGRKWVFQHDNDPKHTSKVVAKWLKDNKVKVLEWPSQSPDLNPIENLWAELKKRVRARRPTNLTQLHQLCQEEWAKIHPNYCGKLVEGYPKRLTQVKQFKGNATKY

SEQ ID NO: 14487 - protein, 594 aa, synthetic construct
  REGION 1..594: note = Synthetic Sequence
MGSSLDDEHILSALLQSDDELVGEDSDSEISDHVSEDDVQSDTEEAFIDEVHEVQPTSSGSEILDEQNVIEQPGSSLASNRILTLPQRTIRGKNKHCWSTSKSTRRSRVSALNIVRSQRGPTRMCRNIYDPLLCFKLFFTDEIISEIVKWTNAEISLKRRESMTGATFRDTNEDEIYAFFGILVMTAVRKDNHMSTDDLFDRSLSMVYVSVMSRDRFDFLIRCLRMDDKSIRPTLRENDVFTPVRKIWDLFIHQCIQNYTPGAHLTIDEQLLGFRGRCPFRMYIPNKPSKYGIKILMMCDSGTKYMINGMPYLGRGTQTNGVPLGEYYVKELSKPVHGSCRNITCDNWFTSIPLAKNLLQEPYKLTIVGTVRSNKREIPEVLKNSRSRPVGTSMFCFDGPLTLVSYKPKPAKMVYLLSSCDEDASINESTGKPQMVMYYNQTKGGVDTLDQMCSVMTCSRKTNRWPMALLYGMINIACINSFIIYSHNVSSKGEKVQSRKKFMRNLYMSLTSSFMRKRLEAPTLKRYLRDNISNILPNEVPGTSDDSTEEPVMKKRTYCTYCPSKIRRKANASCKKCKKVICREHNIDMCQSCF

SEQ ID NO: 14488-14499 - skipped (12 entries)

SEQ ID NO: 14500 - DNA, 30 bp, synthetic construct
  misc_feature 1..30: note = Synthetic Sequence
  source 1..30: mol_type = other DNA
gtgcacgaatttcgtgcaccgggccactag

SEQ ID NO: 14501 - protein, 1496 aa, synthetic construct
  REGION 1..1496: note = Synthetic Sequence
MSKEQLLIQRSSAAERCRRYRQKMSAEQRASDLERRRRLQQNVSEEQLLEKRRSEAEKQRRHRQKMSKDQRAFEVERRRWRRQNMSREQSSTSTTNTGRNCLLSKNGVHEDAILEHSCGGMTVRCEFCLSLNFSDEKPSDGKFTRCCSKGKVCPNDIHFPDYPAYLKRLMTNEDSDSKNFMENIRSINSSFAFASMGANIASPSGYGPYCFRIHGQVYHRTGTLHPSDGVSRKFAQLYILDTAEATSKRLAMPENQGCSERLMININNLMHEINELTKSYKMLHEVEKEAQSEAAAKGIAPTEVTMAIKYDRNSDPGRYNSPRVTEVAVIFRNEDGEPPFERDLLIHCKPDPNNPNATKMKQISILFPTLDAMTYPILFPHGEKGWGTDIALRLRDNSVIDNNTRQNVRTRVTQMQYYGFHLSVRDTFNPILNAGKLTQQFIVDSYSKMEANRINFIKANQSKLRVEKYSGLMDYLKSRSENDNVPIGKMIILPSSFEGSPRNMQQRYQDAMAIVTKYGKPDLFITMTCNPKWADITNNLQRWQKVENRPDLVARVFNIKLNALLNDICKFHLFGKVIAKIHVIEFQKRGLPHAHILLILDSESKLRSEDDIDRIVKAEIPDEDQCPRLFQIVKSNMVHGPCGIQNPNSPCMENGKCSKGYPKEFQNATIGNIDGYPKYKRRSGSTMSIGNKVVDNTWIVPYNPYLCLKYNCHINVEVCASIKSVKYLFKYIYKGHDCANIQISEKNIINHDEVQDFIDSRYVSAPEAVWRLFAMRMHDQSHAITRLAIHLPNDQNLYFHTDDFAEVLDRAKRHNSTLMAWFLLNREDSDARNYYYWEIPQHYVFNNSLWTKRRKGGNKVLGRLFTVSFREPERYYLRLLLLHVKGAISFEDLRTVGGVTYDTFHEAAKHRGLLLDDTIWKDTIDDAIILNMPKQLRQLFAYICVFGCPSAADKLWDENKSHFIEDFCWKLHRREGACVNCEMHALNEIQEVFTLHGMKCSHFKLPDYPLLMNANTCDQLYEQQQAEVLINSLNDEQLAAFQTITSAIEDQTVHPKCFFLDGPGGSGKTYLYKVLTHYIRGRGGTVLPTASTGIAANLLLGGRTFHSQYKLPIPLNETSISRLDIKSEVAKTIKKAQLLIIDECTMASSHAINAIDRLLREIMNLNVAFGGKVLLLGGDFRQCLSIVPHAMRSAIVQTSLKYCNVWGCFRKLSLKTNMRSEDSAYSEWLVKLGDGKLDSSFHLGMDIIEIPHEMICNGSIIEATFGNSISIDNIKNISKRAILCPKNEHVQKLNEEILDILDGDFHTYLSDDSIDSTDDAEKENFPIEFLNSITPSGMPCHKLKLKVGAIIMLLRNLNSKWGLCNGTRFIIKRLRPNIIEAEVLTGSAEGEVVLIPRIDLSPSDTGLPFKLIRRQFPVMPAFAMTINKSQGQTLDRVGIFLPEPVFAHGQLYVAFSRVRRACDVKVKVVNTSSQGKLVKHSESVFTLNVVYREILE

SEQ ID NO: 14502 - protein, 649 aa, synthetic construct
  REGION 1..649: note = Synthetic Sequence
MEEVCDSSAAASSTVQNQPQDQEHPWPYLREFFSLSGVNKDSFKMKCVLCLPLNKEISAFKSSPSNLRKHIERMHPNYLKNYSKLTAQKRKIGTSTHASSSKQLKVDSVFPVKHVSPVTVNKAILRYIIQGLHPFSTVDLPSFKELISTLQPGISVITRPTLRSKIAEAALIMKQKVTAAMSEVEWIATTTDCWTARRKSFIGVTAHWINPGSLERHSAALACKRLMGSHTFEVLASAMNDIHSEYEIRDKVVCTTTDSGSNFMKAFRVFGVENNDIETEARRCESDDTDSEGCGEGSDGVEFQDASRVLDQDDGFEFQLPKHQKCACHLLNLVSSVDAQKALSNEHYKKLYRSVFGKCQALWNKSSRSALAAEAVESESRLQLLRPNQTRWNSTFMAVDRILQICKEAGEGALRNICTSLEVPMFNPAEMLFLTEWANTMRPVAKVLDILQAETNTQLGWLLPSVHQLSLKLQRLHHSLRYCDPLVDALQQGIQTRFKHMFEDPEIIAAAILLPKFRTSWTNDETIIKRGMDYIRVHLEPLDHKKELANSSSDDEDFFASLKPTTHEASKELDGYLACVSDTRESLLTFPAICSLSIKTNTPLPASAACERLFSTAGLLFSPKRARLDTNNFENQLLLKLNLRFYNFE

SEQ ID NO: 14503 - skipped

SEQ ID NO: 14504 - protein, 1220 aa, Bombyx mori
MDIERQEERIRAMLEEELSDYSDESSSEDETDHCSEHEVNYDTEEERIDSVDVPSNSRQEEANAIIANESDSDPDDDLPLSLVRQRASASRQVSGPFYTSKDGTKWYKNCQRPNVRLRSENIVTEQAQVKNIARDASTEYECWNIFVTSDMLQEILTHTNSSIRHRQTKTAAENSSAETSFYMQETTLCELKALIALLYLAGLIKSNRQSLKDLWRTDGTGVDIFRTTMSLQRFQFLQNNIRFDDKSTRDERKQTDNMAAFRSIFDQFVQCCQNAYSPSEFLTIDEMLLSFRGRCLFRVYIPNKPAKYGIKILALVDAKNFDVVNLEVYAGKQPSGPYAVSNRPFEVVERLIQPVARSHRNVTFDNWFTGYELMLHLLNEYRLTSVGTVRKNKRQIPESFIRTDRQPNSSVFGFQKDITLVSYAPKKNKVVVVMSTMHHDNSIDESTGEKQKPEMITFYNSTKAGVDVVDELSANYNVSRNSKRWPMTLFYGVLNMAAINACIIYRANKNVTIKRTEFIRSLGLSMIYEHLHSRNKKKNIPTYLRQRIEKQLGEPSPRHVNVPGRYVRCQDCPYKKDRKTKHSCNACAKPICMEHAKFLCENCAELDSSLMDIERQEERIRAMLEEELSDYSDESSSEDETDHCSEHEVNYDTEEERIDSVDVPSNSRQEEANAIIANESDSDPDDDLPLSLVRQRASASRQVSGPFYTSKDGTKWYKNCQRPNVRLRSENIVTEQAQVKNIARDASTEYECWNIFVTSDMLQEILTHTNSSIRHRQTKTAAENSSAETSFYMQETTLCELKALIALLYLAGLIKSNRQSLKDLWRTDGTGVDIFRTTMSLQRFQFLQNNIRFDDKSTRDERKQTDNMAAFRSIFDQFVQCCQNAYSPSEFLTIDEMLLSFRGRCLFRVYIPNKPAKYGIKILALVDAKNFYVVNLEVYAGKQPSGPYAVSNRPFEVVERLIQPVARSHRNVTFDNWFTGYELMLHLLNEYRLTSVGTVRKNKRQIPESFIRTDRQPNSSVFGFQKDITLVSYAPKKNKVVVVMSTMHHDNSIDESTGEKQKPEMITFYNSTKAGVDVVDELCANYNVSRNSKRWPMTLFYGVLNMAAINACIIYRTNKNVTIKRTEFIRSLGLSMIYEHLHSRNKKKNIPTYLRQRIEKQLGEPSPRHVNVPGRYVRCQDCPYKKDRKTKRSCNACAKPICMEHAKFLCENCAELDSSL

SEQ ID NO: 14505 - protein, 610 aa, Bombyx mori
MDIERQEERIRAMLEEELSDYSDESSSEDETDHCSEHEVNYDTEEERIDSVDVPSNSRQEEANAIIANESDSDPDDDLPLSLVRQRASASRQVSGPFYTSKDGTKWYKNCQRPNVRLRSENIVTEQAQVKNIARDASTEYECWNIFVTSDMLQEILTHTNSSIRHRQTKTAAENSSAETSFYMQETTLCELKALIALLYLAGLIKSNRQSLKDLWRTDGTGVDIFRTTMSLQRFQFLQNNIRFDDKSTRDERKQTDNMAAFRSIFDQFVQCCQNAYSPSEFLTIDEMLLSFRGRCLFRVYIPNKPAKYGIKILALVDAKNFYVVNLEVYAGKQPSGPYAVSNRPFEVVERLIQPVARSHRNVTFDNWFTGYELMLHLLNEYRLTSVGTVRKNKRQIPESFIRTDRQPNSSVFGFQKDITLVSYAPKKNKVVVVMSTMHHDNSIDESTGEKQKPEMITFYNSTKAGVDVVDELCANYNVSRNSKRWPMTLFYGVLNMAAINACIIYRTNKNVTIKRTEFIRSLGLSMIYEHLHSRNKKKNIPTYLRQRIEKQLGEPSPRHVNVPGRYVRCQDCPYKKDRKTKRSCNACAKPICMEHAKFLCENCAELDSSL

SEQ ID NO: 14506 - DNA, 375 bp, Bombyx mori
  source 1..375: mol_type = other DNA
ttatcccggcgagcatgaggcagggtatctcataccctggtaaaattttaaagttgtgtattttataaaattttcgtctgacaacactagcgcgctcagtagctggaggcaggagcgtgcgggaggggatagtggcgtgatcgcagtgtggcacgggacaccggcgagatattcgtgtgcaaacctgtttcgggtatgttataccctgcctcattgttgacgtattttttttatgtaatttttccgattattaatttcaactgttttattggtatttttatgttatccattgttctttttttatgatttactgtatcggttgtctttcgttcctttagttgagtttttttttattattttcagtttttgatcaaa

SEQ ID NO: 14507 - DNA, 368 bp, Bombyx mori
  source 1..368: mol_type = other DNA
tcatatttttagtttaaaaaaataattatatgttttataatgaaaagaatctcattatctttcagtattaggttgatttatattccaaagaataatatttttgttaaattgttgatttttgtaaacctctaaatgtttgttgctaaaattactgtgtttaagaaaaagattaataaataataataatttcataattaaaaacttctttcattgaatgccattaaataaaccattattttacaaaataagatcaacataattgagtaaataataataagaacaatattatagtacaacaaaatatgggtatgtcataccctgccacattcttgatgtaactttttttcacctcatgctcgccgggttat

SEQ ID NO: 14508 - DNA, 214 bp, Bombyx mori
  source 1..214: mol_type = other DNA
ttatcccggcgagcatgaggcagggtatctcataccctggtaaaattttaaagttgtgtattttataaaattttcgtctgacaacactagcgcgctcagtagctggaggcaggagcgtgcgggaggggatagtggcgtgatcgcagtgtggcacgggacaccggcgagatattcgtgtgcaaacctgtttcgggtatgttataccctgcctcat

SEQ ID NO: 14509 - DNA, 195 bp, Bombyx mori
  source 1..195: mol_type = other DNA
taaataataataatttcataattaaaaacttctttcattgaatgccattaaataaaccattattttacaaaataagatcaacataattgagtaaataataataagaacaatattatagtacaacaaaatatgggtatgtcataccctgccacattcttgatgtaactttttttcacctcatgctcgccgggttat

SEQ ID NO: 14510 - DNA, 16 bp, synthetic construct
  misc_feature 1..16: note = Synthetic Sequence
  source 1..16: mol_type = other DNA
cccggcgagcatgagg

SEQ ID NO: 14511 - DNA, 20 bp, synthetic construct
  misc_feature 1..20: note = Synthetic Sequence
  source 1..20: mol_type = other DNA
ttatcccggcgagcatgagg

SEQ ID NO: 14512 - DNA, 20 bp, synthetic construct
  misc_feature 1..20: note = Synthetic Sequence
  source 1..20: mol_type = other DNA
cctcatgctcgccgggttat

SEQ ID NO: 14513 - DNA, 20 bp, synthetic construct
  misc_feature 1..20: note = Synthetic Sequence
  source 1..20: mol_type = other DNA
ttaacccggcgagcatgagg

SEQ ID NO: 14514 - DNA, 20 bp, synthetic construct
  misc_feature 1..20: note = Synthetic Sequence
  source 1..20: mol_type = other DNA
cctcatgctcgccgggttaa

SEQ ID NO: 14515 - DNA, 375 bp, Bombyx mori
  source 1..375: mol_type = other DNA
ttaacccggcgagcatgaggcagggtatctcataccctggtaaaattttaaagttgtgtattttataaaattttcgtctgacaacactagcgcgctcagtagctggaggcaggagcgtgcgggaggggatagtggcgtgatcgcagtgtggcacgggacaccggcgagatattcgtgtgcaaacctgtttcgggtatgttataccctgcctcattgttgacgtattttttttatgtaatttttccgattattaatttcaactgttttattggtatttttatgttatccattgttctttttttatgatttactgtatcggttgtctttcgttcctttagttgagtttttttttattattttcagtttttgatcaaa

SEQ ID NO: 14516 - DNA, 797 bp, Bombyx mori
  source 1..797: mol_type = other DNA
tcatatttttagtttaaaaaaataattatatgttttataatgaaaagaatctcattatctttcagtattaggttgatttatattccaaagaataatatttttgttaaattgttgatttttgtaaacctctaaatgtttgttgctaaaattactgtgtttaagaaaaagattaataaataataataatttcataattaaaaacttctttcattgaatgccattaaataattcattattttacaaaataagatcaacataattgagtaaataataataagaacaatattatagtacaacaaaatatgggtatgtcataccctttttttttttttttttttttttttttcgggtagagggccgaacctcctacgaggtccccgcgcaaaaggggcgcgcggggtatgtgagactcaacgatctgcatggtgttgtgagcagaccgcgggcccaaggattttagagcccacccactaaacgactcctctgcactcttacacccgacgtccgatcccctccgaggtcagaacccggatgaggtaggggggctaccgcggtcaacactacaaccagacggcgcggctcaccccaaggacgcccagccgacggagccttcgaggcgaatcgaaggctctgaaacgtcggccgtctcggtacggcagcccgtcgggccgcccagacggtgccgctggtgtcccggaataccccgctggaccagaaccagcctgccgggtcgggacgcgatacaccgtcgaccggtcgctctaatcactccacggcagcgcgctagagtgctggta

SEQ ID NO: 14517 - protein, 589 aa, Xenopus tropicalis
MAKRFYSAEEAAAHCMASSSEEFSGSDSEYVPPASESDSSTEESWCSSSTVSALEEPMEVDEDVDDLEDQEAGDRADAAAGGEPAWGPPCNFPPEIPPFTTVPGVKVDTSNFEPINFFQLFMTEAILQDMVLYTNVYAEQYLTQNPLPRYARAHAWHPTDIAEMKRFVGLTLAMGLIKANSLESYWDTTTVLSIPVFSATMSRNRYQLLLRFLHFNNNATAVPPDQPGHDRLHKLRPLIDSLSERFAAVYTPCQNICIDESLLLFKGRLQFRQYIPSKRARYGIKFYKLCESSSGYTSYFLIYEGKDSKLDPPGCPPDLTVSGKIVWELISPLLGQGFHLYVDNFYSSIPLFTALYCLDTPACGTINRNRKGLPRALLDKKLNRGETYALRKNELLAIKFFDKKNVFMLTSIHDESVIREQRVGRPPKNKPLCSKEYSKYMGGVDRTDQLQHYYNATRKTRAWYKKVGIYLIQMALRNSYIVYKAAVPGPKLSYYKYQLQILPALLFGGVEEQTVPEMPPSDNVARLIGKHFIDTLPPTPGKQRPQKGCKVCRKRGIRRDTRYYCPKCPRNPGLCFKPCFEIYHTQLHY

SEQ ID NO: 14518 - protein, 589 aa, Xenopus tropicalis
MAKRFYSAEEAAAHCMAPSSEEFSGSDSEYVPPASESDSSTEESWCSSSTVSALEEPMEVDEDVDDLEDQEAGDRADAAAGGEPAWGPPCNFPPEIPPFTTVPGVKVDTSNFEPINFFQLFMTEAILQDMVLYTNVYAEQYLTQNPLPRYARAHAWHPTDIAEMKRFVGLTLAMGLIKANSLESYWNTTTVLSIPVFSATMSRNRYQLLLRFLHFNNNATAVPPDQPDHDRLHKLRPLIDSLSERFAAVYTPCQNICIDESLLLFKGRLRFRQYIPSKRARYGIKFYKLCESSSGYTSYFLIYEGKDSKLDPPGCPPDLTVSGKIVWELISPLLGQGFHLYVDNFYSSIPLFTALYCLDTPACGTINRTRKGLPRALLDKKLNRGETYALRKNELLAIKFFDKKNVFMLTSIHDESVIREQRVGRPPKNKPLCSKEYSKYMGGVDRTDQLQHYYNATRKTSAWYKKVGIYLIQMALRNSYIVYKAAVPGPKLSYYKYQLQILPALLFGGVEEQTVPEMLPSDNVARLIGKHFIDTLPPTPGKQRPQKGCKVCRKRGIRRDTRYYCPKCPRNPGLCFKPCFEIYHTQLHY

SEQ ID NO: 14519 - DNA, 185 bp, Xenopus tropicalis
  source 1..185: mol_type = other DNA
ttaacctttttactgccaatgacgcatgggatacgtcgtggcagtaaaagggcttaaatgccaacgacgcgtcccatacgttgttggcattttaagtcttctctctgcagcggcagcatgtgccgccgctgcagagagtttctagcgatgacagcccctctgggcaacgagccgggggggctgtc

SEQ ID NO: 14520 - DNA, 237 bp, Xenopus tropicalis
  source 1..237: mol_type = other DNA
tttgcatttttagacatttagaagcctatatcttgttacagaattggaattacacaaaaattctaccatattttgaaagcttaggttgttctgaaaaaaacaatatattgttttcctgggtaaactaaaagtcccctcgaggaaaggcccctaaagtgaaacagtgcaaaacgttcaaaaactgtctggcaatacaagttccactttgaccaaaacggctggcagtaaaagggttaa

SEQ ID NO: 14521 - DNA, 185 bp, Xenopus tropicalis
  source 1..185: mol_type = other DNA
ttaaccctttgcctgccaatcacgcatgggatacgtcgtggcagtaaaagggcttaaatgccaacgacgcgtcccatacgttgttggcattttaagtcttctctctgcagcggcagcatgtgccgccgctgcagagagtttctagcgatgacagcccctctgggcaacgagccgggggggctgtc

SEQ ID NO: 14522 - DNA, 238 bp, Xenopus tropicalis
  source 1..238: mol_type = other DNA
tttgcatttttagacatttagaagcctatatcttgttacagaattggaattacacaaaaattctaccatattttgaaagcttaggttgttctgaaaaaaacaatatattgttttcctgggtaaactaaaagtcccctcgaggaaaggcccctaaagtgaaacagtgcaaaacgttcaaaaactgtctggcaatacaagttccactttgggacaaatcggctggcagtgaaagggttaa

SEQ ID NO: 14523 - DNA, 185 bp, Xenopus tropicalis
  source 1..185: mol_type = other DNA
ttaacctttttactgccaatgacgcatgggatacgtcgtggcagtaaaagggcttaaatgccaacgacgcgtcccatacgttgttggcattttaattcttctctctgcagcggcagcatgtgccgccgctgcagagagtttctagcgatgacagcccctctgggcaacgagccgggggggctgtc

SEQ ID NO: 14524 - DNA, 18 bp, synthetic construct
  misc_feature 1..18: note = Synthetic Sequence
  source 1..18: mol_type = other DNA
ttaacctttttactgcca

SEQ ID NO: 14525 - protein, 597 aa, Helicoverpa sp.
MASRQRLNHDEIATILENDDDYSPLDSESEKEDCVVEDDVWSDNEDAIVDFVEDTSAQEDPDNNIASRESPNLEVTSLTSHRIITLPQRSIRGKNNHVWSTTKGRTTGRTSAINIIRTNRGPTRMCRNIVDPLLCFQLFITDEIIHEIVKWTNVEIIVKRQNLKDISASYRDTNTMEIWALVGILTLTAVMKDNHLSTDELFDATFSGTRYVSVMSRERFEFLIRCIRMDDKTLRPTLRSDDAFLPVRKIWEIFINQCRQNHVPGSNLTVDEQLLGFRGRCPFRMYIPNKPDKYGIKFPMMCAAATKYMIDAIPYLGKSTKTNGLPLGEFYVKDLTKTVHGTNRNITCDNWFTSIPLAKNMLQAPYNLTIVGTIRSNKREMPEEIKNSRSRPVGSSMFCFDGPLTLVSYKPKPSKMVFLLSSCDENAVINESNGKPDMILFYNQTKGGVDSFDQMCKSMSANRKTNRWPMAVFYGMLNMAFVNSYIIYCHNKINKQEKPISRKEFMKKLSIQLTTPWMQERLQAPTLKRTLRDNITNVLKNVVPASSENISNEPEPKKRRYCGVCSYKKRRMTKAQCCKCKKAICGEHNIDVCQDCI

SEQ ID NO: 14526 - DNA, 18 bp, synthetic construct
  misc_feature 1..18: note = Synthetic Sequence
  source 1..18: mol_type = other DNA
ttaaccctttgcctgcca

SEQ ID NO: 14527 - DNA, 18 bp, synthetic construct
  misc_feature 1..18: note = Synthetic Sequence
  source 1..18: mol_type = other DNA
ttaaccyttttactgcca

SEQ ID NO: 14528 - DNA, 367 bp, Helicoverpa sp.
  source 1..367: mol_type = other DNA
agactgtttttttctaagagacttctaaaatattattacgagttgatttaattttatgaaaacatttaaaactagttgattttttttataattacataattttaagaaaaagtgttagaggcttgatttttttgttgattttttctaagatttgattaaagtgccataatagtattaataaagagtattttttaacttaaaatgtattttatttattaattaaaacttcaattatgataactcatgcaaaaatatagttcattaacagaaaaaaataggaaaactttgaagttttgtttttacacgtcatttttacgtatgattgggctttatagctagttaaatatgattgggcttctagggttaa

SEQ ID NO: 14529 - DNA, 18 bp, synthetic construct
  misc_feature 1..18: note = Synthetic Sequence
  source 1..18: mol_type = other DNA
tggcagtaaaagggttaa

SEQ ID NO: 14530 - protein, 628 aa, synthetic construct
MDLRKQDEKIRQWLEQDIEEDSKGESDNSSSETEDIVEMEVHKNTSSESEVSSESDYEPVCPSKRQRTQIIESEESDNSESIRPSRRQTSRVIDSDETDEDVMSSTPQNIPRNPNVIQPSSRFLYGKNKHKWSSAAKPSSVRTSRRNIIHFIPGPKERAREVSEPIDIFSLFISEDMLQQVVTFTNAEMLIRKNKYKTETFTVSPTNLEEIRALLGLLFNAAAMKSNHLPTRMLFNTHRSGTIFKACMSAERLNFLIKCLRFDDKLTRNVRQRDDRFAPIRDLWQALISNFQKWYTPGSYITVDEQLVGFRGRCSFRMYIPNKPNKYGIKLVMAADVNSKYIVNAIPYLGKGTDPQNQPLATFFIKEITSTLHGTNRNITMDNWFTSVPLANELLMAPYNLTLVGTLRSNKREIPEKLKNSKSRAIGTSMFCYDGDKTLVSYKAKSNKVVFILSTIHDQPDINQETGKPEMIHFYNSTKGAVDTVDQMCSSISTNRKTQRWPLCVFYNMLNLSIINAYVVYVYNNVRNNKKPMSRRDFVIKLGDQLMEPWLRQRLQTVTLRRDIKVMIQDILGESSDLEAPVPSVSNVRKIYYLCPSKARRMTKHRCIKCKQAICGPHNIDICSRCIE

SEQ ID NO: 14531 - DNA, 18 bp, synthetic construct
  misc_feature 1..18: note = Synthetic Sequence
  source 1..18: mol_type = other DNA
tggcagtgaaagggttaa

SEQ ID NO: 14532 - DNA, 406 bp, synthetic construct
  misc_feature 1..406: note = Synthetic Sequence
  source 1..406: mol_type = other DNA
ttaaccctagataactaaacattcgtccgctcgacgacgcgctatgccgcgaaattgaagtttacctattattccgcgtcccccgcccccgccgctttttctagcttcctgatttgcaaaatagtgcatcgcgtgacacgctcgaggtcacacgacaattaggtcgaaagttacaggaatttcgtcgtccgctcgacgaaagtttagtaattacgtaagtttggcaaaggtaagtgaatgaagtatttttttataattattttttaattctttatagtgataacgtaaggtttatttaaatttattacttttatagttatttagccaattgttataaattccttgttattgctgaaaaatttgcctgttttagtcaaaatttattaacttttcgatcgttttttag

SEQ ID NO: 14533 - DNA, 18 bp, synthetic construct
  misc_feature 1..18: note = Synthetic Sequence
  source 1..18: mol_type = other DNA
ttaaccytttkmctgcca

SEQ ID NO: 14534 - protein, 599 aa, Argyrogramma sp.
MASRQHLYQDEIAAILENEDDYSPHDTDSEMEDCVTQDDVRSDVEDEMVDNIGNGTSPASRHEDPETPDPSSEASNLEVTLSSHRIIILPQRSIREKNNHIWSTTKGQSSGRTAAINIVRTNRGPTRMCRNIVDPLLCFQLFIKEEIVEEIVKWTNVEMVQKRVNLKDISASYRDTNEMEIWAIISMLTLSAVMKDNHLSTDELFNVSYGTRYVSVMSRERFEFLLRLLRMGDKLLRPNLRQEDAFTPVRKIWEIFINQCRLNYVPGTNLTVDEQLLGFRGRCPFRMYIPNKPDKYGIKFPMVCDAATKYMVDAIPYLGKSTKTQGLPLGEFYVKELTQTVHGTNRNVTCDNWFTSVPLAKSLLNSPYNLTLVGTIRSNKREIPEEVKNSRSRQVGSSMFCFDGPLTLVSYKPKPSKMVFLLSSCNEDAVVNQSNGKPDMILFYNQTKGGVDSFDQMCSSMSTNRKTNRWPMAVFYGMLNMAFVNSYIIYCHNMLAKKEKPLSRKDFMKKLSTDLTTPSMQKRLEAPTLKRSLRDNITNVLKIVPQAAIDTSFDEPEPKKRRYCGFCSYKKKRMTKTQCFKCKKPVCGEHNIDVCQDCI

SEQ ID NO: 14535 - DNA, 326 bp, Ctenoplusia sp.
  source 1..326: mol_type = other DNA
ttaaccctagaagcccaatctacgtcattctgacgtgtatgtcgccgaaaatactctgtctctttctcctgcacgatcggattgccgcgaacgctcgattcaacccagttggcgccgagatctattggaggactgcggcgttgattcggtaagtcccgccattttgtcatagtaacagtattgcacgtcagcttgacgtatatttgggctttgtgttatttttgtaaattttcaacgttagtttattattgcatctttttgttacattactggtttatttgcatgtattactcaaatattatttttattttagcgtagaaaataca

SEQ ID NO: 14536 - DNA, 370 bp, Ctenoplusia sp.
  source 1..370: mol_type = other DNA
agactgttttttttgtatttgcattatatattatattctaaagttgatttaattctaagaaaaacattaaaataagtttctttttgtaaaatttaattaattataagaaaaagtttaagttgatctcattttttataaaaatttgcaatgtttccaaagttattattgtaaaagaataaataaaagtaaactgagttttaattgatgttttattatatcattatactatatattacttaaataaaacaataactgaatgtatttctaaaaggaatcactagaaaatatagtgatcaaaaatttacacgtcatttttgcgtatgattgggctttataggttctaaaaatatgattgggcctctagggttaa

SEQ ID NO: 14537 - protein, 597 aa, Agrotis ipsilon
MESRQRLNQDEIATILENDDDYSPLDSDSEAEDRVVEDDVWSDNEDAMIDYVEDTSRQEDPDNNIASQESANLEVTSLTSHRIISLPQRSICGKNNHVWSTTKGRTTGRTSAINIIRTNRGPTRMCRNIVDPLLCFQLFITDEIIHEIVKWTNVEMIVKRQNLIDISASYRDTNTMEMWALVGILTLTAVMKDNHLSTDELFDATFSGTRYVSVMSRERFEFLIRCMRMDDKTLRPTLRSDDAFIPVRKLWEIFINQCRLNYVPGGNLTVDEQLLGFRGRCPFRMYIPNKPDKYGIRFPMMCDAATKYMIDAIPYLGKSTKTNGLPLGEFYVKELTKTVHGTNRNVTCDNWFTSIPLAKNMLQAPYNLTIVGTIRSNKREIPEEIKNSRSRPVGSSMFCFDGPLTLVSYKPKPSRMVFLLSSCDENAVINESNGKPDMILFYNQTKGGVDSFDQMCKSMSANRKTNRWPMAVFYGMLNMAFVNSYIIYCHNKINKQKKPINRKEFMKNLSTDLTTPWMQERLKAPTLKRTLRDNITNVLKNVVPPSPANNSEEPGPKKRSYCGFCSYKKRRMTKTQFYKCKKAICGEHNIDVCQDCV

SEQ ID NO: 14538 - DNA, 323 bp, Agrotis ipsilon
  source 1..323: mol_type = other DNA
ttaaccctagaagcccaatctacgtaaatttgacgtataccgcggcgaaatatatctgtctctttcacgtttaccgtcggattcccgctaacttcggaaccaactcagtagccattgagaactcccaggacacagttgcgtcatctcggtaagtgccgccattttgttgtaatagacaggttgcacgtcattttgacgtataattgggctttgtgtaacttttgaaattatttataatttttattgatgtgatttatttgagttaatcgtattgtttcgttacatttttcatatgatattaatattttcagattgaatataaa

SEQ ID NO: 14539 - DNA, 367 bp, Agrotis ipsilon
  source 1..367: mol_type = other DNA
agactgttttttttaaaaggcttataaagtattactattgcgtgatttaattttataaaaatatttaaaaccagttgatttttttaataattacctaattttaagaaaaaatgttagaagcttgatatttttgttgatttttttctaagatttgattaaaaggccataattgtattaataaagagtatttttaacttcaaatttattttatttattaattaaaacttcaattatgataatacatgcaaaaatatagttcatcaacagaaaaatataggaaaactctaatagttttatttttacacgtcatttttacgtatgattgggctttatagctagtcaaatatgattgggcttctagggttaa

SEQ ID NO: 14540 - protein, 520 aa, Megachile rotundata
MNGKDSLGEFYLDDLSDCLDCRSASSTDDESDSSNIAIRKRCPIPLIYSDSEDEDMNNNVEDNNHFVKESNRYHYQIVEKYKITSKTKKWKDVTVTEMKKFLGLIILMGQVKKDVLYDYWSTDPSIETPFFSKVMSRNRFLQIMQSWHFYNNNDISPNSHRLVKIQPVIDYFKEKFNNVYKSDQQLSLDECLIPWRGRLSIKTYNPAKITKYGILVRVLSEARTGYVSNFCVYAADGKKIEETVLSVIGPYKNMWHHVYQDNYYNSVNIAKIFLKNKLRVCGTIRKNRSLPQILQTVKLSRGQHQFLRNGHTLLEVWNNGKRNVNMISTIHSAQMAESRNRSRTSDCPIQKPISIIDYNKYMKGVDRADQYLSYYSIFRKTKKWTKRVVMFFINCALFNSFKVYTTLNGQKITYKNFLHKAALSLIEDCGTEEQGTDLPNSEPTTTRTTSRVDHPGRLENFGKHKLVNIVTSGQCKKPLRQCRVCASKKKLSRTGFACKYCNVPLHKGDCFERYHSLKKY

SEQ ID NO: 14541 - DNA, 246 bp, Megachile rotundata
  source 1..246: mol_type = other DNA
ttaaataatgcccactctagatgaacttaacactttaccgaccggccgtcgattattcgacgtttgctccccagcgcttaccgaccggccatcgattattcgacgtttgcttcccagcgcttaccgaccggtcatcgacttttgatctttccgttagatttggttaggtcagattgacaagtagcaagcatttcgcattctttattcaaataatcggtgcttttttctaagctttagcccttagaa

SEQ ID NO: 14542 - DNA, 244 bp, Megachile rotundata
  source 1..244: mol_type = other DNA
acaacttcttttttcaacaaatattgttatatggattatttatttatttatttatttatggtatattttatgtttatttatttatggttattatggtatattttatgtaaataataaactgaaaacgattgtaatagatgaaataaatattgttttaacactaatataattaaagtaaaagattttaataaatttcgttaccctacaataacacgaagcgtacaattttaccagagtttattaa

SEQ ID NO: 14543 - protein, 570 aa, Bombus impatiens
MNEKNGIGEFYLDDLSDCPDSYSRSNSGDESDGSDTIIRKRGSVLPPRYSDSEDDEINNVEDNANNVENNDDIWSTNDEAIILEPFEGSPGLKIMPSSAESVTDNVNLFFGDDFFEHLVRESNRYHYQVMEKYKIPSKAKKWTDITVPEMKKFLGLIVLMGQIKKDVLYDYWSTDPSIETPFFSQVMSRNRFVQIMQSWHFCNNDNIPHDSHRLAKIQPVIDYFRRKFNDVYKPCQQLSLDESIIPWRGRLSIKTYNPAKITKYGILVRVLSEAVTGYVCNFDVYAADGKKLEDTAVIEPYKNIWHQIYQDNYYNSVKMARILLKNKVRVCGTIRKNRGLPRSLKTIQLSRGQYEFRRNHQILLEVWNNGRRNVNMISTIHSAQLMESRSKSKRSDVPIQKPNSIIDYNKYMKGVDRADQYLAYYSIFRKTKKWTKRVVMFFINCALFNSFRVYTILNGKNITYKNFLHKVAVSWIEDGETNCTEQDDNLPNSEPTRRAPRLDHPGRLSNYGKHKLINIVTSGRSLKPQRQCRVCAVQKKRSRTCFVCKFCNVPLHKGDCFERYHTLKKY

SEQ ID NO: 14544 - DNA, 278 bp, Bombus impatiens
  source 1..278: mol_type = other DNA
ttaattttttaacattttaccgaccgatagccgattaatcgggtttttgccgctgacgcttaccgaccgataacctattaatcggctttttgtcgtcgaagcttaccaacctatagcctacctatagttaatcggttgccatggcgataaacaatctttctcattatatgagcagtaatttgttatttagtactaaggtaccttgctcagttgcgtcagttgcgttgctttgtaagctcccacagttttataccaattcgaaaaacttaccgttcgcg

SEQ ID NO: 14545 - DNA, 384 bp, Bombus impatiens
  source 1..384: mol_type = other DNA
actatttcacatttgaactaaaaaccgttgtaatagataaaataaatataatttagtattaatattatggaaacaaaagattttattcaatttaattatcctatagtaacaaaaagcggccaattttatctgagcatacgaaaagcacagatactcccgcccgacagtctaaaccgaaacagagccggcgccagggagaatctgcgcctgagcagccggtcggacgtgcgtttgctgttgaaccgctagtggtcagtaaaccagaaccagtcagtaagccagtaactgatcagttaactagattgtatagttcaaattgaacttaatctagtttttaagcgtttgaatgttgtctaacttcgttatatattatattctttttaa

SEQ ID NO: 14546 - protein, 345 aa, Mamestra sp.
MFSFVPNKEQTRTVLIFCFHLKTTAAESHRPLVEAFGEQVPTVKTCERWFQRFKSGDFDVDDKEHGKPPKRYEDAELQALLDEDDAQTQKQLAEQLEVSQQAVSNRLREGGKIQKVGRWVPHELNERQRERRKNTCEILLSRYKRKSFLHRIVTGEEKWIFFVNPKRKKSYVDPGQPATSTARPNRFGKKTRLCVWWDQSGVIYYELLKPGETVNTARYQQQLINLNRALQRKRPEYQKRQHRVIFLHDNAPSHTARAVRDTLETLNWEVLPHAAYSPDLAPSDYHLFASMGHALAEQRFDSYESVEEWLDEWFAAKDDEFYWRGIHKLPERWDNCVASDGKYFE

SEQ ID NO: 14547 - DNA, 174 bp, Mamestra sp.
  source 1..174: mol_type = other DNA
ttattgggttgcccaaaaagtaattgcggatttttcatatacctgtcttttaaacgtacatagggatcgaactcagtaaaactttgaccttgtgaaataacaaacttgactgtccaaccaccatagtttggcgcgaattgagcgtcataattgttttgactttttgcagtcaac

SEQ ID NO: 14548 - DNA, 79 bp, Mamestra sp.
  source 1..79: mol_type = other DNA
atgattttttctttttaaaccaattttaattagttaattgatataaaaatccgcaattactttttgggcaacccaataa

SEQ ID NO: 14549 - protein, 347 aa, Mayetiola destructor
MENFENWRKRRHLREVLLGHFFAKKTAAESHRLLVEVYGEHALAKTQCFEWFQRFKSGDFDTEDKERPGQPKKFEDEELEALLDEDCCQTQEELAKSLGVTQQAISKRLKAAGYIQKQGNWVPHELKPRDVERRFCMSEMLLQRHKKKSFLSRIITGDEKWIHYDNSKRKKSYVKRGGRAKSTPKSNLHGAKVMLCIWWDQRGVLYYELLEPGQTITGDLYRTQLIRLKQALAEKRPEYAKRHGAVIFHHDNARPHVALPVKNYLENSGWEVLPHPPYSPDLAPSDYHLFRSMQNDLAGKRFTSEQGIRKWLDSFLAAKPAKFFEKGIHELSERWEKVIASDGQYFE

SEQ ID NO: 14550 - DNA, 267 bp, Mayetiola destructor
  source 1..267: mol_type = other DNA
taagacttccaaaatttccacccgaactttaccttccccgcgcattatgtctctcttttcaccctctgatccctggtattgttgtcgagcacgatttatattgggtgtacaacttaaaaaccggaattggacgctagatgtccacactaacgaatagtgtaaaagcacaaatttcatatatacgtcattttgaaggtacatttgacagctatcaaaatcagtcaataaaactattctatctgtgtgcatcatatttttttattaact

SEQ ID NO: 14551 - DNA, 188 bp, Mayetiola destructor
  source 1..188: mol_type = other DNA
tgcattcattcattttgttatcgaaataaagcattaattttcactaaaaaattccggtttttaagttgtacacccaatatcatccttagtgacaattttcaaatggctttcccattgagctgaaaccgtggctctagtaagaaaaacgcccaacccgtcatcatatgccttttttttctcaacatccg

SEQ ID NO: 14552 - protein, 342 aa, Apis mellifera
MENQKEHYRHILLFYFRKGKNASQAHKKLCAVYGDEALKERQCQNWFDKFRSGDFSLKDEKRSGRPVEVDDDLIKAIIDSDRHSTTREIAEKLHVSHTCIENHLKQLGYVQKLDTWVPHELKEKHLTQRINSCDLLKKRNENDPFLKRLITGDEKWVVYNNIKRKRSWSRPREPAQTTSKAGIHRKKVLLSVWWDYKGIVYFELLPPNRTINSVVYIEQLTKLNNAVEEKRPELTNRKGVVFHHDNARPHTSLVTRQKLLELGWDVLPHPPYSPDLAPSDYFLFRSLQNSLNGKNFNNDDDIKSYLIQFFANKNQKFYERGIMMLPERWQKVIDQNGQHITE

SEQ ID NO: 14553 - DNA, 184 bp, Apis mellifera
  source 1..184: mol_type = other DNA
ttgggttggcaactaagtaattgcggatttcactcatagatggcttcagttgaatttttaggtttgctggcgtagtccaaatgtaaaacacattttgttatttgatagttggcaattcagctgtcaatcagtaaaaaaagttttttgatcggttgcgtagttttcgtttggcgttcgttgaaaa

SEQ ID NO: 14554 - DNA, 74 bp, Apis mellifera
  source 1..74: mol_type = other DNA
agttatttagttccatgaaaaaattgtctttgattttctaaaaaaaatccgcaattacttagttgccaatccaa

SEQ ID NO: 14555 - protein, 345 aa, Messor bouvieri
MSSFVPENVHLRHALLFLFHQKKRAAESHRLLVETYGEHAPTIRTCETWFRQFKCGDFNVQDKERPGRPKTFEDAELQELLDEDSTQTQKQLAEKLNVSRVAICERLQAMGKIQKMGRWVPHELNDRQMENRKIVSEMLLQRYERKSFLHRIVTGDEKWIYFENPKRKKSWLSPGEAGPSTARPNRFGRKTMLCVWWDQIGVVYYELLKPGETVNTDRYRQQMINLNCALIEKRPQYAQRHDKVILQHDNAPSHTAKPVKEMLKSLGWEVLSHPPYSPDLAPSDYHLFASMGHALAEQHFADFEEVKKWLDEWFSSKEKLFFWNGIHKLSERWTKCIESNGQYFE

SEQ ID NO: 14556 - DNA, 242 bp, Messor bouvieri
  source 1..242: mol_type = other DNA
agtcagaaatgacacctcgatcgacgactaatcgacgtctaatcgacgtcgattttatgtcaacatgttaccaggtgtgtcggtaattcctttccggtttttccggcagatgtcactagccataagtatgaaatgttatgatttgatacatatgtcattttattctactgacattaaccttaaaactacacaagttacgttccgccaaaataacagcgttatagatttataattttttgaaa

SEQ ID NO: 14557 - DNA, 146 bp, Messor bouvieri
  source 1..146: mol_type = other DNA
ataaatttgaactatccattctaagtaacgtgttttctttaacgaaaaaaccggaaaagaattaccgacactcctggtatgtcaacatgttattttcgacattgaatcgcgtcgattcgaagtcgatcgaggtgtcatttctgact

SEQ ID NO: 14558 - protein, 594 aa, Trichoplusia ni; identical to SEQ ID NO: 14484

SEQ ID NO: 14559 - DNA, 313 bp, Trichoplusia ni
  source 1..313: mol_type = other DNA
ttaaccctagaaagatagtctgcgtaaaattgacgcatgcattcttgaaatattgctctctctttctaaatagcgcgaatccgtcgctgtgcatttaggacatctcagtcgccgcttggagctcccgtgaggcgtgcttgtcaatgcggtaagtgtcactgattttgaactataacgaccgcgtgagtcaaaatgacgcatgattatcttttacgtgacttttaagatttaactcatacgataattatattgttatttcatgttctacttacgtgataacttattatatatatattttcttgttatagatatc

SEQ ID NO: 14560 - DNA, 235 bp, Trichoplusia ni
  source 1..235: mol_type = other DNA
tttgttactttatagaagaaattttgagtttttgtttttttttaataaataaataaacataaataaattgtttgttgaatttattattagtatgtaagtgtaaatataataaaacttaatatctattcaaattaataaataaacctcgatatacagaccgataaaacacatgcgtcaattttacgcatgattatctttaacgtacgtcacaatatgattatctttctagggttaa

SEQ ID NO: 14561 - DNA, 309 bp, Trichoplusia ni
  source 1..309: mol_type = other DNA
ccctagaaagatagtctgcgtaaaattgacgcatgcattcttgaaatattgctctctctttctaaatagcgcgaatccgtcgctgtgcatttaggacatctcagtcgccgcttggagctcccgtgaggcgtgcttgtcaatgcggtaagtgtcactgattttgaactataacgaccgcgtgagtcaaaatgacgcatgattatcttttacgtgacttttaagatttaactcatacgataattatattgttatttcatgttctacttacgtgataacttattatatatatattttcttgttatagatatc

SEQ ID NO: 14562 - DNA, 231 bp, Trichoplusia ni
  source 1..231: mol_type = other DNA
tttgttactttatagaagaaattttgagtttttgtttttttttaataaataaataaacataaataaattgtttgttgaatttattattagtatgtaagtgtaaatataataaaacttaatatctattcaaattaataaataaacctcgatatacagaccgataaaacacatgcgtcaattttacgcatgattatctttaacgtacgtcacaatatgattatctttctaggg

SEQ ID NO: 14563 - DNA, 14 bp, synthetic construct
  misc_feature 1..14: note = Synthetic Sequence
  source 1..14: mol_type = other DNA
ccytttkmctgcca

SEQ ID NO: 14564 - DNA, 16 bp, synthetic construct
  misc_feature 1..16: note = Synthetic Sequence
  source 1..16: mol_type = other DNA
ccctagaagcccaatc

SEQ ID NO: 14565 - DNA, 17 bp, synthetic construct
  misc_feature 1..17: note = Synthetic Sequence
  source 1..17: mol_type = other DNA
ccttccagcgggcgcgc

SEQ ID NO: 14566 - DNA, 13 bp, synthetic construct
  misc_feature 1..13: note = Synthetic Sequence
  source 1..13: mol_type = other DNA
cccagattagcct

SEQ ID NO: 14567 - DNA, 16 bp, synthetic construct
  misc_feature 1..16: note = Synthetic Sequence
  source 1..16: mol_type = other DNA
cccttaattactcgcg

SEQ ID NO: 14568 - DNA, 16 bp, synthetic construct
  misc_feature 1..16: note = Synthetic Sequence
  source 1..16: mol_type = other DNA
ccctagataactaaac

SEQ ID NO: 14569 - DNA, 13 bp, synthetic construct
  misc_feature 1..13: note = Synthetic Sequence
  source 1..13: mol_type = other DNA
ccctagaaagata

SEQ ID NO: 14570 - DNA, 347 bp, Helicoverpa sp.
  source 1..347: mol_type = other DNA
ttaaccctagaagcccaatctacgtaaatttgacgtataccgcggcgaaatatctctgtctctttcatgtttaccgtcggatcgccgctaacttctgaaccaactcagtagccattgggacctcgcaggacacagttgcgtcatctcggtaagtgccgccattttgttgtactctctattacaacacacgtcacgtcacgtcgttgcacgtcattttgacgtataattgggctttgtgtaacttttgaatttgtttcaaattttttatgtttgtgatttatttgagttaatcgtattgtttcgttacatttttcatataataataatattttcaggttgagtacaaa

SEQ ID NO: 14571 - DNA, 179 bp, synthetic construct
  source 1..179: mol_type = other DNA
tttcactaagtaattttgttcctatttagtagataagtaacacataattattgtgatattcaaaacttaagaggtttaataaataataataaaaaaaaaatggtttttatttcgtagtctgctcgacgaatgtttagttattacgtaaccgtgaatatagtttagtagtctagggttaa

SEQ ID NO: 14572 - protein, 589 aa, synthetic construct
  REGION 1..589: note = Synthetic Sequence
MAKRFYSAEEAAAHCSASSSEEFSGSDSEYVPPASESDSSTEESWCSSSTVSALEEPMEVDEDVDDLEDQEAGDRADAAAGGEPAWGPPCNFPPEIPPFTTVPGVKVDTSNFEPINFFQLFMTEAILQDMVLYTNVYAEQYLTQNPLTRGARAHAWHPTDIAEMKRFVGLTLAMGLIKANSIESYWDTTTVLSIPVFGATMSRNRYQLLLRFLHFNNNATAVPPDQPGHDRLHKLRPLIDSLSERFANVYTPCQNICIDESLMLFKGRLQFRQYIPSKRARYGIKFYKLCESSTGYTSYFLIYEGKDSKLDPPGCPPDLTVSGKIVWELISPLLGQGFHLYVDNFYSSIPLFTALYCLNTPACGTINRNRKGLPRALLDKKLNRGETYALRKNELLAIKFFDKKNVFMLTSIHDESVIREQRVGRPPKNKPLCSKEYSKYMGGVDRTDQLQHYYNATRKTRHWYKKVGIYLIQMALRNSYIVYKAAVPGPKLSYYKYQLQILPALLFGGVEEQTVPEMPDSDNVARLIGKHFIDTLPPTPGKQRPQKGCKVCRKRGIRRDTRYYCPKCPRNPGLCRKPCFEIYHTQLHY

SEQ ID NO: 14573 - DNA, 78 bp, Xenopus tropicalis
  source 1..78: mol_type = other DNA
ccctttgcctgccaatcacgcatgggatacgtcgtggcagtaaaagggcttaaatgccaacgacgcgtcccatacgtt

SEQ ID NO: 14574 - DNA, 120 bp, Xenopus tropicalis
  source 1..120: mol_type = other DNA
cctgggtaaactaaaagtcccctcgaggaaaggcccctaaagtgaaacagtgcaaaacgttcaaaaactgtctggcaatacaagttccactttgggacaaatcggctggcagtgaaaggg

SEQ ID NO: 14575 - protein, 14 aa, synthetic construct
  REGION 1..14: note = Synthetic Sequence
CCYTTTBMCTGCCA

SEQ ID NO: 14576 - protein, 610 aa, synthetic construct
  REGION 1..610: note = Synthetic Sequence
MDIERQEERIRAMLEEELSDYSDESSSEDETDHCSEHEVNYDTEEERIDSVDVPSNSRQEEANAIIANESDSDPDDDLPLSLVRQRASASRQMSGPHYTSKDGTKWYKNCQRPNVRLRSENIVTEQAQVKNIARDASTEYECWNIFVTSDMLQEILTHTNSSIRWRQTKTAAENSSASTSFYMQETTLCELKALIGLLYIAGLIKSNRQSLKDLWRTDGTGVDIFRTTMSLQRFQFLQNNIRFDDKSTRDERKQTDNMAAFRSIFDQFVQSCQNAYSPSEFLTIDEMLLSFRGRCLFRVYIPNKPAKYGIKILALVDAKNFYVKNLEVYAGKQPSGPYAVSNRPFEVVERLIQPVARSHRNVTFDNWFTGYELMLHLLNEYRLTSVGTVRKNKRQIPESFIRTDRQPNSSVFGFQKDITLVSYAPKKNKVVVVMSTMHHDNSIDESTGEKQKPEMITFYNSTKAGVDVVDELCANYNVSRNSKRWPMTLFYGVLNMAAINACIIYRTNKNVTIKRTEFIRSLGLSMIYEHLHSRNKKKNIPTYLRQRIEKQLGEPSPRHVNVPGRYVRCQDCPYKKDRKTKRSCNACAKPICMEHAKFLCENCAELDSHL

SEQ ID NO: 14577 - DNA, 221 bp, Bombyx mori
  source 1..221: mol_type = other DNA
cccggcgagcatgaggcagggtatctcataccctggtaaaattttaaagttgtgtattttataaaattttcgtctgacaacactagcgcgctcagtagctggaggcaggagcgtgcgggaggggatagtggcgtgatcgcagtgtggcacgggacaccggcgagatattcgtgtgcaaacctgtttcgggtatgttataccctgcctcattgttgacgtat

SEQ ID NO: 14578 - DNA, 208 bp, Bombyx mori
  source 1..208: mol_type = other DNA
tttaagaaaaagattaataaataataataatttcataattaaaaacttctttcattgaatgccattaaataaaccattattttacaaaataagatcaacataattgagtaaataataataagaacaatattatagtacaacaaaatatgggtatgtcataccctgccacattcttgatgtaactttttttcacctcatgctcgccggg

SEQ ID NO: 14579 - DNA, 181 bp, Xenopus tropicalis
  source 1..181: mol_type = other DNA
ccctttgcctgccaatcacgcatgggatacgtcgtggcagtaaaagggcttaaatgccaacgacgcgtcccatacgttgttggcattttaagtcttctctctgcagcggcagcatgtgccgccgctgcagagagtttctagcgatgacagcccctctgggcaacgagccgggggggctgtc

SEQ ID NO: 14580 - DNA, 181 bp, Xenopus tropicalis
  source 1..181: mol_type = other DNA
cctttttactgccaatgacgcatgggatacgtcgtggcagtaaaagggcttaaatgccaacgacgcgtcccatacgttgttggcattttaattcttctctctgcagcggcagcatgtgccgccgctgcagagagtttctagcgatgacagcccctctgggcaacgagccgggggggctgtc

SEQ ID NO: 14581 - DNA, 181 bp, Xenopus tropicalis
  source 1..181: mol_type = other DNA
cctttttactgccaatgacgcatgggatacgtcgtggcagtaaaagggcttaaatgccaacgacgcgtcccatacgttgttggcattttaagtcttctctctgcagcggcagcatgtgccgccgctgcagagagtttctagcgatgacagcccctctgggcaacgagccgggggggctgtc

SEQ ID NO: 14582 - DNA, 134 bp, Xenopus tropicalis
  source 1..134: mol_type = other DNA
cctttttactgccaatgacgcatgggatacgtcgtggcagtaaaagggcttaaatgccaacgacgcgtcccatacgttgttggcattttaagtcttctctctgcagcggcagcatgtgccgccgctgcagagag

SEQ ID NO: 14583 - DNA, 96 bp, Xenopus tropicalis
  source 1..96: mol_type = other DNA
cctttttactgccaatgacgcatgggatacgtcgtggcagtaaaagggcttaaatgccaacgacgcgtcccatacgttgttggcattttaagtctt

SEQ ID NO: 14584 - DNA, 96 bp, Xenopus tropicalis
  source 1..96: mol_type = other DNA
ccctttgcctgccaatcacgcatgggatacgtcgtggcagtaaaagggcttaaatgccaacgacgcgtcccatacgttgttggcattttaagtctt

SEQ ID NO: 14585 - DNA, 185 bp, Xenopus tropicalis
  source 1..185: mol_type = other DNA
ttatcctttttactgccaatgacgcatgggatacgtcgtggcagtaaaagggcttaaatgccaacgacgcgtcccatacgttgttggcattttaagtcttctctctgcagcggcagcatgtgccgccgctgcagagagtttctagcgatgacagcccctctgggcaacgagccgggggggctgtc

SEQ ID NO: 14586 - DNA, 234 bp, Xenopus tropicalis
  source 1..234: mol_type = other DNA
tttgcatttttagacatttagaagcctatatcttgttacagaattggaattacacaaaaattctaccatattttgaaagcttaggttgttctgaaaaaaacaatatattgttttcctgggtaaactaaaagtcccctcgaggaaaggcccctaaagtgaaacagtgcaaaacgttcaaaaactgtctggcaatacaagttccactttgggacaaatcggctggcagtgaaaggg

SEQ ID NO: 14587 - DNA, 233 bp, Xenopus tropicalis
  source 1..233: mol_type = other DNA
tttgcatttttagacatttagaagcctatatcttgttacagaattggaattacacaaaaattctaccatattttgaaagcttaggttgttctgaaaaaaacaatatattgttttcctgggtaaactaaaagtcccctcgaggaaaggcccctaaagtgaaacagtgcaaaacgttcaaaaactgtctggcaatacaagttccactttgaccaaaacggctggcagtaaaaggg

SEQ ID NO: 14588 - DNA, 148 bp, Xenopus tropicalis
  source 1..148: mol_type = other DNA
ttgttctgaaaaaaacaatatattgttttcctgggtaaactaaaagtcccctcgaggaaaggcccctaaagtgaaacagtgcaaaacgttcaaaaactgtctggcaatacaagttccactttgaccaaaacggctggcagtaaaaggg

SEQ ID NO: 14589 - DNA, 237 bp, Xenopus tropicalis
  source 1..237: mol_type = other DNA
tttgcatttttagacatttagaagcctatatcttgttacagaattggaattacacaaaaattctaccatattttgaaagcttaggttgttctgaaaaaaacaatatattgttttcctgggtaaactaaaagtcccctcgaggaaaggcccctaaagtgaaacagtgcaaaacgttcaaaaactgtctggcaatacaagttccactttgaccaaaacggctggcagtaaaagggttat

SEQ ID NO: 14590 - DNA, 149 bp, Xenopus tropicalis
  source 1..149: mol_type = other DNA
ttgttctgaaaaaaacaatatattgttttcctgggtaaactaaaagtcccctcgaggaaaggcccctaaagtgaaacagtgcaaaacgttcaaaaactgtctggcaatacaagttccactttgggacaaatcggctggcagtgaaaggg

SEQ ID NO: 14591 - DNA, 64 bp, synthetic construct
  misc_feature 1..64: note = Synthetic Sequence
  source 1..64: mol_type = other DNA
atcacgcatgggatacgtcgtggcagtaaaagggcttaaatgccaacgacgcgtcccatacgtt

SEQ ID NO: 14592 - DNA, 82 bp, synthetic construct
  misc_feature 1..82: note = Synthetic Sequence
  source 1..82: mol_type = other DNA
atgacgcatgggatacgtcgtggcagtaaaagggcttaaatgccaacgacgcgtcccatacgttgttggcattttaagtctt

SEQ ID NO: 14593 - DNA, 106 bp, synthetic construct
  misc_feature 1..106: note = Synthetic Sequence
  source 1..106: mol_type = other DNA
cctgggtaaactaaaagtcccctcgaggaaaggcccctaaagtgaaacagtgcaaaacgttcaaaaactgtctggcaatacaagttccactttgggacaaatcggc

SEQ ID NO: 14594 - DNA, 134 bp, synthetic construct
  misc_feature 1..134: note = Synthetic Sequence
  source 1..134: mol_type = other DNA
ttgttctgaaaaaaacaatatattgttttcctgggtaaactaaaagtcccctcgaggaaaggcccctaaagtgaaacagtgcaaaacgttcaaaaactgtctggcaatacaagttccactttgaccaaaacggc

SEQ ID NO: 14595 - DNA, 371 bp, Bombyx mori
  source 1..371: mol_type = other DNA
cccggcgagcatgaggcagggtatctcataccctggtaaaattttaaagttgtgtattttataaaattttcgtctgacaacactagcgcgctcagtagctggaggcaggagcgtgcgggaggggatagtggcgtgatcgcagtgtggcacgggacaccggcgagatattcgtgtgcaaacctgtttcgggtatgttataccctgcctcattgttgacgtattttttttatgtaatttttccgattattaatttcaactgttttattggtatttttatgttatccattgttctttttttatgatttactgtatcggttgtctttcgttcctttagttgagtttttttttattattttcagtttttgatcaaa

SEQ ID NO: 14596 - DNA, 364 bp, Bombyx mori
  source 1..364: mol_type = other DNA
tcatatttttagtttaaaaaaataattatatgttttataatgaaaagaatctcattatctttcagtattaggttgatttatattccaaagaataatatttttgttaaattgttgatttttgtaaacctctaaatgtttgttgctaaaattactgtgtttaagaaaaagattaataaataataataatttcataattaaaaacttctttcattgaatgccattaaataaaccattattttacaaaataagatcaacataattgagtaaataataataagaacaatattatagtacaacaaaatatgggtatgtcataccctgccacattcttgatgtaactttttttcacctcatgctcgccggg

SEQ ID NO: 14597 - DNA, 301 bp, Bombyx mori
  source 1..301: mol_type = other DNA
cccggcgagcatgaggcagggtatctcataccctggtaaaattttaaagttgtgtattttataaaattttcgtctgacaacactagcgcgctcagtagctggaggcaggagcgtgcgggaggggatagtggcgtgatcgcagtgtggcacgggacaccggcgagatattcgtgtgcaaacctgtttcgggtatgttataccctgcctcattgttgacgtattttttttatgtaatttttccgattattaatttcaactgttttattggtatttttatgttatccattgttctttttttatg

SEQ ID NO: 14598 - DNA, 285 bp, Bombyx mori
  source 1..285: mol_type = other DNA
cagggtatctcataccctggtaaaattttaaagttgtgtattttataaaattttcgtctgacaacactagcgcgctcagtagctggaggcaggagcgtgcgggaggggatagtggcgtgatcgcagtgtggcacgggacaccggcgagatattcgtgtgcaaacctgtttcgggtatgttataccctgcctcattgttgacgtattttttttatgtaatttttccgattattaatttcaactgttttattggtatttttatgttatccattgttctttttttatg

SEQ ID NO: 14599 - DNA, 205 bp, Bombyx mori
  source 1..205: mol_type = other DNA
cagggtatctcataccctggtaaaattttaaagttgtgtattttataaaattttcgtctgacaacactagcgcgctcagtagctggaggcaggagcgtgcgggaggggatagtggcgtgatcgcagtgtggcacgggacaccggcgagatattcgtgtgcaaacctgtttcgggtatgttataccctgcctcattgttgacgtat

SEQ ID NO: 14600 - DNA, 364 bp, Bombyx mori; identical to SEQ ID NO: 14596
  source 1..364: mol_type = other DNA

SEQ ID NO: 14601 - DNA, 192 bp, Bombyx mori
  source 1..192: mol_type = other DNA
tttaagaaaaagattaataaataataataatttcataattaaaaacttctttcattgaatgccattaaataaaccattattttacaaaataagatcaacataattgagtaaataataataagaacaatattatagtacaacaaaatatgggtatgtcataccctgccacattcttgatgtaactttttttca

SEQ ID NO: 14602 - DNA, 371 bp, Bombyx mori; identical to SEQ ID NO: 14595
  source 1..371: mol_type = other DNA

SEQ ID NO: 14603 - DNA, 16 bp, synthetic construct
  misc_feature 1..16: note = Synthetic Sequence
  source 1..16: mol_type = other DNA
cctcatgctcgccggg

SEQ ID NO: 14604 - protein, 589 aa, synthetic construct
  REGION 1..589: note = Synthetic Sequence
MAKRFYSAEEAAAHCMASSSEEFSGSDSEYVPPASESDSSTEESWCSSSTVSALEEPMEVDEDVDDLEDQEAGDRADAAAGGEPAWGPPCNFPPEIPPFTTVPGVKVDTSNFEPINFFQLFMTEAILQDMVLYTNVYAEQYLTQVPLPRYARAHAWHPTDIAEMKRFVGLTLAMGLIKANSLESYWDTTTVLNIPVFSATMSRNRYQLLLRFLEFNNEATAVPPDQPGHDRLHKLRPLIDSLSERFAAVYTPCQNICIDESLLLFKGRLQFRQYIPSKRARYGIKFYKLCESSSGYTSYFLIYEGKDSKLDPPGCPPDLTVSGKIVWELISPLLGQGFHLYVDNFYSSIPLFTALYCLDTPACGTINRNRKGLPRALLDKKLNRGETYALRKNELLAIKFFDKKNVFMLTSIHDESVIREQRVGRPPKNKPLCSKEYSKYMGGVDRTDQLQHYYNATRKTRAWYKKVGIYLIQMALRNSYIVYKAAVPGPKLSYYKYQLQILPALLFGGVEEQTVPEMPPSDNVARLIGKHFIDTLPPTPGKQRPQKGCKVCRKRGIRRDTRYYCPKCPRNPGLCFKPCFEIYHTQLHY

SEQ ID NO: 14605 - protein, 592 aa, synthetic construct
  REGION 1..592: note = Synthetic Sequence
MAKRFYSAEEAAAHCMASSSEEFSGSDSEYVPPASESDSSTEESWCSSSTVSALEEPMEVDEDVDDLEDQEAGDRVDAAAGGEPAWGPPCNFPPEIPPFTTVPGVKVDTSNFEPINFFQLFMTEAILQDMVLYTNVYAEQYLTQNPLPRYARAHAWHPTDIAEMKRFVGLTLAMGLIKANSLESYWDTTTVLSIPVFSATMSRNRYQLLLKFLHFNNEATAVPPDQPGHDRLHKLRPLIDSLSERFAAVYTPCQNICIDESLLLFKGRLQFRQYIPSKRARYGIKFYKLCESSSGYTSYFLIYEGKDSKLDPPGCPPDLTVSGKIVWELISPLLGQGFHLYVDNFYSSIPLFTALYCLDTPACGTINRNRKGLPRALLDKKLNRGETYALRKNELLAIKFFDKKNVFMLTSIHDESVIREQRVGRPPKNKPLCSKEYSKYMGGVDRTDQLQHYYNATRKTRAWYKKVGIYLIQMALRNSYIVYKAAVPGPKLSYYKYQLQILPALLFGGVEEQTVPEMPPSDNVARLIGKHFIDTLPPTPGKQRPQKGCKVCRKRGIRRDTRYYCPKCPRNPGLCFKPCFEIYHTQLHYGRR

SEQ ID NO: 14606 - protein, 610 aa, synthetic construct
  REGION 1..610: note = Synthetic Sequence
MDIERQEERIRAMLEEELSDYSDESSSEDETDHCSEHEVNYDTEEERIDSVDVPSNSRQEEANAIIANESDSDPDDDLPLSLVRQRASASRQVSGPFYTSKDGTKWYKNCQRPNVRLRSENIVTEQAQVKNIARDASTEYECWNIFVTSDMLQEILTHTNSSIRHRQTKTAAENSSAETSFYMQETTLCELKALIALLYLAGLIKSNRQSLKDLWRKDGTGVDIFRTTMSLQRFQFLLNNIRFDDISTRDERKQTDNMAAFRSIFDQFVQCCQNAYSPSEFLTIDEMLLSFRGRCLFRVYIPNKPAKYGIKILALVDAKNFYVVNLEVYAGKQPSGPYAVSNRPFEVVERLIQPVARSHRNVTFDNWFTGYELMLHLLNEYRLTSVGTVRKNKRQIPESFIRTDRQPNSSVFGFQKDITLVSYAPKKNKVVVVMSTMHHDNSIDESTGEKQKPEMITFYNSTKAGVDVVDELCANYNVSRNSKKWPMTLFYGVLNMAAINACIIYRTNKNVTIKRTEFIRSLGLSMMYEHLHSRNKKKNIPTYLRQRIEKQLGEPVPRHVNVPGRYVRCQDCPYKKDRKTKRSCNACAKPICMEHAKFLCENCAELDSSL

SEQ ID NO: 14607 - protein, 610 aa, synthetic construct
  REGION 1..610: note = Synthetic Sequence
MDIERQEERIRAMLEEELSDYSDESSSEDETDHCSEHEVNYDTEEERIDSVDVPSNSRQEEANAIIANESDSDPDDDLPLSLVRQRASASRQVSGPFYTSKDGTKWYKNCQRPNVRLRSENIVTEQAQVKNIARDASTEYECWNIFVTSDMLQEILTHTNSSIRHRQTKTAAENSSAETSFYMQETTLCELKALIGLLYLAGLIKSNRQSLKDLWRTDGTGVDIFRTTMSLQRFYFLQNNIRFDDKSTLDERKQTDNMAAFRSIFDQFVQSCQNAYSPSEFLTIDEMLLSFRGRCLFRVYIPNKPAKYGIKILALVDAKNFYVVNLEVYAGKQPSGPYAVSNRPFEVVERLIQPVARSHRNVTFDNWFTGYELMLHLLNEYRLTSVGTVRKNKRQIPESFIRTDRQPNSSVFGFQKDITLVSYAPKKNKVVVVMSTMHHDNSIDESTGEKQKPEMITFYNSTKAGVDVVDELCANYNVSRNSKRWPMTLFYGVLNMAAINACIIYRTNKNVTIKRTEFIRSLGLSMIYEHLHSRNKKKNIPTYLRQRIEKQLGEPSPRHVNYPGRYVRCQDCPYKKDRKTKRSCNACAKPICMEHAKFLCVNCAELDSSL

SEQ ID NO: 14608 - protein, 610 aa, synthetic construct
  REGION 1..610: note = Synthetic Sequence
MDIERQEERIRAMLEEELSDYSDESSSEDETDHCSEHEVNYDTEEERIDSVDVPSNSRQEEANAIIANESDSDPDDDLPLSLVRQRASASRQVSGPFYTSKDGTKWYKNCQRPNVRLRSENIVTEQAQVKNIARDASTEYECWNIFVTSDMLQEILTHTNSSIRHRQTKTAAENSSAETSFYMQETTLCELKALIALLYLAGLIKSNRQSLKDLWRKDGTGVDIFRTTMSLQRFQFLLNNIRFDDKSTRDERKQTDNMAAFRSIFDQFVQCCQNAYSPSEFLTIDEMLLSFRGRCLFRVYIPNKPAKYGIKILALVDAKNDYVVNLEVYAGKQPSGPYAVSNRPFEVVERLIQPVARSHRNVTFDNWFTGYECMLHLLNEYRLTSVGTVRKNKRQIPESFIRTDRQPNSSVFGFQKDITLVSYAPKKNKVVVVMSTMHHDNSIDESTGEKQKPEMITFYNSTKAGVDVVDELCANYNVSRNSKKWPMTLFYGVLNMAAINACIIYRTNKNVTIKRTEFIRSLGLSMIKEHLHSRNKKKNIPTYLRQRIEKQLGEPSPRHVNVPGRYVRCQDCPYKKDRKTKRSCNACAKPICMEHAKFLCENCAELDSSL

SEQ ID NO: 14609 - DNA, 249 bp, Trichoplusia ni
  source 1..249: mol_type = other DNA
tctaaatagcgcgaatccgtcgctgtgcatttaggacatctcagtcgccgcttggagctcccgtgaggcgtgcttgtcaatgcggtaagtgtcactgattttgaactataacgaccgcgtgagtcaaaatgacgcatgattatcttttacgtgacttttaagatttaactcatacgataattatattgttatttcatgttctacttacgtgataacttattatatatatattttcttgttatagatatc

SEQ ID NO: 14610 - DNA, 231 bp, Trichoplusia ni; identical to SEQ ID NO: 14562
  source 1..231: mol_type = other DNA

SEQ ID NO: 14611 - protein, 592 aa, synthetic construct
  REGION 1..592: note = Synthetic Sequence
MAKRFYSAEEAAAHCMASSSEEFSGSDSEYVPPASESDSSTEESWCSSSTVSALEEPMEVDEDVDDLEDQEAGDRADAAAGGEPAWGPPCNFPPEIPPFTTVPGVKVDTSNFEPINFFQLFMTEAILQDMVLYTNVYAEQYLTQNVLPRYARAHAWHPTDIAEMKRFVGLTLAMGLIKANSLESYWDTTTVLSIPVFSATMSRNRYQLLLRFLHFNNDATAVPPDQPGHDRLHKLRPLIDSLTERFAAVYTPCQNICIDESLLLFKGRLQFRQYIPSKRARYGIKFYKLCESSSGYTSYFLIYEGKDSKLDPPGCPPDLTVSGKIVWELISPLLGQGFHLYVDNFYSSIPLFTALYCLDTPACGTINRNRKGLPRALLDKKLNRGETYALRKNELLAIKFFDKKNVFMLTSIHDESVIREQRVGRPPKNKPLCSKEYSKYMGGVDRTDQLQHYYNATRKTRAWYKKVGIYLIQMALRNSYIVYKAAVPGPKLSYYKYQLQILPALLFGGVEEQTVPEMPPSDNVARLIGKHFIDTLPPTPGKQRPQKGCKVCRKRGIRRDTRYYCPKCPRNPGLCFKPCFEIYHTQLHYGRR

SEQ ID NO: 14612 - protein, 592 aa, synthetic construct
  REGION 1..592: note = Synthetic Sequence
MAKRFYSAEEAAAHCMASSSEEFSGSDSEYVPPASESDSSTEESWCSSSTVSALEEPMEVDEDVDDLEDQEAGDRADAAPGGEPAWGPPCNFPPEIPPFTTVPGVKVDTSNFEPINFFQLFMTEAILQDMVLYTNVYAEQYLTQVPLPRYARAHAWHPTDIAEMKRFVGLTLAMGLIKANSLESYWDTTTVLSIPVFSATMSRNRYQLLLRFLHFNNEATAVPPDQPGHDRLHKLRPLIDSLSERFAAVYTPCQNICIDESLLLFKGRLQFRQYIPSKRARYGIKFYKLCESSSGYTSYFLIYEGKDSKLDPPGCPPDLTVSGKIVWELISPLLGQGFHLYVDNFYSSIPLFTALYCLDTPACGTINRNRKGLPRALLDKKLNRGETYALRKNELLAIKFFDKKNVFMLTSIHDESVIREQRVGRPPKNKPLCSKEYSKYMGGVDRTDQLQHYYNATRKTRAWYKKVGIYLIQMALRNSYIVYKAAVPGPKLSYYKYQLQILPALLFGGVEEQTVPEMPPSDNVARLIGKHFIDTLPPTPGKQRPQKGCKVCRKRGIRRDTRYYCPKCPRNPGLCFKPCFEIYHTQLHYGRR

SEQ ID NO: 14613 - protein, 592 aa, synthetic construct
  REGION 1..592: note = Synthetic Sequence
MAKRFYSAEEAAAHCMASSSEEFSGSDSEYVPPASESDSSTEESWCSSSTVSALEEPMEVDEDVDDLEDQEAGDRADAAAGGEPAWGPPCNFPPEIPPFTTVPGVKVDTSNFEPINFFQLFMTEAILQDMVLYTNVYAEQYLTQVPLPRYARAHAWHPTDIAEMKRFVGLTLAMGLIKANSLESYWDTTTVLNIPVFSATMSRNRYQLLLRFLEFNNNATAVPPDQPGHDRLHKLRPLIDSLSERFAAVYTPCQNICIDESLLLFKGRLQFRQYIPSKRARYGIKFYKLCESSSGYTSYFLIYEGKDSKLDPPGCPPDLTVSGKIVWELISPLLGQGFHLYVDNFYSSIPLFTALYCLDTPACGTINRNRKGLPRALLDKKLNRGETYALRKNELLAIKFFDKKNVFMLTSIHDESVIREQRVGRPPKNKPLCSKEYSKYMGGVDRTDQLQHYYNATRKTRAWYKKVGIYLIQMALRNSYIVYKAAVPGPKLSYYKYQLQILPALLFGGVEEQTVPEMPPSDNVARLIGKHFIDTLPPTPGKQRPQKGCKVCRKRGIRRDTRYYCPKCPRNPGLCFKPCFEIYHTQLHYGRR

SEQ ID NO: 14614 - DNA, 14 bp, synthetic construct
  misc_feature 1..14: note = Synthetic Sequence
  source 1..14: mol_type = other DNA
atgaggcagggtat

SEQ ID NO: 14615 - DNA, 14 bp, synthetic construct
  misc_feature 1..14: note = Synthetic Sequence
  source 1..14: mol_type = other DNA
ataccctgcctcat

SEQ ID NO: 14616 - DNA, 10 bp, synthetic construct
  misc_feature 1..10: note = Synthetic Sequence
  source 1..10: mol_type = other DNA
ggcagggtat

SEQ ID NO: 14617 - DNA, 10 bp, synthetic construct
  misc_feature 1..10: note = Synthetic Sequence
  source 1..10: mol_type = other DNA
ataccctgcc

SEQ ID NO: 14618 - DNA, 10 bp, synthetic construct
  misc_feature 1..10: note = Synthetic Sequence
  source 1..10: mol_type = other DNA
taaaatttta

SEQ ID NO: 14619 - DNA, 12 bp, synthetic construct
  misc_feature 1..12: note = Synthetic Sequence
  source 1..12: mol_type = other DNA
attttataaaat

SEQ ID NO: 14620 - DNA, 10 bp, synthetic construct
  misc_feature 1..10: note = Synthetic Sequence
  source 1..10: mol_type = other DNA
tcataccctg

SEQ ID NO: 14621 - DNA, 13 bp, synthetic construct
  misc_feature 1..13: note = Synthetic Sequence
  source 1..13: mol_type = other DNA
taaataataataa

SEQ ID NO: 14622 - DNA, 14 bp, synthetic construct
  misc_feature 1..14: note = Synthetic Sequence
  source 1..14: mol_type = other DNA
ccctttgcctgcca

SEQ ID NO: 14623 - DNA, 14 bp, synthetic construct
  misc_feature 1..14: note = Synthetic Sequence
  source 1..14: mol_type = other DNA
tggcagtgaaaggg

SEQ ID NO: 14624 - protein, 589 aa, synthetic construct
  REGION 1..589: note = Synthetic Sequence
MAKRFYSAEEAAAHCMASSSEEFSGSDSEYVPPASESDSSTEESWCSSSTVSALEEPMEVDEDVDDLEDQEAGDRADAAAGGEPAWGPPCNFPPEIPPFTTVPGVKVDTSNFEPINFFQLFMTEAILQDMVLYTNVYAEQYLTQNPLTRYARAHAWHPTDIAEMKRFVGLTLAMGLIKANSLESYWDTTTVLSIPVFSATMSRNRYQLLLRFLHFNNNATAVPPDQPGHDRLHKLRPLIDSLSERFAAVYTPCQNICIDESLLLFKGRLQFRQYIPSKRARYGIKFYKLCESSSGYTSYFLIYEGKDSKLDPPGCPPDLTVSGKIVWELISPLLGQGFHLYVDNFYSSIPLFTALYCLNTPACGTINRNRKGLPRALLDKKLNRGETYALRKNELLAIKFFDKKNVFMLTSIHDESVIREQRVGRPPKNKPLCSKEYSKYMGGVDRTDQLQHYYNATRKTRHWYKKVGIYLIQMALRNSYIVYKAAVPGPKLSYYKYQLQILPALLFGGVEEQTVPEMPPSDNVARLIGKHFIDTLPPTPGKQRPQKGCKVCRKRGIRRDTRYYCPKCPRNPGLCRKPCFEIYHTQLHY

SEQ ID NO: 14625 - protein, 589 aa, synthetic construct
  REGION 1..589: note = Synthetic Sequence
MAKRFYSAEEAAAHCMASSSEEFSGSDSEYVPPASESDSSTEESWCSSSTVSALEEPMEVDEDVDDLEDQEAGDRADAAAGGEPAWGPPCNFPPEIPPFTTVPGVKVDTSNFEPINFFQLFMTEAILQDMVLYTNVYAEQYLTQNPLPRYARAHAWHPTDIAEMKRFVGLTLAMGLIKANSLESYWDTTTVLKIPVFSATMSRNRYQLLLRFLHFNNNATAVPPDQPGHDRLHKLRPLIDSLSERFAAVYTPCQNICIDESLLLFKGRLQFRQYIPSKRARYGIKFYKLCESSSGYTSYFLIYEGKDSKLDPPGCPPDLTVSGKIVWELISPLLGQGFHLYVDNFYSSIPLFTALYCLNTPACGTINRNRKGLPRALLDKKLNRGETYALRKNELLAIKFFDKKNVFMLTSIHDESVIREQRVGRPPKNKPLCSKEYSKYMGGVDRTDQLQHYYNATRKTRHWYKKVGIYLIQMALRNSYIVYKAAVPGPKLSYYKYQLQILPALLFGGVEEQTVPEMPPSDNVARLIGKHFIDTLPPTPGKQRPQKGCKVCRKRGIRRDTRYYCPKCPRNPGLCFKPCFEIYHTQLHY

SEQ ID NO: 14626 - DNA, 1794 bp, synthetic construct
  misc_feature 1..1794: note = Synthetic Nucleotide
  source 1..1794: mol_type = other DNA
atggcacccaaaaagaaacgtaaagtgatggccaaaagattttacagcgccgaagaagcagcagcacattgcatggcatcgtcatccgaagaattctcggggagcgattccgaatatgtcccaccggcctcggaaagcgattcgagcactgaggagtcgtggtgttcctcctcaactgtctcggctcttgaggagccgatggaagtggatgaggatgtggacgacttggaggaccaggaagccggagacagggccgacgctgccgcgggaggggagccggcgtggggacctccatgcaattttcctcccgaaatcccaccgttcactactgtgccgggagtgaaggtcgacacgtccaacttcgaaccgatcaatttctttcaactcttcatgactgaagcgatcctgcaagatatggtgctctacactaatgtgtacgccgagcagtacctgactcaaaacccgctgcctcgctacgcgagagcgcatgcgtggcacccgaccgatatcgcggagatgaagcggttcgtgggactgaccctcgcaatgggcctgatcaaggccaacagcctcgagtcatactgggataccacgactgtgcttagcattccggtgttctccgctaccatgtcccgtaaccgctaccaactcctgctgcggttcctccacttcaacaacaatgcgaccgctgtgccacctgaccagccaggacacgacagactccacaagctgcggccattgatcgactcgctgagcgagcgattcgccgcggtgtacaccccttgccaaaacatttgcatcgacgagtcgcttctgctgtttaaaggccggcttcagttccgccagtacatcccatcgaagcgcgctcgctatggtatcaaattctacaaactctgcgagtcgtccagcggctacacgtcatacttcttgatctacgaggggaaggactctaagctggacccaccggggtgtccaccggatcttactgtctccggaaaaatcgtgtgggaactcatctcacctctcctcggacaaggctttcatctctacgtcgacaatttctactcatcgatccctctgttcaccgccctctactgcctggatactccagcctgtgggaccattaacagaaaccggaagggtctgccgagagcactgctggataagaagttgaacaggggagagacttacgcgctgagaaagaacgaactcctcgccatcaaattcttcgacaagaaaaatgtgtttatgctcacctccatccacgacgaatccgtcatccgggagcagcgcgtgggcaggccgccgaaaaacaagccgctgtgctctaaggaatactccaagtacatggggggtgtcgaccggaccgatcagctgcagcattactacaacgccactagaaagacccgggcctggtacaagaaagtcggcatctacctgatccaaatggcactgaggaattcgtatattgtctacaaggctgccgttccgggcccgaaactgtcatactacaagtaccagcttcaaatcctgccggcgctgctgttcggtggagtggaagaacagactgtgcccgagatgccgccatccgacaacgtggcccggttgatcggaaagcacttcattgataccctgcctccgacgcctggaaagcagcggccacagaagggatgcaaagtttgccgcaagcgcggaatacggcgcgatacccgctactattgcccgaagtgcccccgcaatcccggactgtgtttcaagccctgttttgaaatctaccacacccagttgcattac

SEQ ID NO: 14627 - protein, 589 aa, synthetic construct
  REGION 1..589: note = Synthetic Sequence
MAKRFYSAEEAAAHCMASSSEQTSGSDSEYVPPASESDSSTEESWCSSSTVSALEEPMEVDEDVDDLEDQEAGDRADAAAGGEPAWGPPCNFPPEIPPFTTVPGVKVDTSNFEPINFFQLFMTEAILQDMVLYTNVYAEQYLTQNPLTRYARAHAWHPTDIAEMKRFVGLTLAMGLIKANSIESYWDTTTVLSIPVFGATMSRNRYQLLLRFLHFNNNATAVPPDQPGHDRLHKLRPLIDSLSERFANVYTPCQNICIDESLLLFKGRLQFRQYIPSKRARYGIKFYKLCESSSGYTSYFLIYEGKDSKLDPPGCPPDLTVSGKIVWELISPLLGQGFHLYVDNFYSSIPLFTALYCLNTPACGTINRNRKGLPRALLDKKLNRGETYALRKNELLAIKFFDKKNVFMLTSIHDESVIREQRVGRKPKNKPLCSKEYSKYMGGVDRTDQLQHYYNATRKTRHWYKKVGIYLIQMALRNSYIVYKAAVPGPKLSYYKYQLQILPALLFGGVEEQTVPEMPPSDNVARLIGKHFIDTLPPTPGKQRPQKGCKVCRKRGIRRDTRYYCPKCPRNPGLCRKPCFEIYHTQLHY

SEQ ID NO: 14628 - protein, 589 aa, synthetic construct
  REGION 1..589: note = Synthetic Sequence
MAKRFYSAEEAAAHCSASSSEEFSGSDSEYVPPASESDSSTEESWCSSSTVSALEEPMEVDEDVDDLEDQEAGDRADAAAGGEPAWGPPCNFPPEIPPFTTVPGVKVDTSNFEPINFFQLFMTEAILQDMVLYTNVYAEQYLTQNPLTRGARAHAWHPTDIAEMKRFVGLTLAMGLIKANSLESYWDTTTVLSIPVFGATMSRNRYQLLLRFLHFNNNATAVPPDQPGHDRLHKLRPLIDSLSERFANVYTPCQNICIDESLMLFKGRLQFRQYIPSKRARYGIKFYKLCESSTGYTSYFLIYEGKDSKLDPPGCPPDLTVSGKIVWELISPLLGQGFHLYVDNFYSSIPLFTALYCLNTPACGTINRNRKGLPRALLDKKLNRGETYALRKNELLAIKFFDKKNVFMLTSIHDESVIREQRVGRPPKNKPLCSKEYSKYMGGVDRTDQLQHYYNATRKTRHWYKKVGIYLIQMALRNSYIVYKAAVPGPKLSYYKYQLQILPALLFGGVEEQTVPEMPPSDNVARLIGKHFIDTLPPTPGKQRPQKGCKVCRKRGIRRDTRYYCPKCPRNPGLCRKPCFEIYHTQLHY

SEQ ID NO: 14629 - DNA, 1857 bp, synthetic construct
  misc_feature 1..1857: note = Synthetic Sequence
  source 1..1857: mol_type = other DNA
atggcacccaaaaagaaacgtaaagtgatggacattgaaagacaggaagaaagaatcagggcgatgctcgaagaagaactgagcgactactccgacgaatcgtcatcagaggatgaaaccgaccactgtagcgagcatgaggttaactacgacaccgaggaggagagaatcgactctgtggatgtgccctccaactcacgccaagaagaggccaatgcaattatcgcaaacgaatcggacagcgatccagacgatgatctgccactgtccctcgtgcgccagcgggccagcgcttcgagacaagtgtcaggtccattctacacttcgaaggacggcactaagtggtacaagaattgccagcgacctaacgtcagactccgctccgagaatatcgtgaccgaacaggctcaggtcaagaatatcgcccgcgacgcctcgactgagtacgagtgttggaatatcttcgtgacttcggacatgctgcaagaaattctgacgcacaccaacagctcgattaggcatcgccagaccaagactgcagcggagaactcatcggccgaaacctccttctatatgcaagagactactctgtgcgaactgaaggcgctgattgcactgctgtacttggccggcctcatcaaatcaaataggcagagcctcaaagatctctggagaacggatggaactggagtggatatctttcggacgactatgagcttgcagcggttccagtttctgcaaaacaatatcagattcgacgacaagtccacccgggacgaaaggaaacagactgacaacatggctgcgttccggtcaatattcgatcagtttgtgcagtgctgccaaaacgcttatagcccatcggaattcctgaccatcgacgaaatgcttctctccttccgggggcgctgcctgttccgagtgtacatcccgaacaagccggctaaatacggaatcaaaatcctggccctggtggacgccaagaatttctacgtcgtgaatctcgaagtgtacgcaggaaagcaaccgtcgggaccgtacgctgtttcgaaccgcccgtttgaagtcgtcgagcggcttattcagccggtggccagatcccaccgcaatgttaccttcgacaattggttcaccggctacgagctgatgcttcaccttctgaacgagtaccggctcactagcgtggggactgtcaggaagaacaagcggcagatcccagaatccttcatccgcaccgaccgccagcctaactcgtccgtgttcggatttcaaaaggatatcacgcttgtctcgtacgcccccaagaaaaacaaggtcgtggtcgtgatgagcaccatgcatcacgacaacagcatcgacgagtcaaccggagaaaagcaaaagcccgagatgatcaccttctacaattcaactaaggccggcgtcgacgtcgtggatgaactgtgcgcgaactataacgtgtcccggaactctaagcggtggcctatgactctcttctacggagtgctgaatatggccgcaatcaacgcgtgcatcatctaccgcaccaacaagaacgtgaccatcaagcgcaccgagttcatcagatcgctgggtttgagcatgatctacgagcacctccattcacggaacaagaagaagaatatccctacttacctgaggcagcgtatcgagaagcagttgggagaaccaagcccgcgccacgtgaacgtgccggggcgctacgtgcggtgccaagattgcccgtacaaaaaggaccgcaaaaccaaaagatcgtgtaacgcgtgcgccaaacctatctgcatggagcatgccaaatttctgtgtgaaaattgtgctgaactcgattcctccctg

SEQ ID NO: 14630 - protein, 608 aa, synthetic construct
  REGION 1..608: note = Synthetic Sequence
MDIERQEERIRAMLEEELSDYSDESSSEDETDHCSEHEVNYDTEEERIDSVDVPSNSRQEEANAIIANESDSDPDDDLPLSLVRQRASASRQVSGPFYTSKDGTKWYKNCQRPNVRLRSENIVTEQAQVKNIARDASTEYECWNIFVTSDMLQEILTHTNSSIRWRQTKTAAENSSAETSFYMQETTLCELKALIGLLYIAGLIKSNRQSLKDLWRTDGTGVDIFRTTMSLQRFQFLLNNIRFDDKSTRDERKQTDNMAAFRSIFDQFVQSCQNAYSPSEFLTIDEMLLSFRGRCLFRVYIPNKPAKYGIKILALVDAKNFYVHNLEVYAGKQPSGPYAVSNRPFEVVERLIQPVARSHRNVTFDNWFTGYEVMLHLLNEYRLTSVGTVRKNKRQIPESFIRTDRQPNSSVFGFQKDITLVSYAPKKNKVVVVMSTMHHDNSIDESTGEKQKPEMITFYNSTKAGVDVVDELCANYNVSRNSKRWPMTLFYGVLNMAAINACIIYRTNKNVTIKRTEFIRSLGLSMIYEHLHSRNKKKNIPTYLRQRIEKQLGEPSPRHVNVPGRYVRCQDCPYKKDRKTKRSCNACAKPICMEHAKFLCENCAHLDS

SEQ ID NO: 14631 - protein, 610 aa, synthetic construct
  REGION 1..610: note = Synthetic Sequence
MDIERQEERIRAMLEEELSDYSDESSSEDETDHCSEHEVNYDTEEERIDSVDVPSNSRQEEANAIIANESDSDPDDDLPLSLVRQRASASRQVSGPFYTSKDGTKWYKNCQRPNVRLRSENIVTEQAQVKNIARDASTEYECWNIFVTSDMLQEILTHTNSSIRWRQTKTAAENSSASTSFYMQETTLCELKALIGLLYIAGLIKSNRQSLKDLWRTDGTGVDIFRTTMSLQRFQFLLNNIRFDDKSTRDERKQTDNMAAFRSIFDQFVQSCQNAYSPSEFLTIDEMLLSFRGRCLFRVYIPNKPAKYGIKILALVDAKNFYVKNLEVYAGKQPSGPYAVSNRPFEVVERLIQPVARSHRNVTFDNWFTGYELMLHLLNEYRLTSVGTVRKNKRQIPESFIRTDRQPNSSVFGFQKDITLVSYAPKKNKVVVVMSTMHHDNSIDESTGEKQKPEMITFYNSTKAGVDVVDELCANYNVSRNSKRWPMTLFYGVLNMAAINACIIYRTNKNVTIKRTEFIRSLGLSMIYEHLHSRNKKKNIPTYLRQRIAMQLGEPSPRHVNVPGRYVRCQDCPYKKDRKTKRSCNACAKPICMEHAKFLCENCAELDSSL

SEQ ID NO: 14632 - protein, 610 aa, synthetic construct
  REGION 1..610: note = Synthetic Sequence
MDIERQEERIRAMLEEELSDYSDESSSEDETDHCSEHEVNYDTEEERIDSVDVPSNSRQEEANAIIANESDSDPDDDLPLSLVRQRASASRQVSGPFYTSKDGTKWYKNCQRPNVRLRSENIVTEQAQVKNIARDASTEYECWNIFVTSDMLQEILTHTNSSIRWRQTKTAAENSSAETSFYMQETTLCELKALIGLLYIAGLIKSNRQSLKDLWRTDGTGVDIFRTTMSLQRFQFLLNNIRFDDKSTRDERKQTDNMAAFRSIFDQFVQSCQNAYSPSEFLTIDEMLLSFRGRCLFRVYIPNKPAKYGIKILALVDAKNFYVKNLEVYAGKQPSGPYAVSNRPFEVVERLIQPVARSHRNVTFDNWFTGYELMLHLLNEYRLTSVGTVRKNKTQIPENFIRTDRQPNSSVFGFQKDITLVSYAPKKNKVVVVMSTMHHDNSIDESTGEKQKPEMITFYNSTKAGVDVVDELQANYNVSRNSKRWPMTLFYGVLNMAAINACIIYRTNKNVTIKRTEFIRSLGLSMIYEHLHSRNKKKNIPTYLRQRIEKQLGEPSPRHVNVPGRYVRCQDCPYKKDRKTKRSCNACAKPICMEHAKFLCENCAELDSSL

SEQ ID NO: 14633 - protein, 610 aa, synthetic construct
  REGION 1..610: note = Synthetic Sequence
MDIERQEERIRAMLEEELSDYSDESSSEDETDHCSEHEVNYDTEEERIDSVDVPSNSRQEEANAIIANESDSDPDDDLPLSLVRQRASASRQVSGPFYTSKDGTKWYKNCQRPNVRLRSENIVTEQAQVKNIARDASTEYECWNIFVTSDMLQEILTHTNSSIRWRQTKTAAENSSAETSFYMQETTLCELKALIGLLYIAGLIKSNRQSLKDLWRTDGTGVDIFRTTMSLQRFQFLQNNIRFDDKSTRDERKQTDNMAAFRSIFDQFVQSCQNAYSPSEFLTIDEMLLSFRGRCLFRVYIPNKPAKYGIKILALVDAKNFYVKNLEVYAGKQPSGPYAVSNRPFEVVERLIQPVARSHRNVTFDNWFTGYELMLHLLNEYRLTSVGTVRKNKRQIPESFIRTDRQPNSSVFGFQKDITLVSYAPKKNKVVVVMSTMHHDNSIDESTGEKQKPEMITFYNSTKAGVDVVDELCANYNVSRNSKRWPMTLFYGVLNMAAINACIIYRTNKNVTIKRTEFIRSLGLSMIYEHLHSRNKKKNIPTYLRQRIEKQLGEPSPRHVNVPGRYVRCQDCPYKKDRKTKRSCNACAKPICMEHAKFLCENCAELDSSL

SEQ ID NO: 14634 - protein, 610 aa, synthetic construct
  REGION 1..610: note = Synthetic Sequence
MDIERQEERIRAMLEEELSDYSDESSSEDETDHCSEHEVNYDTEEERIDSVDVPSNSRQEEANAIIANESDSDPDDDLPLSLVRQRASASRQVSGPFYTSKDGTKWYKNCQRPNVRLRSENIVTEQAQVKNIARDASTEYECWNIFVTSDMLQEILTHTNSSIRHRQTKTAAENSSAETSFYMQETTLCELKALIALLYLAGLIKSNRQSLKDLWRTDGTGVDIFRTTMSLQRFQFLQNNIRFDDKSTRDERKQTDNMAAFRSIFDQFVQCCQNAYSPSEFLTIDEMLLSFRGRCLFRVYIPNKPAKYGIKILALVDAKNDYVVNLEVYAGKQPSGPYAVSNRPFEVVERLIQPVARSHRNVTFDNWFTGYELMLHLLNEYRLTSVGTVRKNKRQIPESFIRTDRQPNSSVFGFQKDITLVSYAPKKNKVVVVMSTMHHDNSIDESTGEKQKPEMITFYNSTKAGVDVVDELCANYNVSRNSKRWPMTLFYGVLNMAAINACIIYRTNKNVTIKRTEFIRSLGLSMIYEHLHSRNKKKNIPTYLRQRIEKQLGEPSSRHVNVKGRYVRCQDCPYKKDRKTKRSCNACAKPICMEHAKFLCENCAELDSSL

SEQ ID NO: 14635 - protein, 107 aa, Homo sapiens
GVQVETISPGDGRTFPKRGQTCVVHYTGMLEDGKKVDSSRDRNKPFKFMLGKQEVIRGWEEGVAQMSVGQRAKLTISPDYAYGATGHPGIIPPHATLVFDVELLKLE

SEQ ID NO: 14636 - DNA, 321 bp, synthetic construct
  misc_feature 1..321: note = Synthetic Sequence
  source 1..321: mol_type = other DNA
ggggtccaggtcgagactatttcaccaggggatgggcgaacatttccaaaaaggggccagacttgcgtcgtgcattacaccgggatgctggaggacgggaagaaagtggacagctccagggatcgcaacaagcccttcaagttcatgctgggaaagcaggaagtgatccgaggatgggaggaaggcgtggcacagatgtcagtcggccagcgggccaaactgaccattagccctgactacgcttatggagcaacaggccacccagggatcattccccctcatgccaccctggtcttcgatgtggaactgctgaagctggag

SEQ ID NO: 14637 - protein, 5 aa, synthetic construct
  REGION 1..5: note = Synthetic Sequence
GGGGS

SEQ ID NO: 14638 - DNA, 15 bp, synthetic construct
  misc_feature 1..15: note = Synthetic Sequence
  source 1..15: mol_type = other DNA
ggaggaggaggatcc

SEQ ID NO: 14639 - protein, 282 aa, synthetic construct
  REGION 1..282: note = Synthetic Sequence
GFGDVGALESLRGNADLAYILSMEPCGHCLIINNVNFCRESGLRTRTGSNIDCEKLRRRFSSLHFMVEVKGDLTAKKMVLALLELAQQDHGALDCCVVVILSHGCQASHLQFPGAVYGTDGCPVSVEKIVNIFNGTSCPSLGGKPKLFFIQACGGEQKDHGFEVASTSPEDESPGSNPEPDATPFQEGLRTFDQLDAISSLPTPSDIFVSYSTFPGFVSWRDPKSGSWYVETLDDIFEQWAHSEDLQSLLLRVANAVSVKGIYKQMPGCFNFLRKKLFFKTS

SEQ ID NO: 14640 - DNA, 846 bp, synthetic construct
  misc_feature 1..846: note = Synthetic Sequence
  source 1..846: mol_type = other DNA
ggatttggggacgtgggggccctggagtctctgcgaggaaatgccgatctggcttacatcctgagcatggaaccctgcggccactgtctgatcattaacaatgtgaacttctgcagagaaagcggactgcgaacacggactggctccaatattgactgtgagaagctgcggagaaggttctctagtctgcactttatggtcgaagtgaaaggggatctgaccgccaagaaaatggtgctggccctgctggagctggctcagcaggaccatggagctctggattgctgcgtggtcgtgatcctgtcccacgggtgccaggcttctcatctgcagttccccggagcagtgtacggaacagacggctgtcctgtcagcgtggagaagatcgtcaacatcttcaacggcacttcttgccctagtctggggggaaagccaaaactgttctttatccaggcctgtggcggggaacagaaagatcacggcttcgaggtggccagcaccagccctgaggacgaatcaccagggagcaaccctgaaccagatgcaactccattccaggagggactgaggacctttgaccagctggatgctatctcaagcctgcccactcctagtgacattttcgtgtcttacagtaccttcccaggctttgtctcatggcgcgatcccaagtcagggagctggtacgtggagacactggacgacatctttgaacagtgggcccattcagaggacctgcagagcctgctgctgcgagtggcaaacgctgtctctgtgaagggcatctacaaacagatgcccgggtgcttcaattttctgagaaagaaactgttctttaagacttcc

SEQ ID NO: 14641 - protein, 394 aa, synthetic construct
  REGION 1..394: note = Synthetic Sequence
GVQVETISPGDGRTFPKRGQTCVVHYTGMLEDGKKVDSSRDRNKPFKFMLGKQEVIRGWEEGVAQMSVGQRAKLTISPDYAYGATGHPGIIPPHATLVFDVELLKLEGGGGSGFGDVGALESLRGNADLAYILSMEPCGHCLIINNVNFCRESGLRTRTGSNIDCEKLRRRFSSLHFMVEVKGDLTAKKMVLALLELAQQDHGALDCCVVVILSHGCQASHLQFPGAVYGTDGCPVSVEKIVNIFNGTSCPSLGGKPKLFFIQACGGEQKDHGFEVASTSPEDESPGSNPEPDATPFQEGLRTFDQLDAISSLPTPSDIFVSYSTFPGFVSWRDPKSGSWYVETLDDIFEQWAHSEDLQSLLLRVANAVSVKGIYKQMPGCFNFLRKKLFFKTS

SEQ ID NO: 14642 - DNA, 1182 bp, synthetic construct
  misc_feature 1..1182: note = Synthetic Sequence
  source 1..1182: mol_type = other DNA
ggggtccaggtcgagactatttcaccaggggatgggcgaacatttccaaaaaggggccagacttgcgtcgtgcattacaccgggatgctggaggacgggaagaaagtggacagctccagggatcgcaacaagcccttcaagttcatgctgggaaagcaggaagtgatccgaggatgggaggaaggcgtggcacagatgtcagtcggccagcgggccaaactgaccattagccctgactacgcttatggagcaacaggccacccagggatcattccccctcatgccaccctggtcttcgatgtggaactgctgaagctggagggaggaggaggatccggatttggggacgtgggggccctggagtctctgcgaggaaatgccgatctggcttacatcctgagcatggaaccctgcggccactgtctgatcattaacaatgtgaacttctgcagagaaagcggactgcgaacacggactggctccaatattgactgtgagaagctgcggagaaggttctctagtctgcactttatggtcgaagtgaaaggggatctgaccgccaagaaaatggtgctggccctgctggagctggctcagcaggaccatggagctctggattgctgcgtggtcgtgatcctgtcccacgggtgccaggcttctcatctgcagttccccggagcagtgtacggaacagacggctgtcctgtcagcgtggagaagatcgtcaacatcttcaacggcacttcttgccctagtctggggggaaagccaaaactgttctttatccaggcctgtggcggggaacagaaagatcacggcttcgaggtggccagcaccagccctgaggacgaatcaccagggagcaaccctgaaccagatgcaactccattccaggagggactgaggacctttgaccagctggatgctatctcaagcctgcccactcctagtgacattttcgtgtcttacagtaccttcccaggctttgtctcatggcgcgatcccaagtcagggagctggtacgtggagacactggacgacatctttgaacagtgggcccattcagaggacctgcagagcctgctgctgcgagtggcaaacgctgtctctgtgaagggcatctacaaacagatgcccgggtgcttcaattttctgagaaagaaactgttctttaagacttcc

SEQ ID NO: 14643 - protein, 288 aa, Homo sapiens
MQIPQAPWPVVWAVLQLGWRPGWFLDSPDRPWNPPTFSPALLVVTEGDNATFTCSFSNTSESFVLNWYRMSPSNQTDKLAAFPEDRSQPGQDCRFRVTQLPNGRDFHMSVVRARRNDSGTYLCGAISLAPKAQIKESLRAELRVTERRAEVPTAHPSPSPRPAGQFQTLVVGVVGGLLGSLVLLVWVLAVICSRAARGTIGARRTGQPLKEDPSAVPVFSVDYGELDFQWREKTPEPPVPCVPEQTEYATIVFPSGMGTSSPARRGSADGPRSAQPLRPEDGHCSWPL

SEQ ID NO: 14644 - protein, 520 aa, Homo sapiens
MGKPSSMDTKFKDDLFRKYVQFHESKVDTTTSRQRPGSDECLRVAASTLLSLHKVDPFYRFRLIQFYEVVESSLRSLSSSSLRALHGAFSMLETVGINLFLYPWKKEFRSIKTYTGPFVYYVKSTLLEEDIRAILSCMGYTPELGTAYKLRELVETLQVKMVSFELFLAKVECEQMLEIHSQVKDKGYSELDIVSERKSSAEDVRGCSDALRRRAEGREHLTASMSRVALQKSASERAAKDYYKPRVTKPSRSVDAYDSYWESRKPPLKASLSLRKEPVATDVGDDLKDEIIRPSPSLLTMASSPHGSPDVLPPASPSNGPALLRGTYFSTQDDVDLYTDSEPRATYRRQDALRPDVWLLRNDAHSLYHKRSPPAKESALSKCQSCGLSCSSSLCQRCDSLLTCPPASKPSAFPSKASTHDSLAHGASLREKYPGQTQGLDRLPHLHSKSKPSTTPTSRCGFCNRPGATNTCTQCSKVSCDACLSAYHYDPCYKKSELHKFMPNNQLNYKSTQLSHLVYR

SEQ ID NO: 14645 - protein, 503 aa, Homo sapiens; identical to SEQ ID NO: 13181

SEQ ID NO: 14646 - protein, 567 aa, Homo sapiens
MGRGLLRGLWPLHIVLWTRIASTIPPHVQKSVNNDMIVTDNNGAVKFPQLCKFCDVRFSTCDNQKSCMSNCSITSICEKPQEVCVAVWRKNDENITLETVCHDPKLPYHDFILEDAASPKCIMKEKKKPGETFFMCSCSSDECNDNIIFSEEYNTSNPDLLLVIFQVTGISLLPPLGVAISVIIIFYCYRVNRQQKLSSTWETGKTRKLMEFSEHCAIILEDDRSDISSTCANNINHNTELLPIELDTLVGKGRFAEVYKAKLKQNTSEQFETVAVKIFPYEEYASWKTEKDIFSDINLKHENILQFLTAEERKTELGKQYWLITAFHAKGNLQEYLTRHVISWEDLRKLGSSLARGIAHLHSDHTPCGRPKMPIVHRDLKSSNILVKNDLTCCLCDFGLSLRLDPTLSVDDLANSGQVGTARYMAPEVLESRMNLENVESFKQTDVYSMALVLWEMTSRCNAVGEVKDYEPPFGSKVREHPCVESMKDNVLRDRGRPEIPSFWLNHQGIQMVCETLTECWDHDPEARLTAQCVAERFSELEHLDRLSGRSCSEEKIPEDGSLNTTK

SEQ ID NO: 14647 - protein, 301 aa, Homo sapiens
MFSHLPFDCVLLLLLLLLTRSSEVEYRAEVGQNAYLPCFYTPAAPGNLVPVCWGKGACPVFECGNVVLRTDERDVNYWTSRYWLNGDFRKGDVSLTIENVTLADSGIYCCRIQIPGIMNDEKFNLKLVIKPAKVTPAPTRQRDFTAAFPRMLTTRGHGPAETQTLGSLPDINLTQISTLANELRDSRLANDLRDSGATIRIGIYIGAGICAGLALALIFGALIFKWYSHSKEKIQNLSLISLANLPPSGLANAVAEGIRSEENIYTIEENVYEVEEPNEYYCYVSSRQQPSQPLGCRFAMP

SEQ ID NO: 14648 - protein, 525 aa, Homo sapiens; identical to SEQ ID NO: 7633

SEQ ID NO: 14649 - protein, 223 aa, Homo sapiens; identical to SEQ ID NO: 3669

SEQ ID NO: 14650 - protein, 289 aa, Homo sapiens
MKTLPAMLGTGKLFWVFFLIPYLDIWNIHGKESCDVQLYIKRQSEHSILAGDPFELECPVKYCANRPHVTWCKLNGTTCVKLEDRQTSWKEEKNISFFILHFEPVLPNDNGSYRCSANFQSNLIESHSTTLYVTDVKSASERPSKDEMASRPWLLYRLLPLGGLPLLITTCFCLFCCLRRHQGKQNELSDTAGREINLVDAHLKSEQTEASTRQNSQVLLSETGIYDNDPDLCFRMQEGSEVYSNPCLEENKPGIVYASLNHSVIGPNSRLARNVKEAPTEYASICVRS

SEQ ID NO: 14651 - protein, 296 aa, Homo sapiens
MTLNNVTMRQGTVGMQPQQQRWSIPADGRHLMVQKEPHQYSHRNRHSATPEDHCRRSWSSDSTDSVISSESGNTYYRVVLIGEQGVGKSTLANIFAGVHDSMDSDCEVLGEDTYERTLMVDGESATIILLDMWENKGENEWLHDHCMQVGDAYLIVYSITDRASFEKASELRIQLRRARQTEDIPIILVGNKSDLVRCREVSVSEGRACAVVFDCKFIETSAAVQHNVKELFEGIVRQVRLRRDSKEKNERRLAYQKRKESMPRKARRFWGKIVAKNNKNMAFKLKSKSCHDLSVL

SEQ ID NO: 14652 - protein, 450 aa, Homo sapiens
MGSLQPDAGNASWNGTEAPGGGARATPYSLQVTLTLVCLAGLLMLLTVFGNVLVIIAVFTSRALKAPQNLFLVSLASADILVATLVIPFSLANEVMGYWYFGKAWCEIYLALDVLFCTSSIVHLCAISLDRYWSITQAIEYNLKRTPRRIKAIIITVWVISAVISFPPLISIEKKGGGGGPQPAEPRCEINDQKWYVISSCIGSFFAPCLIMILVYVRIYQIAKRRTRVPPSRRGPDAVAAPPGGTERRPNGLGPERSAGPGGAEAEPLPTQLNGAPGEPAPAGPRDTDALDLEESSSSDHAERPPGPRRPERGPRGKGKARASQVKPGDSLPRRGPGATGIGTPAAGPGEERVGAAKASRWRGRQNREKRFTFVLAVVIGVFVVCWFPFFFTYTLTAVGCSVPRTLFKFFFWFGYCNSSLNPVIYTIFNHDFRRAFKKILCRGDRKRIV

SEQ ID NO: 14653 - protein, 311 aa, Homo sapiens
MGVPTALEAGSWRWGSLLFALFLAASLGPVAAFKVATPYSLYVCPEGQNVTLTCRLLGPVDKGHDVTFYKTWYRSSRGEVQTCSERRPIRNLTFQDLHLHHGGHQAANTSHDLAQRHGLESASDHHGNFSITMRNLTLLDSGLYCCLVVEIRHHHSEHRVHGAMELQVQTGKDAPSNCVVYPSSSQDSENITAAALATGACIVGILCLPLILLLVYKQRQAASNRRAQELVRMDSNIQGIENPGFEASPPAQGIPEAKVRHPLSYVAQRQPSESGRHLLSEPSTPLSPPGPGDVFFPSLDPVPDSPNFEVI

SEQ ID NO: 14654 - protein, 244 aa, Homo sapiens
MRWCLLLIWAQGLRQAPLASGMMTGTIETTGNISAEKGGSIILQCHLSSTTAQVTQVNWEQQDQLLAICNADLGWHISPSFKDRVAPGPGLGLTLQSLTVNDTGEYFCIYHTYPDGTYTGRIFLEVLESSVAEHGARFQIPLLGAMAATLVVICTAVIVVVALTRKKKALRIHSVEGDLRRKSAGQEEWSPSAPSPPGSCVQAEAAPAGLCGEQRGEDCAELHDYFNVLSYRSLGNCSFFTETG

SEQ ID NO: 14655 - protein, 290 aa, Homo sapiens
MRIFAVFIFMTYWHLLNAFTVTVPKDLYVVEYGSNMTIECKFPVEKQLDLAALIVYWEMEDKNIIQFVHGEEDLKVQHSSYRQRARLLKDQLSLGNAALQITDVKLQDAGVYRCMISYGGADYKRITVKVNAPYNKINQRILVVDPVTSEHELTCQAEGYPKAEVIWTSSDHQVLSGKTTTTNSKREEKLFNVTSTLRINTTTNEIFYCTFRRLDPEENHTAELVIPELPLAHPPNERTHLVILGAILLCLGVALTFIFRLRKGRMMDVKKCGIQDTNSKKQSDTHLEET

SEQ ID NO: 14656 - protein, 273 aa, Homo sapiens
MIFLLLMLSLELQLHQIAALFTVTVPKELYIIEHGSNVTLECNFDTGSHVNLGAITASLQKVENDTSPHRERATLLEEQLPLGKASFHIPQVQVRDEGQYQCIIIYGVAWDYKYLTLKVKASYRKINTHILKVPETDEVELTCQATGYPLAEVSWPNVSVPANTSHSRTPEGLYQVTSVLRLKPPPGRNFSCVFWNTHVRELTLASIDLQSQMEPRTHPTWLLHIFIPFCIIAFIFIATVIALRKQLCQKLYSSKDTTKRPVTTTKREVNSAI

SEQ ID NO: 14657 - protein, 288 aa, Homo sapiens; identical to SEQ ID NO: 2417

SEQ ID NO: 14658 - protein, 329 aa, Homo sapiens; identical to SEQ ID NO: 2420

SEQ ID NO: 14659 - protein, 181 aa, Homo sapiens; identical to SEQ ID NO: 2218

SEQ ID NO: 14660 - protein, 287 aa, Homo sapiens
MSPHPTALLGLVLCLAQTIHTQEEDLPRPSISAEPGTVIPLGSHVTFVCRGPVGVQTFRLERESRSTYNDTEDVSQASPSESEARFRIDSVSEGNAGPYRCIYYKPPKWSEQSDYLELLVKETSGGPDSPDTEPGSSAGPTQRPSDNSHNEHAPASQGLKAEHLYILIGVSVVFLFCLLLLVLFCLHRQNQIKQGPPRSKDEEQKPQQRPDLAVDVLERTADKATVNGLPEKDRETDTSALAAGSSQEVTYAQLDHWALTQRTARAVSPQSTKPMAESITYAAVARH

SEQ ID NO: 14661 - protein, 378 aa, Homo sapiens
MSKEPLILWLMIEFWWLYLTPVTSETVVTEVLGHRVTLPCLYSSWSHNSNSMCWGKDQCPYSGCKEALIRTDGMRVTSRKSAKYRLQGTIPRGDVSLTILNPSESDSGVYCCRIEVPGWFNDVKINVRLNLQRASTTTHRTATTTTRRTTTTSPTTTRQMTTTPAALPTTVVTTPDLTTGTPLQMTTIAVFTTANTCLSLTPSTLPEEATGLLTPEPSKEGPILTAESETVLPSDSWSSVESTSADTVLLTSKESKVWDLPSTSHVSMWKTSDSVSSPQPGASDTAVPEQNKTTKTGQMDGIPMSMKNEMPISQLLMIIAPSLGFVLFALFVAFLLRGKLMETYCSQKHTRLDYIGDSKNVLNDVQHGREDEDGLFTL

SEQ ID NO: 14662 - protein, 370 aa, Homo sapiens
MLGQVVTLILLLLLKVYQGKGCQGSADHVVSISGVPLQLQPNSIQTKVDSIAWKKLLPSQNGFHHILKWENGSLPSNTSNDRFSFIVKNLSLLIKAAQQQDSGLYCLEVTSISGKVQTATFQVFVFESLLPDKVEKPRLQGQGKILDRGRCQVALSCLVSRDGNVSYAWYRGSKLIQTAGNLTYLDEEVDINGTHTYTCNVSNPVSWESHTLNLTQDCQNAHQEFRFWPFLVIIVILSALFLGTLACFCVWRRKRKEKQSETSPKEFLTIYEDVKDLKTRRNHEQEQTFPGGGSTIYSMIQSQSSAPTSQEPAYTLYSLIQPSRKSGSRKRNHSPSFNSTIYEVIGKSQPKAQNPARLSRKELENFDVYS

SEQ ID NO: 14663 - protein, 341 aa, Homo sapiens; identical to SEQ ID NO: 8852

SEQ ID NO: 14664 - protein, 1068 aa, Homo sapiens
MPPRPSSGELWGIHLMPPRILVECLLPNGMIVTLECLREATLITIKHELFKEARKYPLHQLLQDESSYIFVSVTQEAEREEFFDETRRLCDLRLFQPFLKVIEPVGNREEKILNREIGFAIGMPVCEFDMVKDPEVQDFRRNILNVCKEAVDLRDLNSPHSRAMYVYPPNVESSPELPKHIYNKLDKGQIIVVIWVIVSPNNDKQKYTLKINHDCVPEQVIAEAIRKKTRSMLLSSEQLKLCVLEYQGKYILKVCGCDEYFLEKYPLSQYKYIRSCIMLGRMPNLMLMAKESLYSQLPMDCFTMPSYSRRISTATPYMNGETSTKSLWVINSALRIKILCATYVNVNIRDIDKIYVRTGIYHGGEPLCDNVNTQRVPCSNPRWNEWLNYDIYIPDLPRAARLCLSICSVKGRKGAKEEHCPLAWGNINLFDYTDTLVSGKMALNLWPVPHGLEDLLNPIGVTGSNPNKETPCLELEFDWFSSVVKFPDMSVIEEHANWSVSREAGFSYSHAGLSNRLARDNELRENDKEQLKAISTRDPLSEITEQEKDFLWSHRHYCVTIPEILPKLLLSVKWNSRDEVAQMYCLVKDWPPIKPEQAMELLDCNYPDPMVRGFAVRCLEKYLTDDKLSQYLIQLVQVLKYEQYLDNLLVRFLLKKALTNQRIGHFFFWHLKSEMHNKTVSQRFGLLLESYCRACGMYLKHLNRQVEAMEKLINLTDILKQEKKDETQKVQMKFLVEQMRRPDFMDALQGFLSPLNPAHQLGNLRLEECRIMSSAKRPLWLNWENPDIMSELLFQNNEIIFKNGDDLRQDMLTLQIIRIMENIWQNQGLDLRMLPYGCLSIGDCVGLIEVVRNSHTIMQIQCKGGLKGALQFNSHTLHQWLKDKNKGEIYDAAIDLFTRSCAGYCVATFILGIGDRHNSNIMVKDDGQLFHIDFGHFLDHKKKKFGYKRERVPFVLTQDFLIVISKGAQECTKTREFERFQEMCYKAYLAIRQHANLFINLFSMMLGSGMPELQSFDDIAYIRKTLALDKTEQEALEYFMKQMNDAHHGGWTTKMDWIFHTIKQHALN

SEQ ID NO: 14665 - protein, 1102 aa, Homo sapiens
MELENYKQPVVLREDNCRRRRRMKPRSAAASLSSMELIPIEFVLPTSQRKCKSPETALLHVAGHGNVEQMKAQVWLRALETSVAADFYHRLGPHHFLLLYQKKGQWYEIYDKYQVVQTLDCLRYWKATHRSPGQIHLVQRHPPSEESQAFQRQLTALIGYDVTDVSNVHDDELEFTRRGLVTPRMAEVASRDPKLYAMHPWVTSKPLPEYLWKKIANNCIFIVIHRSTTSQTIKVSPDDTPGAILQSFFTKMAKKKSLMDIPESQSEQDFVLRVCGRDEYLVGETPIKNFQWVRHCLKNGEEIHVVLDTPPDPALDEVRKEEWPLVDDCTGVTGYHEQLTIHGKDHESVFTVSLWDCDRKFRVKIRGIDIPVLPRNTDLTVFVEANIQHGQQVLCQRRTSPKPFTEEVLWNVWLEFSIKIKDLPKGALLNLQIYCGKAPALSSKASAESPSSESKGKVQLLYYVNLLLIDHRFLLRRGEYVLHMWQISGKGEDQGSFNADKLTSATNPDKENSMSISILLDNYCHPIALPKHQPTPDPEGDRVRAEMPNQLRKQLEAIIATDPLNPLTAEDKELLWHFRYESLKHPKAYPKLFSSVKWGQQEIVAKTYQLLARREVWDQSALDVGLTMQLLDCNFSDENVRAIAVQKLESLEDDDVLHYLLQLVQAVKFEPYHDSALARFLLKRGLRNKRIGHFLFWFLRSEIAQSRHYQQRFAVILEAYLRGCGTAMLHDFTQQVQVIEMLQKVTLDIKSLSAEKYDVSSQVISQLKQKLENLQNSQLPESFRVPYDPGLKAGALAIEKCKVMASKKKPLWLEFKCADPTALSNETIGIIFKHGDDLRQDMLILQILRIMESIWETESLDLCLLPYGCISTGDKIGMIEIVKDATTIAKIQQSTVGNTGAFKDEVLNHWLKEKSPTEEKFQAAVERFVYSCAGYCVATFVLGIGDRHNDNIMITETGNLFHIDFGHILGNYKSFLGINKERVPFVLTPDFLFVMGTSGKKTSPHFQKFQDICVKAYLALRHHTNLLIILFSMMLMTGMPQLTSKEDIEYIRDALTVGKNEEDAKKYFLDQIEVCRDKGWTVQFNWFLHLVLGIKQGEKHSA

SEQ ID NO: 14666 - protein, 597 aa, Homo sapiens
MTSRRWFHPNITGVEAENLLLTRGVDGSFLARPSKSNPGDFTLSVRRNGAVTHIKIQNTGDYYDLYGGEKFATLAELVQYYMEHHGQLKEKNGDVIELKYPLNCADPTSERWFHGHLSGKEAEKLLTEKGKHGSFLVRESQSHPGDFVLSVRTGDDKGESNDGKSKVTHVMIRCQELKYDVGGGERFDSLTDLVEHYKKNPMVETLGTVLQLKQPLNTTRINAAEIESRVRELSKLAETTDKVKQGFWEEFETLQQQECKLLYSRKEGQRQENKNKNRYKNILPFDHTRVVLHDGDPNEPVSDYINANIIMPEFETKCNNSKPKKSYIATQGCLQNTVNDFWRMVFQENSRVIVMTTKEVERGKSKCVKYWPDEYALKEYGVMRVRNVKESAAHDYTLRELKLSKVGQALLQGNTERTVWQYHFRTWPDHGVPSDPGGVLDFLEEVHHKQESIMDAGPVVVHCSAGIGRTGTFIVIDILIDIIREKGVDCDIDVPKTIQMVRSQRSGMVQTEAQYRFIYMAVQHYIETLQRRIEEEQKSKRKGHEYTNIKYSLADQTSGDQSPLPPCTPTPPCAEMREDSARVYENVGLMQQQKSFR

SEQ ID NO: 14667 - protein, 524 aa, Homo sapiens
MLTCNKAGSRMVVDAANSNGPFQPVVLLHIRDVPPADQEKLFIQKLRQCCVLFDFVSDPLSDLKWKEVKRAALSEMVEYITHNRNVITEPIYPEVVHMFAVNMFRTLPPSSNPTGAEFDPEEDEPTLEAAWPHLQLVYEFFLRFLESPDFQPNIAKKYIDQKFVLQLLELFDSEDPRERDFLKTTLHRIYGKFLGLRAYIRKQINNIFYRFIYETEHHNGIAELLEILGSIINGFALPLKEEHKIFLLKVLLPLHKVKSLSVYHPQLAYCVVQFLEKDSTLTEPVVMALLKYWPKTHSPKEVMFLNELEEILDVIEPSEFVKIMEPLFRQLAKCVSSPHFQVAERALYYWNNEYIMSLISDNAAKILPIMFPSLYRNSKTHWNKTIHGLIYNALKLFMEMNQKLFDDCTQQFKAEKLKEKLKMKEREEAWVKIENLAKANPQYTVYSQASTMSIPVAMETDGPLFEDVQMLRKTVKDEAHQAQKDPKKDRPLARRKSELPQDPHTKKALEAHCRADELASQDGR

SEQ ID NO: 14668 - protein, 497 aa, Homo sapiens
METKLPPASTPTSPSSPGLSPVPPPDKVDGFSRRSLRRARPRRSHSSSQFRYQSNQQELTPLPLLKDVPASELHELLSRKLAQCGVMFDFLDCVADLKGKEVKRAALNELVECVGSTRGVLIEPVYPDIIRMISVNIFRTLPPSENPEFDPEEDEPNLEPSWPHLQLVYEFFLRFLESPDFQPSVAKRYVDQKFVLMLLELFDSEDPREREYLKTILHRVYGKFLGLRAYIRKQCNHIFLRFIYEFEHFNGVAELLEILGSIINGFALPLKTEHKQFLVRVLIPLHSVKSLSVFHAQLAYCVVQFLEKDATLTEHVIRGLLKYWPKTCTQKEVMFLGEMEEILDVIEPSQFVKIQEPLFKQVARCVSSPHFQVAERALYFWNNEYILSLIEDNCHTVLPAVFGTLYQVSKEHWNQTIVSLIYNVLKTFMEMNGKLFDELTASYKLEKQQEQQKAQERQELWQGLEELRLRRLQGTQGAKEAPLQRLTPQVAASGGQS

SEQ ID NO: 14669 - protein, 602 aa, Homo sapiens
MPYKLKKEKEPPKVAKCTAKPSSSGKDGGGENTEEAQPQPQPQPQPQAQSQPPSSNKRPSNSTPPPTQLSKIKYSGGPQIVKKERRQSSSRFNLSKNRELQKLPALKDSPTQEREELFIQKLRQCCVLFDFVSDPLSDLKFKEVKRAGLNEMVEYITHSRDVVTEAIYPEAVTMFSVNLFRTLPPSSNPTGAEFDPEEDEPTLEAAWPHLQLVYEFFLRFLESPDFQPNIAKKYIDQKFVLALLDLFDSEDPRERDFLKTILHRIYGKFLGLRAYIRRQINHIFYRFIYETEHHNGIAELLEILGSIINGFALPLKEEHKMFLIRVLLPLHKVKSLSVYHPQLAYCVVQFLEKESSLTEPVIVGLLKFWPKTHSPKEVMFLNELEEILDVIEPSEFSKVMEPLFRQLAKCVSSPHFQVAERALYYWNNEYIMSLISDNAARVLPIMFPALYRNSKSHWNKTIHGLIYNALKLFMEMNQKLFDDCTQQYKAEKQKGRFRMKEREEMWQKIEELARLNPQYPMFRAPPPLPPVYSMETETPTAEDIQLLKRTVETEAVQMLKDIKKEKVLLRRKSELPQDVYTIKALEAHKRAEEFLTASQEAL

SEQ ID NO: 14670 - protein, 467 aa, Homo sapiens
MSSAPTTPPSVDKVDGFSRKSVRKARQKRSQSSSQFRSQGKPIELTPLPLLKDVPSSEQPELFLKKLQQCCVIFDFMDTLSDLKMKEYKRSTLNELVDYITISRGCLTEQTYPEVVRMVSCNIFRTLPPSDSNEFDPEEDEPTLEASWPHLQLVYEFFIRFLESQEFQPSIAKKYIDQKFVLQLLELFDSEDPRERDYLKTVLHRIYGKFLGLRAFIRKQINNIFLRFVYETEHFNGVAELLEILGSIINGFALPLKAEHKQFLVKVLIPLHTVRSLSLFHAQLAYCIVQFLEKDPSLTEPVIRGLMKFWPKTCSQKEVMFLGELEEILDVIEPSQFVKIQEPLFKQIAKCVSSPHFQVAERALYYWNNEYIMSLIEENSNVILPIMFSSLYRISKEHWNPAIVALVYNVLKAFMEMNSTMFDELTATYKSDRQREKKKEKEREELWKKLEDLELKRGLRRDGIIPT

SEQ ID NO: 14671 - protein, 486 aa, Homo sapiens
MSSSSPPAGAASAAISASEKVDGFTRKSVRKAQRQKRSQGSSQFRSQGSQAELHPLPQLKDATSNEQQELFCQKLQQCCILFDFMDSVSDLKSKEIKRATLNELVEYVSTNRGVIVESAYSDIVKMISANIFRTLPPSDNPDFDPEEDEPTLEASWPHIQLVYEFFLRFLESPDFQPSIAKRYIDQKFVQQLLELFDSEDPRERDFLKTVLHRIYGKFLGLRAFIRKQINNIFLRFIYETEHFNGVAELLEILGSIINGFALPLKAEHKQFLMKVLIPMHTAKGLALFHAQLAYCVVQFLEKDTTLTEPVIRGLLKFWPKTCSQKEVMFLGEIEEILDVIEPTQFKKIEEPLFKQISKCVSSSHFQVAERALYFWNNEYILSLIEENIDKILPIMFASLYKISKEHWNPTIVALVYNVLKTLMEMNGKLFDDLTSSYKAERQREKKKELEREELWKKLEELKLKKALEKQNSAYNMHSILSNTSAE

SEQ ID NO: 14672 - protein, 140 aa, Homo sapiens
IQNPDPAVYQLRDSKSSDKSVCLFTDFDSQTNVSQSKDSDVYITDKTVLDMRSMDFKSNSAVAWSNKSDFACANAFNNSIIPEDTFFPSPESSCDVKLVEKSFETDTNLNFQNLSVIGFRILLLKVAGFNLLMTLRLWSS

SEQ ID NO: 14673 - protein, 176 aa, Homo sapiens
DLNKVFPPEVAVFEPSEAEISHTQKATLVCLATGFFPDHVELSWWVNGKEVHSGVSTDPQPLKEQPALNDSRYCLSSRLRVSATFWQNPRNHFRCQVQFYGLSENDEWTQDRAKPVTQIVSAEAWGRADCGFTSVSYQQGVLSATILYEILLGKATLYAVLVSALVLMAMVKRKDF

SEQ ID NO: 14674 - protein, 164 aa, Homo sapiens
MKWKALFTAAILQAQLPITEAQSFGLLDPKLCYLLDGILFIYGVILTALFLRVKFSRSADAPAYQQGQNQLYNELNLGRREEYDVLDKRRGRDPEMGGKPQRRKNPQEGLYNELQKDKMAEAYSEIGMKGERRRGKGHDGLYQGLSTATKDTYDALHMQALPPR

SEQ ID NO: 14675 - protein, 207 aa, Homo sapiens
MQSGTHWRVLGLCLLSVGVWGQDGNEEMGGITQTPYKVSISGTTVILTCPQYPGSEILWQHNDKNIGGDEDDKNIGSDEDHLSLKEFSELEQSGYYVCYPRGSKPEDANFYLYLRARVCENCMEMDVMSVATIVIVDICITGGLLLLVYYWSKNRKAKAKPVTRGAGAGGRQRGQNKERPPPVPNPDYEPIRKGQRDLYSGLNQRRI

SEQ ID NO: 14676 - protein, 182 aa, Homo sapiens
MEQGKGLAVLILAIILLQGTLAQSIKGNHLVKVYDYQEDGSVLLTCDAEAKNITWFKDGKMIGFLTEDKKKWNLGSNAKDPRGMYQCKGSQNKSKPLQVYYRMCQNCIELNAATISGFLFAEIVSIFVLAVGVYFIAGQDGVRQSRASDKQTLLPNDQLYQPLKDREDDQYSHLQGNQLRRN

SEQ ID NO: 14677 - protein, 171 aa, Homo sapiens; identical to SEQ ID NO: 2330

SEQ ID NO: 14678 - protein, 220 aa, Homo sapiens
MLRLLLALNLFPSIQVTGNKILVKQSPMLVAYDNAVNLSCKYSYNLFSREFRASLHKGLDSAVEVCVVYGNYSQQLQVYSKTGFNCDGKLGNESVTFYLQNLYVNQTDIYFCKIEVMYPPPYLDNEKSNGTIIHVKGKHLCPSPLFPGPSKPFWVLVVVGGVLACYSLLVTVAFIIFWVRSKRSRLLHSDYMNMTPRRPGPTRKHYQPYAPPRDFAAYRS

SEQ ID NO: 14679 - protein, 355 aa, Homo sapiens
MAFSGSQAPYLSPAVPFSGTIQGGLQDGLQITVNGTVLSSSGTRFAVNFQTGFSGNDIAFHFNPRFEDGGYVVCNTRQNGSWGPEERKTHMPFQKGMPFDLCFLVQSSDFKVMVNGILFVQYFHRVPFHRVDTISVNGSVQLSYISFQNPRTVPVQPAFSTVPFSQPVCFPPRPRGRRQKPPGVWPANPAPITQTVIHTVQSAPGQMFSTPAIPPMMYPHPAYPMPFITTILGGLYPSKSILLSGTVLPSAQRFHINLCSGNHIAFHLNPRFDENAVVRNTQIDNSWGSEERSLPRKMPFVRGQSFSVWILCEAHCLKVAVDGQHLFEYYHRLRNLPTINRLEVGGDIQLTHVQT

SEQ ID NO: 14680 - protein, 215 aa, Homo sapiens
MGKGDPKKPRGKMSSYAFFVQTCREEHKKKHPDASVNFSEFSKKCSERWKTMSAKEKGKFEDMAKADKARYEREMKTYIPPKGETKKKFKDPNAPKRPPSAFFLFCSEYRPKIKGEHPGLSIGDVAKKLGEMWNNTAADDKQPYEKKAAKLKEKYEKDIAAYRAKGKPDAAKKGVVKAEKSKKKKEEEEDEEDEEDEEEEEDEEDEDEEEDDDDE

SEQ ID NO: 14681 - protein, 322 aa, Homo sapiens
MSAKSRTIGIIGAPFSKGQPRGGVEEGPTVLRKAGLLEKLKEQECDVKDYGDLPFADIPNDSPFQIVKNPRSVGKASEQLAGKVAEVKKNGRISLVLGGDHSLAIGSISGHARVHPDLGVIWVDAHTDINTPLTTTSGNLHGQPVSFLLKELKGKIPDVPGFSWVTPCISAKDIVYIGLRDVDPGEHYILKTLGIKYFSMTEVDRLGIGKVMEETLSYLLGRKKRPIHLSFDVDGLDPSFTPATGTPVVGGLTYREGLYITEEIYKTGLLSGLDIMEVNPSLGKTPEEVTRTVNTAVAITLACFGLAREGNHKPIDYLNPPK

SEQ ID NO: 14682 - protein, 599 aa, Homo sapiens; identical to SEQ ID NO: 11057

SEQ ID NO: 14683 - protein, 604 aa, Homo sapiens; identical to SEQ ID NO: 11060

SEQ ID NO: 14684 - protein, 1255 aa, Homo sapiens
MTPGTQSPFFLLLLLTVLTVVTGSGHASSTPGGEKETSATQRSSVPSSTEKNAVSMTSSVLSSHSPGSGSSTTQGQDVTLAPATEPASGSAATWGQDVTSVPVTRPALGSTTPPAHDVTSAPDNKPAPGSTAPPAHGVTSAPDTRPAPGSTAPPAHGVTSAPDTRPAPGSTAPPAHGVTSAPDTRPAPGSTAPPAHGVTSAPDTRPAPGSTAPPAHGVTSAPDTRPAPGSTAPPAHGVTSAPDTRPAPGSTAPPAHGVTSAPDTRPAPGSTAPPAHGVTSAPDTRPAPGSTAPPAHGVTSAPDTRPAPGSTAPPAHGVTSAPDTRPAPGSTAPPAHGVTSAPDTRPAPGSTAPPAHGVTSAPDTRPAPGSTAPPAHGVTSAPDTRPAPGSTAPPAHGVTSAPDTRPAPGSTAPPAHGVTSAPDTRPAPGSTAPPAHGVTSAPDTRPAPGSTAPPAHGVTSAPDTRPAPGSTAPPAHGVTSAPDTRPAPGSTAPPAHGVTSAPDTRPAPGSTAPPAHGVTSAPDTRPAPGSTAPPAHGVTSAPDTRPAPGSTAPPAHGVTSAPDTRPAPGSTAPPAHGVTSAPDTRPAPGSTAPPAHGVTSAPDTRPAPGSTAPPAHGVTSAPDTRPAPGSTAPPAHGVTSAPDTRPAPGSTAPPAHGVTSAPDTRPAPGSTAPPAHGVTSAPDTRPAPGSTAPPAHGVTSAPDTRPAPGSTAPPAHGVTSAPDTRPAPGSTAPPAHGVTSAPDTRPAPGSTAPPAHGVTSAPDTRPAPGSTAPPAHGVTSAPDTRPAPGSTAPPAHGVTSAPDTRPAPGSTAPPAHGVTSAPDTRPAPGSTAPPAHGVTSAPDTRPAPGSTAPPAHGVTSAPDTRPAPGSTAPPAHGVTSAPDTRPAPGSTAPPAHGVTSAPDTRPAPGSTAPPAHGVTSAPDTRPAPGSTAPPAHGVTSAPDNRPALGSTAPPVHNVTSASGSASGSASTLVHNGTSARATTTPASKSTPFSIPSHHSDTPTTLASHSTKTDASSTHHSSVPPLTSSNHSTSPQLSTGVSFFFLSFHISNLQFNSSLEDPSTDYYQELQRDISEMFLQIYKQGGFLGLSNIKFRPGSVVVQLTLAFREGTINVHDVETQFNQYKTEAASRYNLTISDVSVSDVPFPFSAQSGAGVPGWGIALLVLVCVLVALAIVYLIALAVCQCRRKNYGQLDIFPARDTYHPMSEYPTYHTHGRYVPPSSTDRSPYEKVSAGNGGSSLSYTNPAVAATSANL

SEQ ID NO: 14685 - protein, 5179 aa, Homo sapiens
MGLPLARLAAVCLALSLAGGSELQTEGRTRYHGRNVCSTWGNFHYKTFDGDVFRFPGLCDYNFASDCRGSYKEFAVHLKRGPGQAEAPAGVESILLTIKDDTIYLTRHLAVLNGAVVSTPHYSPGLLIEKSDAYTKVYSRAGLTLMWNREDALMLELDTKFRNHTCGLCGDYNGLQSYSEFLSDGVLFSPLEFGNMQKINQPDVVCEDPEEEVAPASCSEHRAECERLLTAEAFADCQDLVPLEPYLRACQQDRCRCPGGDTCVCSTVAEFSRQCSHAGGRPGNWRTATLCPKTCPGNLVYLESGSPCMDTCSHLEVSSLCEEHRMDGCFCPEGTVYDDIGDSGCVPVSQCHCRLHGHLYTPGQEITNDCEQCVCNAGRWVCKDLPCPGTCALEGGSHITTFDGKTYTFHGDCYYVLAKGDHNDSYALLGELAPCGSTDKQTCLKTVVLLADKKKNAVVFKSDGSVLLNQLQVNLPHVTASFSVFRPSSYHIMVSMAIGVRLQVQLAPVMQLFVTLDQASQGQVQGLCGNFNGLEGDDFKTASGLVEATGAGFANTWKAQSTCHDKLDWLDDPCSLNIESANYAEHWCSLLKKTETPFGRCHSAVDPAEYYKRCKYDTCNCQNNEDCLCAALSSYARACTAKGVMLWGWREHVCNKDVGSCPNSQVFLYNLTTCQQTCRSLSEADSHCLEGFAPVDGCGCPDHTFLDEKGRCVPLAKCSCYHRGLYLEAGDVVVRQEERCVCRDGRLHCRQIRLIGQSCTAPKIHMDCSNLTALATSKPRALSCQTLAAGYYHTECVSGCVCPDGLMDDGRGGCVVEKECPCVHNNDLYSSGAKIKVDCNTCTCKRGRWVCTQAVCHGTCSIYGSGHYITFDGKYYDFDGHCSYVAVQDYCGQNSSLGSFSIITENVPCGTTGVTCSKAIKIFMGRTELKLEDKHRVVIQRDEGHHVAYTTREVGQYLVVESSTGIIVIWDKRTTVFIKLAPSYKGTVCGLCGNFDHRSNNDFTTRDHMVVSSELDFGNSWKEAPTCPDVSTNPEPCSLNPHRRSWAEKQCSILKSSVFSICHSKVDPKPFYEACVHDSCSCDTGGDCECFCSAVASYAQECTKEGACVFWRTPDLCPIFCDYYNPPHECEWHYEPCGNRSFETCRTINGIHSNISVSYLEGCYPRCPKDRPIYEEDLKKCVTADKCGCYVEDTHYPPGASVPTEETCKSCVCTNSSQVVCRPEEGKILNQTQDGAFCYWEICGPNGTVEKHFNICSITTRPSTLTTFTTITLPTTPTSFTTTTTTTTPTSSTVLSTTPKLCCLWSDWINEDHPSSGSDDGDREPFDGVCGAPEDIECRSVKDPHLSLEQHGQKVQCDVSVGFICKNEDQFGNGPFGLCYDYKIRVNCCWPMDKCITTPSPPTTTPSPPPTTTTTLPPTTTPSPPTTTTTTPPPTTTPSPPITTTTTPLPTTTPSPPISTTTTPPPTTTPSPPTTTPSPPTTTPSPPTTTTTTPPPTTTPSPPMTTPITPPASTTTLPPTTTPSPPTTTTTTPPPTTTPSPPTTTPITPPTSTTTLPPTTTPSPPPTTTTTPPPTTTPSPPTTTTPSPPTITTTTPPPTTTPSPPTTTTTTPPPTTTPSPPTTTPITPPTSTTTLPPTTTPSPPPTTTTTPPPTTTPSPPTTTTPSPPITTTTTPPPTTTPSSPITTTPSPPTTTMTTPSPTTTPSSPITTTTTPSSTTTPSPPPTTMTTPSPTTTPSPPTTTMTTLPPTTTSSPLTTTPLPPSITPPTFSPFSTTTPTTPCVPLCNWTGWLDSGKPNFHKPGGDTELIGDVCGPGWAANISCRATMYPDVPIGQLGQTVVCDVSVGLICKNEDQKPGGVIPMAFCLNYEINVQCCECVTQPTTMTTTTTENPTPPTTTPITTTTTVTPTPTPTGTQTPTTTPITTTTTVTPTPTPTGTQTPTTTPITTTTTVTPTPTPTGTQTPTTTPITTTTTVTPTPTPTGTQTPTTTPITTTTTVTPTPTPTGTQTPTTTPITTTTTVTPTPTPTGTQTPTTTPITTTTTVTPTPTPTGTQTPTTTPITTTTTVTPTPTPTGTQTPTTTPITTTTTVTPTPTPTGTQTPTTTPITTTTTVTPTPTPTGTQTPTTTPITTTTTVTPTPTPTGTQTPTTTPITTTTTVTPTPTPTGTQTPTTTPITTTTTVTPTPTPTGTQTPTTTPITTTTTVTPTPTPTGTQTPTTTPITTTTTVTPTPTPTGTQTPTTTPITTTTTVTPTPTPTGTQTPTTTPITTTTTVTPTPTPTGTQTPTTTPITTTTTVTPTPTPTGTQTPTTTPITTTTTVTPTPTPTGTQTPTTTPITTTTTVTPTPTPTGTQTPTTTPITTTTTVTPTPTPTGTQTPTTTPITTTTTVTPTPTPTGTQTPTTTPITTTTTVTPTPTPTGTQTPTTTPITTTTTVTPTPTPTGTQTPTTTPITTTTTVTPTPTPTGTQTPTTTPITTTTTVTPTPTPTGTQTPTTTPITTTTTVTPTPTPTGTQTPTTTPITTTTTVTPTPTPTGTQTPTTTPITTTTTVTPTPTPTGTQTPTTTPITTTTTVTPTPTPTGTQTPTTTPITTTTTVTPTPTPTGTQTPTTTPITTTTTVTPTPTPTGTQTPTTTPITTTTTVTPTPTPTGTQTPTTTPITTTTTVTPTPTPTGTQTPTTTPITTTTTVTPTPTPTGTQTPTTTPITTTTTVTPTPTPTGTQTPTTTPITTTTTVTPTPTPTGTQTPTTTPITTTTTVTPTPTPTGTQTPTTTPITTTTTVTPTPTPTGTQTPTTTPITTTTTVTPTPTPTGTQTPTTTPITTTTTVTPTPTPTGTQTPTTTPITTTTTVTPTPTPTGTQTPTTTPITTTTTVTPTPTPTGTQTPTTTPITTTTTVTPTPTPTGTQTPTTTPITTTTTVTPTPTPTGTQTPTTTPITTTTTVTPTPTPTGTQTPTTTPITTTTTVTPTPTPTGTQTPTTTPITTTTTVTPTPTPTGTQTPTTTPITTTTTVTPTPTPTGTQTPTTTPITTTTTVTPTPTPTGTQTPTTTPITTTTTVTPTPTPTGTQTPTTTPITTTTTVTPTPTPTGTQTPTTTPITTTTTVTPTPTPTGTQTPTTTPITTTTTVTPTPTPTGTQTPTTTPITTTTTVTPTPTPTGTQTPTTTPITTTTTVTPTPTPTGTQTPTTTPITTTTTVTPTPTPTGTQTPTTTPITTTTTVTPTPTPTGTQTPTTTPITTTTTVTPTPTPTGTQTPTTTPITTTTTVTPTPTPTGTQTPTTTPITTTTTVTPTPTPTGTQTPTTTPITTTTTVTPTPTPTGTQTPTTTPITTTTTVTPTPTPTGTQTPTTTPITTTTTVTPTPTPTGTQTPTTTPITTTTTVTPTPTPTGTQTPTTTPITTTTTVTPTPTPTGTQTPTTTPITTTTTVTPTPTPTGTQTPTTTPITTTTTVTPTPTPTGTQTPTTTPITTTTTVTPTPTPTGTQTPTTTPITTTTTVTPTPTPTGTQTPTTTPITTTTTVTPTPTPTGTQTPTTTPITTTTTVTPTPTPTGTQTPTTTPITTTTTVTPTPTPTGTQTPTTTPITTTTTVTPTPTPTGTQTPTTTPITTTTTVTPTPTPTGTQTPTTTPITTTTTVTPTPTPTGTQTPTTTPITTTTTVTPTPTPTGTQTPTTTPITTTTTVTPTPTPTGTQTPTTTPITTTTTVTPTPTPTGTQTPTTTPITTTTTVTPTPTPTGTQTPTTTPITTTTTVTPTPTPTGTQTPTTTPITTTTTVTPTPTPTGTQTPTTTPITTTTTVTPTPTPTGTQTPTTTPITTTTTVTPTPTPTGTQTPTTTPITTTTTVTPTPTPTGTQTPTTTPITTTTTVTPTPTPTGTQTPTTTPITTTTTVTPTPTPTGTQTPTTTPITTTTTVTPTPTPTGTQTPTTTPITTTTTVTPTPTPTGTQTPTTTPITTTTTVTPTPTPTGTQTPTTTPITTTTTVTPTPTPTGTQTPTTTPITTTTTVTPTPTPTGTQTPTTTPITTTTTVTPTPTPTGTQTPTTTPITTTTTVTPTPTPTGTQTPTTTPITTTTTVTPTPTPTGTQTPTTTPITTTTTVTPTPTPTGTQTPTTTPITTTTTVTPTPTPTGTQTPTTTPITTTTTVTPTPTPTGTQTPTTTPITTTTTVTPTPTPTGTQTPTTTPITTTTTVTPTPTPTGTQTGPPTHTSTAPIAELTTSNPPPESSTPQTSRSTSSPLTESTTLLSTLPPAIEMTSTAPPSTPTAPTTTSGGHTLSPPPSTTTSPPGTPTRGTTTGSSSAPTPSTVQTTTTSAWTPTPTPLSTPSIIRTTGLRPYPSSVLICCVLNDTYYAPGEEVYNGTYGDTCYFVNCSLSCTLEFYNWSCPSTPSPTPTPSKSTPTPSKPSSTPSKPTPGTKPPECPDFDPPRQENETWWLCDCFMATCKYNNTVEIVKVECEPPPMPTCSNGLQPVRVEDPDGCCWHWECDCYCTGWGDPHYVTFDGLYYSYQGNCTYVLVEEISPSVDNFGVYIDNYHCDPNDKVSCPRTLIVRHETQEVLIKTVHMMPMQVQVQVNRQAVALPYKKYGLEVYQSGINYVVDIPELGVLVSYNGLSFSVRLPYHRFGNNTKGQCGTCTNTTSDDCILPSGEIVSNCEAAADQWLVNDPSKPHCPHSSSTTKRPAVTVPGGGKTTPHKDCTPSPLCQLIKDSLFAQCHALVPPQHYYDACVFDSCFMPGSSLECASLQAYAALCAQQNICLDWRNHTHGACLVECPSHREYQACGPAEEPTCKSSSSQQNNTVLVEGCFCPEGTMNYAPGFDVCVKTCGCVGPDNVPREFGEHFEFDCKNCVCLEGGSGIICQPKRCSQKPVTHCVEDGTYLATEVNPADTCCNITVCKCNTSLCKEKPSVCPLGFEVKSKMVPGRCCPFYWCESKGVCVHGNAEYQPGSPVYSSKCQDCVCTDKVDNNTLLNVIACTHVPCNTSCSPGFELMEAPGECCKKCEQTHCIIKRPDNQHVILKPGDFKSDPKNNCTFFSCVKIHNQLISSVSNITCPNFDASICIPGSITFMPNGCCKTCTPRNETRVPCSTVPVTTEVSYAGCTKTVLMNHCSGSCGTFVMYSAKAQALDHSCSCCKEEKTSQREVVLSCPNGGSLTHTYTHIESCQCQDTVCGLPTGTSRRARRSPRHLGSG

SEQ ID NO: 14686 - protein, 3323 aa, Homo sapiens; identical to SEQ ID NO: 9102

SEQ ID NO: 14687 - protein, 1237 aa, Homo sapiens
MQLLGLLSILWMLKSSPGATGTLSTATSTSHVTFPRAEATRTALSNSPHSRYLAEWPQGVPQLASPAPGHRENAPMTLTTSPHDTLISETLLSSLVSSNTSTTPTSKFAFKVETTPPTVLVYSATTECVYPTSFIITISHSTSICVTTTQVTFTSSYTPTPVTQKPVTTVTRTYPMTTTEKGTSAMISSPSTTTARETPIVTVTPSSSVSATDTTFHTTISSTTRTTERTPLPTGSIHTTMSPTPVFTTLKTAVTSTSPITSTITSTNTVTSMTTTTSRPTATNTLSSLTSSILSSTPAPNTEVITSHTTTTTPPSTLVTTLPTAIARSTPTSETTPSFMSSIITTETTSHSTPSFSSSTIHSTVSSSTTAITSPFTTAETGVTSTPSSPSSLSTDIPTTSLRTLTPLSLSTSTSLTTTTDLPSIPTDISSLPTPIHIISSSPSIQSTETSSLVGTTSPTMSTVRATLRSTENTPISSFSTSIVVTPETPTTQAPPVLMSATGTQTSPVPTTVTFGSMDSSTSTLHTLTPSTALSKIMSTSQFPIPSTHSSTLQTTPSIPSLQTSLTSTSEFTTESFTRGSTSTNAILTSFSTIIWSSTPTIIMSSSPSSASITPVFATTIHSVPSSPYIFSTENVGSASITAFPSLSSSSTTSTSPTSSSLTTALTEITPFSYISLPSTTPCPGTITITIVPASPTDPCVEMDPSTEATSPPTTPLTVFPFTTEMVTCPSSISMQTTLATHMDTSSMTPESESSIIPNASSSTGTGTVPTNTVFTSTRLPTSETWLSNNSVIPTPLPGVSTIPLTMKPSSSLPTILRTSSKSTHPSPPTARTSQTSVATTQTPTTLTTCRTTPITSWMTTQSTLTTTAGTCDNGGTWEQGQCACLPGFSGDRCQLQTRCQNGGQWDGLKCQCPSTFYGSSCEFAVEQVDLDVVETEVGMEVSVDQQFSPDLNDNTSQAYRDFNKTFWNQMQKIFADMQGFTFKGVEILSLRNGSIVVDYLVLLEMPFSPQLESEYEQVKTTLKEGLQNASQDANSCQDSQALCFKPDSIKVNNNSKTELTPEAICRRAAPTGYEEFYFPLVEATRLRCVTKCTSGLDNAIDCHQGQCVLETSGPACRCYSTDTHWFSGPRCEVTVHWRALVGGLTAGAALLVLLLLALGVRAVRSEWWGRQRRGRSWDQDRKWFETWDEEVVGTFSNWGFEDDGTDKDTNFHVALENVDTTMKVHIKRPEMTSSSV

SEQ ID NO: 14688 - protein, 2169 aa, Homo sapiens
MKGARWRRVPWVSLSCLCLCLLPHVVPGTTEDTLITGSKTAAPVTSTGSTTATLEGQSTAASSRTSNQDISASSQNHQTKSTETTSKAQTDTLTQMMTSTLFSSPSVHNVMETVTQETAPPDEMTTSFPSSVTNTLMMTSKTITMTTSTDSTLGNTEETSTAGTESSTPVTSAVSITAGQEGQSRTTSWRTSIQDTSASSQNHWTRSTQTTRESQTSTLTHRTTSTPSFSPSVHNVTGTVSQKTSPSGETATSSLCSVTNTSMMTSEKITVTTSTGSTLGNPGETSSVPVTGSLMPVTSAALVTVDPEGQSPATFSRTSTQDTTAFSKNHQTQSVETTRVSQINTLNTLTPVTTSTVLSSPSGFNPSGTVSQETFPSGETTISSPSSVSNTFLVTSKVFRMPISRDSTLGNTEETSLSVSGTISAITSKVSTIWWSDTLSTALSPSSLPPKISTAFHTQQSEGAETTGRPHERSSFSPGVSQEIFTLHETTTWPSSFSSKGHTTWSQTELPSTSTGAATRLVTGNPSTRAAGTIPRVPSKVSAIGEPGEPTTYSSHSTTLPKTTGAGAQTQWTQETGTTGEALLSSPSYSVIQMIKTATSPSSSPMLDRHTSQQITTAPSTNHSTIHSTSTSPQESPAVSQRGHTRAPQTTQESQTTRSVSPMTDTKTVTTPGSSFTASGHSPSEIVPQDAPTISAATTFAPAPTGNGHTTQAPTTALQAAPSSHDATLGPSGGTSLSKTGALTLANSVVSTPGGPEGQWTSASASTSPDTAAAMTHTHQAESTEASGQTQTSEPASSGSRTTSAGTATPSSSGASGTTPSGSEGISTSGETTRFSSNPSRDSHTTQSTTELLSASASHGAIPVSTGMASSIVPGTFHPTLSEASTAGRPTGQSSPTSPSASPQETAAISRMAQTQRTGTSRGSDTISLASQATDTFSTVPPTPPSITSSGLTSPQTQTHTLSPSGSGKTFTTALISNATPLPVTSTSSASTGHATPLAVSSATSASTVSSDSPLKMETSGMTTPSLKTDGGRRTATSPPPTTSQTIISTIPSTAMHTRSTAAPIPILPERGVSLFPYGAGAGDLEFVRRTVDFTSPLFKPATGFPLGSSLRDSLYFTDNGQIIFPESDYQIFSYPNPLPTGFTGRDPVALVAPFWDDADFSTGRGTTFYQEYETFYGEHSLLVQQAESWIRKMTNNGGYKARWALKVTWVNAHAYPAQWTLGSNTYQAILSTDGSRSYALFLYQSGGMQWDVAQRSGNPVLMGFSSGDGYFENSPLMSQPVWERYRPDRFLNSNSGLQGLQFYRLHREERPNYRLECLQWLKSQPRWPSWGWNQVSCPCSWQQGRRDLRFQPVSIGRWGLGSRQLCSFTSWRGGVCCSYGPWGEFREGWHVQRPWQLAQELEPQSWCCRWNDKPYLCALYQQRRPHVGCATYRPPQPAWMFGDPHITTLDGVSYTFNGLGDFLLVGAQDGNSSFLLQGRTAQTGSAQATNFIAFAAQYRSSSLGPVTVQWLLEPHDAIRVLLDNQTVTFQPDHEDGGGQETFNATGVLLSRNGSEVSASFDGWATVSVIALSNILHASASLPPEYQNRTEGLLGVWNNNPEDDFRMPNGSTIPPGSPEEMLFHFGMTWQINGTGLLGKRNDQLPSNFTPVFYSQLQKNSSWAEHLISNCDGDSSCIYDTLALRNASIGLHTREVSKNYEQANATLNQYPPSINGGRVIEAYKGQTTLIQYTSNAEDANFTLRDSCTDLELFENGTLLWTPKSLEPFTLEILARSAKIGLASALQPRTVVCHCNAESQCLYNQTSRVGNSSLEVAGCKCDGGTFGRYCEGSEDACEEPCFPSVHCVPGKGCEACPPNLTGDGRHCAALGSSFLCQNQSCPVNYCYNQGHCYISQTLGCQPMCTCPPAFTDSRCFLAGNNFSPTVNLELPLRVIQLLLSEEENASMAEVNASVAYRLGTLDMRAFLRNSQVERIDSAAPASGSPIQHWMVISEFQYRPRGPVIDFLNNQLLAAVVEAFLYHVPRRSEEPRNDVVFQPISGEDVRDVTALNVSTLKAYFRCDGYKGYDLVYSPQSGFTCVSPCSRGYCDHGGQCQHLPSGPRCSCVSFSIYTAWGEHCEHLSMKLDAFFGIFFGALGGLLLLGVGTFVVLRFWGCSGARFSYFLNSAEALP

SEQ ID NO: 14689 - protein, 5654 aa, Homo sapiens; identical to SEQ ID NO: 9105

SEQ ID NO: 14690 - protein, 5762 aa, Homo sapiens; identical to SEQ ID NO: 9106

SEQ ID NO: 14691 - protein, 2439 aa, Homo sapiens; identical to SEQ ID NO: 9109

SEQ ID NO: 14692 - protein, 377 aa, Homo sapiens; identical to SEQ ID NO: 9113

SEQ ID NO: 14693 - protein, 5478 aa, Homo sapiens
MLVIWILTLALRLCASVTTVTPEGSAVHKAISQQGTLWTGEVLEKQTVEQGKSTLRRQKNHFHRSAGELRCRNALKDEGASAGWSVMFAGESVVVLVHLWMTGARVKNLGLVEFASPGDDGDGRAEGFSLGLPLSEQARAAGAREKERQETVINHSTFSGFSQITGSTVNTSIGGNTTSASTPSSSDPFTTFSDYGVSVTFITGSTATKHFLDSSTNSGHSEESTVSHSGPGATGTTLFPSHSATSVFVGEPKTSPITSASMETTALPGSTTTAGLSEKSTTFYSSPRSPDRTLSPARTTSSGVSEKSTTSHSRPGPTHTIAFPDSTTMPGVSQESTASHSIPGSTDTTLSPGTTTPSSLGPESTTFHSSPGYTKTTRLPDNTTTSGLLEASTPVHSSTGSPHTTLSPSSSTTHEGEPTTFQSWPSSKDTSPAPSGTTSAFVKLSTTYHSSPSSTPTTHFSASSTTLGHSEESTPVHSSPVATATTPPPARSATSGHVEESTAYHRSPGSTQTMHFPESSTTSGHSEESATFHGSTTHTKSSTPSTTAALAHTSYHSSLGSTETTHFRDSSTISGRSEESKASHSSPDAMATTVLPAGSTPSVLVGDSTPSPISSGSMETTALPGSTTKPGLSEKSTTFYSSPRSPDTTHLPASMTSSGVSEESTTSHSRPGSTHTTAFPGSTTMPGLSQESTASHSSPGPTDTTLSPGSTTASSLGPEYTTFHSRPGSTETTLLPDNTTASGLLEASMPVHSSTRSPHTTLSPAGSTTRQGESTTFHSWPSSKDTRPAPPTTTSAFVEPSTTSHGSPSSIPTTHISARSTTSGLVEESTTYHSSPGSTQTMHFPESDTTSGRGEESTTSHSSTTHTISSAPSTTSALVEEPTSYHSSPGSTATTHFPDSSTTSGRSEESTASHSSQDATGTIVLPARSTTSVLLGESTTSPISSGSMETTALPGSTTTPGLSERSTTFHSSPRSPATTLSPASTTSSGVSEESTTSRSRPGSTHTTAFPDSTTTPGLSRHSTTSHSSPGSTDTTLLPASTTTSGPSQESTTSHSSSGSTDTALSPGSTTALSFGQESTTFHSNPGSTHTTLFPDSTTSSGIVEASTRVHSSTGSPRTTLSPASSTSPGLQGESTAFQTHPASTHTTPSPPSTATAPVEESTTYHRSPGSTPTTHFPASSTTSGHSEKSTIFHSSPDASGTTPSSAHSTTSGRGESTTSRISPGSTEITTLPGSTTTPGLSEASTTFYSSPRSPTTTLSPASMTSLGVGEESTTSRSQPGSTHSTVSPASTTTPGLSEESTTVYSSSRGSTETTVFPHSTTTSVHGEEPTTFHSRPASTHTTLFTEDSTTSGLTEESTAFPGSPASTQTGLPATLTTADLGEESTTFPSSSGSTGTKLSPARSTTSGLVGESTPSRLSPSSTETTTLPGSPTTPSLSEKSTTFYTSPRSPDATLSPATTTSSGVSEESSTSHSQPGSTHTTAFPDSTTTSDLSQEPTTSHSSQGSTEATLSPGSTTASSLGQQSTTFHSSPGDTETTLLPDDTITSGLVEASTPTHSSTGSLHTTLTPASSTSAGLQEESTTFQSWPSSSDTTPSPPGTTAAPVEVSTTYHSRPSSTPTTHFSASSTTLGRSEESTTVHSSPGATGTALFPTRSATSVLVGEPTTSPISSGSTETTALPGSTTTAGLSEKSTTFYSSPRSPDTTLSPASTTSSGVSEESTTSHSRPGSTHTTAFPGSTTMPGVSQESTASHSSPGSTDTTLSPGSTTASSLGPESTTFHSSPGSTETTLLPDNTTASGLLEASTPVHSSTGSPHTTLSPAGSTTRQGESTTFQSWPSSKDTMPAPPTTTSAFVELSTTSHGSPSSTPTTHFSASSTTLGRSEESTTVHSSPVATATTPSPARSTTSGLVEESTAYHSSPGSTQTMHFPESSTASGRSEESRTSHSSTTHTISSPPSTTSALVEEPTSYHSSPGSTATTHFPDSSTTSGRSEESTASHSSQDATGTIVLPARSTTSVLLGESTTSPISSGSMETTALPGSTTTPGLSEKSTTFHSSPRSPATTLSPASTTSSGVSEESTTSHSRPGSTHTTAFPDSTTTPGLSRHSTTSHSSPGSTDTTLLPASTTTSGPSQESTTSHSSPGSTDTALSPGSTTALSFGQESTTFHSSPGSTHTTLFPDSTTSSGIVEASTRVHSSTGSPRTTLSPASSTSPGLQGESTAFQTHPASTHTTPSPPSTATAPVEESTTYHRSPGSTPTTHFPASSTTSGHSEKSTIFHSSPDASGTTPSSAHSTTSGRGESTTSRISPGSTEITTLPGSTTTPGLSEASTTFYSSPRSPTTTLSPASMTSLGVGEESTTSRSQPGSTHSTVSPASTTTPGLSEESTTVYSSSPGSTETTVFPRTPTTSVRGEEPTTFHSRPASTHTTLFTEDSTTSGLTEESTAFPGSPASTQTGLPATLTTADLGEESTTFPSSSGSTGTTLSPARSTTSGLVGESTPSRLSPSSTETTTLPGSPTTPSLSEKSTTFYTSPRSPDATLSPATTTSSGVSEESSTSHSQPGSTHTTAFPDSTTTPGLSRHSTTSHSSPGSTDTTLLPASTTTSGPSQESTTSHSSPGSTDTALSPGSTTALSFGQESTTFHSSPGSTHTTLFPDSTTSSGIVEASTRVHSSTGSPRTTLSPASSTSPGLQGESTTFQTHPASTHTTPSPPSTATAPVEESTTYHRSPGSTPTTHFPASSTTSGHSEKSTIFHSSPDASGTTPSSAHSTTSGRGESTTSRISPGSTEITTLPGSTTTPGLSEASTTFYSSPRSPTTTLSPASMTSLGVGEESTTSRSQPGSTHSTVSPASTTTPGLSEESTTVYSSSPGSTETTVFPRSTTTSVRGEEPTTFHSRPASTHTTLFTEDSTTSGLTEESTAFPGSPASTQTGLPATLTTADLGEESTTFPSSSGSTGTTLSPARSTTSGLVGESTPSRLSPSSTETTTLPGSPTTPSLSEKSTTFYTSPRSPDATLSPATTTSSGVSEESSTSHSQPGSTHTTAFPDSTTTSGLSQEPTASHSSQGSTEATLSPGSTTASSLGQQSTTFHSSPGDTETTLLPDDTITSGLVEASTPTHSSTGSLHTTLTPASSTSAGLQEESTTFQSWPSSSDTTPSPPGTTAAPVEVSTTYHSRPSSTPTTHFSASSTTLGRSEESTTVHSSPGATGTALFPTRSATSVLVGEPTTSPISSGSTETTALPGSTTTAGLSEKSTTFYSSPRSPDTTLSPASTTSSGVSEESTTSHSRPGSTHTTAFPGSTTMPGVSQESTASHSSPGSTDTTLSPGSTTASSLGPESTTFHSGPGSTETTLLPDNTTASGLLEASTPVHSSTGSPHTTLSPAGSTTRQGESTTFQSWPNSKDTTPAPPTTTSAFVELSTTSHGSPSSTPTTHFSASSTTLGRSEESTTVHSSPVATATTPSPARSTTSGLVEESTTYHSSPGSTQTMHFPESDTTSGRGEESTTSHSSTTHTISSAPSTTSALVEEPTSYHSSPGSTATTHFPDSSTTSGRSEESTASHSSQDATGTIVLPARSTTSVLLGESTTSPISSGSMETTALPGSTTTPGLSEKSTTFHSSPRSPATTLSPASTTSSGVSEESTTSHSRPGSTHTTAFPDSTTTPGLSRHSTTSHSSPGSTDTTLLPASTTTSGSSQESTTSHSSSGSTDTALSPGSTTALSFGQESTTFHSSPGSTHTTLFPDSTTSSGIVEASTRVHSSTGSPRTTLSPASSTSPGLQGESTAFQTHPASTHTTPSPPSTATAPVEESTTYHRSPGSTPTTHFPASSTTSGHSEKSTIFHSSPDASGTTPSSAHSTTSGRGESTTSRISPGSTEITTLPGSTTTPGLSEASTTFYSSPRSPTTTLSPASMTSLGVGEESTTSRSQPGSTHSTVSPASTTTPGLSEESTTVYSSSPGSTETTVFPRSTTTSVRREEPTTFHSRPASTHTTLFTEDSTTSGLTEESTAFPGSPASTQTGLPATLTTADLGEESTTFPSSSGSTGTKLSPARSTTSGLVGESTPSRLSPSSTETTTLPGSPTTPSLSEKSTTFYTSPRSPDATLSPATTTSSGVSEESSTSHSQPGSTHTTAFPDSTTTSGLSQEPTTSHSSQGSTEATLSPGSTTASSLGQQSTTFHSSPGDTETTLLPDDTITSGLVEASTPTHSSTGSLHTTLTPASSTSTGLQEESTTFQSWPSSSDTTPSPPSTTAVPVEVSTTYHSRPSSTPTTHFSASSTTLGRSEESTTVHSSPGATGTALFPTRSATSVLVGEPTTSPISSGSTETTALPGSTTTAGLSEKSTTFYSSPRSPDTTLSPASTTSSGVSEESTTSHSRPGSMHTTAFPSSTTMPGVSQESTASHSSPGSTDTTLSPGSTTASSLGPESTTFHSSPGSTETTLLPDNTTASGLLEASTPVHSSTGSPHTTLSPAGSTTRQGESTTFQSWPNSKDTTPAPPTTTSAFVELSTTSHGSPSSTPTTHFSASSTTLGRSEESTTVHSSPVATATTPSPARSTTSGLVEESTTYHSSPGSTQTMHFPESNTTSGRGEESTTSHSSTTHTISSAPSTTSALVEEPTSYHSSPGSTATTHFPDSSTTSGRSEESTASHSSQDATGTIVLPARSTTSVLLGESTTSPISSGSMETTALPGSTTTPGLSEKSTTFHSSPSSTPTTHFSASSTTLGRSEESTTVHSSPVATATTPSPARSTTSGLVEESTAYHSSPGSTQTMHFPESSTASGRSEESRTSHSSTTHTISSPPSTTSALVEEPTSYHSSPGSIATTHFPESSTTSGRSEESTASHSSPDTNGITPLPAHFTTSGRIAESTTFYISPGSMETTLASTATTPGLSAKSTILYSSSRSPDQTLSPASMTSSSISGEPTSLYSQAESTHTTAFPASTTTSGLSQESTTFHSKPGSTETTLSPGSITTSSFAQEFTTPHSQPGSALSTVSPASTTVPGLSEESTTFYSSPGSTETTAFSHSNTMSIHSQQSTPFPDSPGFTHTVLPATLTTTDIGQESTAFHSSSDATGTTPLPARSTASDLVGEPTTFYISPSPTYTTLFPASSSTSGLTEESTTFHTSPSFTSTIVSTESLETLAPGLCQEGQIWNGKQCVCPQGYVGYQCLSPLESFPVETPEKLNATLGMTVKVTYRNFTEKMNDASSQEYQNFSTLFKNRMDVVLKGDNLPQYRGVNIRRLLNGSIVVKNDVILEADYTLEYEELFENLAEIVKAKIMNETRTTLLDPDSCRKAILCYSEEDTFVDSSVTPGFDFQEQCTQKAAEGYTQFYYVDVLDGKLACVNKCTKGTKSQMNCNLGTCQLQRSGPRCLCPNTNTHWYWGETCEFNIAKSLVYGIVGAVMAVLLLALIILIILFSLSQRKRHREQYDVPQEWRKEGTPGIFQKTAIWEDQNLRESRFGLENAYNNFRPTLETVDSGTELHIQRPEMVASTV

SEQ ID NO: 14694 - protein, 512 aa, Homo sapiens; identical to SEQ ID NO: 9095

SEQ ID NO: 14695 - protein, 334 aa, Homo sapiens
MLALAKILLISTLFYSLLSGSHGKENQDINTTQNIAEVFKTMENKPISLESEANLNSDKENITTSNLKASHSPPLNLPNNSHGITDFSSNSSAEHSLGSLKPTSTISTSPPLIHSFVSKVPWNAPIADEDLLPISAHPNATPALSSENFTWSLVNDTVKTPDNSSITVSILSSEPTSPSVTPLIVEPSGWLTTNSDSFTGFTPYQEKTTLQPTLKFTNNSKLFPNTSDPQKENRNTGIVFGAILGAILGVSLLTLVGYLLCGKRKTDSFSHRRLYDDRNEPVLRLDNAPEPYDVSFGNSSYYNPTLNDSAMPESEENARDGIPMDDIPPLRTSV

SEQ ID NO: 14696 - protein, 14507 aa, Homo sapiens
MLKPSGLPGSSSPTRSLMTGSRSTKATPEMDSGLTGATLSPKTSTGAIVVTEHTLPFTSPDKTLASPTSSVVGRTTQSLGVMSSALPESTSRGMTHSEQRTSPSLSPQVNGTPSRNYPATSMVSGLSSPRTRTSSTEGNFTKEASTYTLTVETTSGPVTEKYTVPTETSTTEGDSTETPWDTRYIPVKITSPMKTFADSTASKENAPVSMTPAETTVTDSHTPGRTNPSFGTLYSSFLDLSPKGTPNSRGETSLELILSTTGYPFSSPEPGSAGHSRISTSAPLSSSASVLDNKISETSIFSGQSLTSPLSPGVPEARASTMPNSAIPFSMTLSNAETSAERVRSTISSLGTPSISTKQTAETILTFHAFAETMDIPSTHIAKTLASEWLGSPGTLGGTSTSALTTTSPSTTLVSEETNTHHSTSGKETEGTLNTSMTPLETSAPGEESEMTATLVPTLGFTTLDSKIRSPSQVSSSHPTRELRTTGSTSGRQSSSTAAHGSSDILRATTSSTSKASSWTSESTAQQFSEPQHTQWVETSPSMKTERPPASTSVAAPITTSVPSVVSGFTTLKTSSTKGIWLEETSADTLIGESTAGPTTHQFAVPTGISMTGGSSTRGSQGTTHLLTRATASSETSADLTLATNGVPVSVSPAVSKTAAGSSPPGGTKPSYTMVSSVIPETSSLQSSAFREGTSLGLTPLNTRHPFSSPEPDSAGHTKISTSIPLLSSASVLEDKVSATSTFSHHKATSSITTGTPEISTKTKPSSAVLSSMTLSNAATSPERVRNATSPLTHPSPSGEETAGSVLTLSTSAETTDSPNIHPTGTLTSESSESPSTLSLPSVSGVKTTFSSSTPSTHLFTSGEETEETSNPSVSQPETSVSRVRTTLASTSVPTPVFPTMDTWPTRSAQFSSSHLVSELRATSSTSVTNSTGSALPKISHLTGTATMSQTNRDTFNDSAAPQSTTWPETSPRFKTGLPSATTTVSTSATSLSATVMVSKFTSPATSSMEATSIREPSTTILTTETTNGPGSMAVASTNIPIGKGYITEGRLDTSHLPIGTTASSETSMDFTMAKESVSMSVSPSQSMDAAGSSTPGRTSQFVDTFSDDVYHLTSREITIPRDGTSSALTPQMTATHPPSPDPGSARSTWLGILSSSPSSPTPKVTMSSTFSTQRVTTSMIMDTVETSRWNMPNLPSTTSLTPSNIPTSGAIGKSTLVPLDTPSPATSLEASEGGLPTLSTYPESTNTPSIHLGAHASSESPSTIKLTMASVVKPGSYTPLTFPSIETHIHVSTARMAYSSGSSPEMTAPGETNTGSTWDPTTYITTTDPKDTSSAQVSTPHSVRTLRTTENHPKTESATPAAYSGSPKISSSPNLTSPATKAWTITDTTEHSTQLHYTKLAEKSSGFETQSAPGPVSVVIPTSPTIGSSTLELTSDVPGEPLVLAPSEQTTITLPMATWLSTSLTEEMASTDLDISSPSSPMSTFAIFPPMSTPSHELSKSEADTSAIRNTDSTTLDQHLGIRSLGRTGDLTTVPITPLTTTWTSVIEHSTQAQDTLSATMSPTHVTQSLKDQTSIPASASPSHLTEVYPELGTQGRSSSEATTFWKPSTDTLSREIETGPTNIQSTPPMDNTTTGSSSSGVTLGIAHLPIGTSSPAETSTNMALERRSSTATVSMAGTMGLLVTSAPGRSISQSLGRVSSVLSESTTEGVTDSSKGSSPRLNTQGNTALSSSLEPSYAEGSQMSTSIPLTSSPTTPDVEFIGGSTFWTKEVTTVMTSDISKSSARTESSSATLMSTALGSTENTGKEKLRTASMDLPSPTPSMEVTPWISLTLSNAPNTTDSLDLSHGVHTSSAGTLATDRSLNTGVTRASRLENGSDTSSKSLSMGNSTHTSMTYTEKSEVSSSIHPRPETSAPGAETTLTSTPGNRAISLTLPFSSIPVEEVISTGITSGPDINSAPMTHSPITPPTIVWTSTGTIEQSTQPLHAVSSEKVSVQTQSTPYVNSVAVSASPTHENSVSSGSSTSSPYSSASLESLDSTISRRNAITSWLWDLTTSLPTTTWPSTSLSEALSSGHSGVSNPSSTTTEFPLFSAASTSAAKQRNPETETHGPQNTAASTLNTDASSVTGLSETPVGASISSEVPLPMAITSRSDVSGLTSESTANPSLGTASSAGTKLTRTISLPTSESLVSFRMNKDPWTVSIPLGSHPTTNTETSIPVNSAGPPGLSTVASDVIDTPSDGAESIPTVSFSPSPDTEVTTISHFPEKTTHSFRTISSLTHELTSRVTPIPGDWMSSAMSTKPTGASPSITLGERRTITSAAPTTSPIVLTASFTETSTVSLDNETTVKTSDILDARKTNELPSDSSSSSDLINTSIASSTMDVTKTASISPTSISGMTASSSPSLFSSDRPQVPTSTTETNTATSPSVSSNTYSLDGGSNVGGTPSTLPPFTITHPVETSSALLAWSRPVRTFSTMVSTDTASGENPTSSNSVVTSVPAPGTWTSVGSTTDLPAMGFLKTSPAGEAHSLLASTIEPATAFTPHLSAAVVTGSSATSEASLLTTSESKAIHSSPQTPTTPTSGANWETSATPESLLVVTETSDTTLTSKILVTDTILFSTVSTPPSKFPSTGTLSGASFPTLLPDTPAIPLTATEPTSSLATSFDSTPLVTIASDSLGTVPETTLTMSETSNGDALVLKTVSNPDRSIPGITIQGVTESPLHPSSTSPSKIVAPRNTTYEGSITVALSTLPAGTTGSLVFSQSSENSETTALVDSSAGLERASVMPLTTGSQGMASSGGIRSGSTHSTGTKTFSSLPLTMNPGEVTAMSEITTNRLTATQSTAPKGIPVKPTSAESGLLTPVSASSSPSKAFASLTTAPPTWGIPQSTLTFEFSEVPSLDTKSASLPTPGQSLNTIPDSDASTASSSLSKSPEKNPRARMMTSTKAISASSFQSTGFTETPEGSASPSMAGHEPRVPTSGTGDPRYASESMSYPDPSKASSAMTSTSLASKLTTLFSTGQAARSGSSSSPISLSTEKETSFLSPTASTSRKTSLFLGPSMARQPNILVHLQTSALTLSPTSTLNMSQEEPPELTSSQTIAEEEGTTAETQTLTFTPSETPTSLLPVSSPTEPTARRKSSPETWASSISVPAKTSLVETTDGTLVTTIKMSSQAAQGNSTWPAPAEETGSSPAGTSPGSPEMSTTLKIMSSKEPSISPEIRSTVRNSPWKTPETTVPMETTVEPVTLQSTALGSGSTSISHLPTGTTSPTKSPTENMLATERVSLSPSPPEAWTNLYSGTPGGTRQSLATMSSVSLESPTARSITGTGQQSSPELVSKTTGMEFSMWHGSTGGTTGDTHVSLSTSSNILEDPVTSPNSVSSLTDKSKHKTETWVSTTAIPSTVLNNKIMAAEQQTSRSVDEAYSSTSSWSDQTSGSDITLGASPDVTNTLYITSTAQTTSLVSLPSGDQGITSLTNPSGGKTSSASSVTSPSIGLETLRANVSAVKSDIAPTAGHLSQTSSPAEVSILDVTTAPTPGISTTITTMGTNSISTTTPNPEVGMSTMDSTPATERRTTSTEHPSTWSSTAASDSWTVTDMTSNLKVARSPGTISTMHTTSFLASSTELDSMSTPHGRITVIGTSLVTPSSDASAVKTETSTSERTLSPSDTTASTPISTFSRVQRMSISVPDILSTSWTPSSTEAEDVPVSMVSTDHASTKTDPNTPLSTFLFDSLSTLDWDTGRSLSSATATTSAPQGATTPQELTLETMISPATSQLPFSIGHITSAVTPAAMARSSGVTFSRPDPTSKKAEQTSTQLPTTTSAHPGQVPRSAATTLDVIPHTAKTPDATFQRQGQTALTTEARATSDSWNEKEKSTPSAPWITEMMNSVSEDTIKEVTSSSSVLRTLNTLDINLESGTTSSPSWKSSPYERIAPSESTTDKEAIHPSTNTVETTGWVTSSEHASHSTIPAHSASSKLTSPVVTTSTREQAIVSMSTTTWPESTRARTEPNSFLTIELRDVSPYMDTSSTTQTSIISSPGSTAITKGPRTEITSSKRISSSFLAQSMRSSDSPSEAITRLSNFPAMTESGGMILAMQTSPPGATSLSAPTLDTSATASWTGTPLATTQRFTYSEKTTLFSKGPEDTSQPSPPSVEETSSSSSLVPIHATTSPSNILLTSQGHSPSSTPPVTSVFLSETSGLGKTTDMSRISLEPGTSLPPNLSSTAGEALSTYEASRDTKAIHHSADTAVTNMEATSSEYSPIPGHTKPSKATSPLVTSHIMGDITSSTSVFGSSETTEIETVSSVNQGLQERSTSQVASSATETSTVITHVSSGDATTHVTKTQATFSSGTSISSPHQFITSTNTFTDVSTNPSTSLIMTESSGVTITTQTGPTGAATQGPYLLDTSTMPYLTETPLAVTPDFMQSEKTTLISKGPKDVSWTSPPSVAETSYPSSLTPFLVTTIPPATSTLQGQHTSSPVSATSVLTSGLVKTTDMLNTSMEPVTNSPQNLNNPSNEILATLAATTDIETIHPSINKAVTNMGTASSAHVLHSTLPVSSEPSTATSPMVPASSMGDALASISIPGSETTDIEGEPTSSLTAGRKENSTLQEMNSTTESNIILSNVSVGAITEATKMEVPSFDATFIPTPAQSTKFPDIFSVASSRLSNSPPMTISTHMTTTQTGSSGATSKIPLALDTSTLETSAGTPSVVTEGFAHSKITTAMNNDVKDVSQTNPPFQDEASSPSSQAPVLVTTLPSSVAFTPQWHSTSSPVSMSSVLTSSLVKTAGKVDTSLETVTSSPQSMSNTLDDISVTSAATTDIETTHPSINTVVTNVGTTGSAFESHSTVSAYPEPSKVTSPNVTTSTMEDTTISRSIPKSSKTTRTETETTSSLTPKLRETSISQEITSSTETSTVPYKELTGATTEVSRTDVTSSSSTSFPGPDQSTVSLDISTETNTRLSTSPIMTESAEITITTQTGPHGATSQDTFTMDPSNTTPQAGIHSAMTHGFSQLDVTTLMSRIPQDVSWTSPPSVDKTSSPSSFLSSPAMTTPSLISSTLPEDKLSSPMTSLLTSGLVKITDILRTRLEPVTSSLPNFSSTSDKILATSKDSKDTKEIFPSINTEETNVKANNSGHESHSPALADSETPKATTQMVITTTVGDPAPSTSMPVHGSSETTNIKREPTYFLTPRLRETSTSQESSFPTDTSFLLSKVPTGTITEVSSTGVNSSSKISTPDHDKSTVPPDTFTGEIPRVFTSSIKTKSAEMTITTQASPPESASHSTLPLDTSTTLSQGGTHSTVTQGFPYSEVTTLMGMGPGNVSWMTTPPVEETSSVSSLMSSPAMTSPSPVSSTSPQSIPSSPLPVTALPTSVLVTTTDVLGTTSPESVTSSPPNLSSITHERPATYKDTAHTEAAMHHSTNTAVTNVGTSGSGHKSQSSVLADSETSKATPLMSTTSTLGDTSVSTSTPNISQTNQIQTEPTASLSPRLRESSTSEKTSSTTETNTAFSYVPTGAITQASRTEISSSRTSISDLDRPTIAPDISTGMITRLFTSPIMTKSAEMTVTTQTTTPGATSQGILPWDTSTTLFQGGTHSTVSQGFPHSEITTLRSRTPGDVSWMTTPPVEETSSGFSLMSPSMTSPSPVSSTSPESIPSSPLPVTALLTSVLVTTTNVLGTTSPEPVTSSPPNLSSPTQERLTTYKDTAHTEAMHASMHTNTAVANVGTSISGHESQSSVPADSHTSKATSPMGITFAMGDTSVSTSTPAFFETRIQTESTSSLIPGLRDTRTSEEINTVTETSTVLSEVPTTTTTEVSRTEVITSSRTTISGPDHSKMSPYISTETITRLSTFPFVTGSTEMAITNQTGPIGTISQATLTLDTSSTASWEGTHSPVTQRFPHSEETTTMSRSTKGVSWQSPPSVEETSSPSSPVPLPAITSHSSLYSAVSGSSPTSALPVTSLLTSGRRKTIDMLDTHSELVTSSLPSASSFSGEILTSEASTNTETIHFSENTAETNMGTTNSMHKLHSSVSIHSQPSGHTPPKVTGSMMEDAIVSTSTPGSPETKNVDRDSTSPLTPELKEDSTALVMNSTTESNTVFSSVSLDAATEVSRAEVTYYDPTFMPASAQSTKSPDISPEASSSHSNSPPLTISTHKTIATQTGPSGVTSLGQLTLDTSTIATSAGTPSARTQDFVDSETTSVMNNDLNDVLKTSPFSAEEANSLSSQAPLLVTTSPSPVTSTLQEHSTSSLVSVTSVPTPTLAKITDMDTNLEPVTRSPQNLRNTLATSEATTDTHTMHPSINTAVANVGTTSSPNEFYFTVSPDSDPYKATSAVVITSTSGDSIVSTSMPRSSAMKKIESETTFSLIFRLRETSTSQKIGSSSDTSTVFDKAFTAATTEVSRTELTSSSRTSIQGTEKPTMSPDTSTRSVTMLSTFAGLTKSEERTIATQTGPHRATSQGTLTWDTSITTSQAGTHSAMTHGFSQLDLSTLTSRVPEYISGTSPPSVEKTSSSSSLLSLPAITSPSPVPTTLPESRPSSPVHLTSLPTSGLVKTTDMLASVASLPPNLGSTSHKIPTTSEDIKDTEKMYPSTNIAVTNVGTTTSEKESYSSVPAYSEPPKVTSPMVTSFNIRDTIVSTSMPGSSEITRIEMESTFSLAHGLKGTSTSQDPIVSTEKSAVLHKLTTGATETSRTEVASSRRTSIPGPDHSTESPDISTEVIPSLPISLGITESSNMTIITRTGPPLGSTSQGTFTLDTPTTSSRAGTHSMATQEFPHSEMTTVMNKDPEILSWTIPPSIEKTSFSSSLMPSPAMTSPPVSSTLPKTIHTTPSPMTSLLTPSLVMTTDTLGTSPEPTTSSPPNLSSTSHEILTTDEDTTAIEAMHPSTSTAATNVETTSSGHGSQSSVLADSEKTKATAPMDTTSTMGHTTVSTSMSVSSETTKIKRESTYSLTPGLRETSISQNASFSTDTSIVLSEVPTGTTAEVSRTEVTSSGRTSIPGPSQSTVLPEISTRTMTRLFASPTMTESAEMTIPTQTGPSGSTSQDTLTLDTSTTKSQAKTHSTLTQRFPHSEMTTLMSRGPGDMSWQSSPSLENPSSLPSLLSLPATTSPPPISSTLPVTISSSPLPVTSLLTSSPVTTTDMLHTSPELVTSSPPKLSHTSDERLTTGKDTTNTEAVHPSTNTAASNVEIPSSGHESPSSALADSETSKATSPMFITSTQEDTTVAISTPHFLETSRIQKESISSLSPKLRETGSSVETSSAIETSAVLSEVSIGATTEISRTEVTSSSRTSISGSAESTMLPEISTTRKIIKFPTSPILAESSEMTIKTQTSPPGSTSESTFTLDTSTTPSLVITHSTMTQRLPHSEITTLVSRGAGDVPRPSSLPVEETSPPSSQLSLSAMISPSPVSSTLPASSHSSSASVTSLLTPGQVKTTEVLDASAEPETSSPPSLSSTSVEILATSEVTTDTEKIHPFSNTAVTKVGTSSSGHESPSSVLPDSETTKATSAMGTISIMGDTSVSTLTPALSNTRKIQSEPASSLTTRLRETSTSEETSLATEANTVLSKVSTGATTEVSRTEAISFSRTSMSGPEQSTMSQDISIGTIPRISASSVLTESAKMTITTQTGPSESTLESTLNLNTATTPSWVETHSIVIQGFPHPEMTTSMGRGPGGVSWPSPPFVKETSPPSSPLSLPAVTSPHPVSTTFLAHIPPSPLPVTSLLTSGPATTTDILGTSTEPGTSSSSSLSTTSHERLTTYKDTAHTEAVHPSTNTGGTNVATTSSGYKSQSSVLADSSPMCTTSTMGDTSVLTSTPAFLETRRIQTELASSLTPGLRESSGSEGTSSGTKMSTVLSKVPTGATTEISKEDVTSIPGPAQSTISPDISTRTVSWFSTSPVMTESAEITMNTHTSPLGATTQGTSTLDTSSTTSLTMTHSTISQGFSHSQMSTLMRRGPEDVSWMSPPLLEKTRPSFSLMSSPATTSPSPVSSTLPESISSSPLPVTSLLTSGLAKTTDMLHKSSEPVTNSPANLSSTSVEILATSEVTTDTEKTHPSSNRTVTDVGTSSSGHESTSFVLADSQTSKVTSPMVITSTMEDTSVSTSTPGFFETSRIQTEPTSSLTLGLRKTSSSEGTSLATEMSTVLSGVPTGATAEVSRTEVTSSSRTSISGFAQLTVSPETSTETITRLPTSSIMTESAEMMIKTQTDPPGSTPESTHTVDISTTPNWVETHSTVTQRFSHSEMTTLVSRSPGDMLWPSQSSVEETSSASSLLSLPATTSPSPVSSTLVEDFPSASLPVTSLLNPGLVITTDRMGISREPGTSSTSNLSSTSHERLTTLEDTVDTEDMQPSTHTAVTNVRTSISGHESQSSVLSDSETPKATSPMGTTYTMGETSVSISTSDFFETSRIQIEPTSSLTSGLRETSSSERISSATEGSTVLSEVPSGATTEVSRTEVISSRGTSMSGPDQFTISPDISTEAITRLSTSPIMTESAESAITIETGSPGATSEGTLTLDTSTTTFWSGTHSTASPGFSHSEMTTLMSRTPGDVPWPSLPSVEEASSVSSSLSSPAMTSTSFFSTLPESISSSPHPVTALLTLGPVKTTDMLRTSSEPETSSPPNLSSTSAEILATSEVTKDREKIHPSSNTPVVNVGTVIYKHLSPSSVLADLVTTKPTSPMATTSTLGNTSVSTSTPAFPETMMTQPTSSLTSGLREISTSQETSSATERSASLSGMPTGATTKVSRTEALSLGRTSTPGPAQSTISPEISTETITRISTPLTTTGSAEMTITPKTGHSGASSQGTFTLDTSSRASWPGTHSAATHRSPHSGMTTPMSRGPEDVSWPSRPSVEKTSPPSSLVSLSAVTSPSPLYSTPSESSHSSPLRVTSLFTPVMMKTTDMLDTSLEPVTTSPPSMNITSDESLATSKATMETEAIQLSENTAVTQMGTISARQEFYSSYPGLPEPSKVTSPVVTSSTIKDIVSTTIPASSEITRIEMESTSTLTPTPRETSTSQEIHSATKPSTVPYKALTSATIEDSMTQVMSSSRGPSPDQSTMSQDISTEVITRLSTSPIKTESTEMTITTQTGSPGATSRGTLTLDTSTTFMSGTHSTASQGFSHSQMTALMSRTPGDVPWLSHPSVEEASSASFSLSSPVMTSSSPVSSTLPDSIHSSSLPVTSLLTSGLVKTTELLGTSSEPETSSPPNLSSTSAEILAITEVTTDTEKLEMTNVVTSGYTHESPSSVLADSVTTKATSSMGITYPTGDTNVLTSTPAFSDTSRIQTKSKLSLTPGLMETSISEETSSATEKSTVLSSVPTGATTEVSRTEAISSSRTSIPGPAQSTMSSDTSMETITRISTPLTRKESTDMAITPKTGPSGATSQGTFTLDSSSTASWPGTHSATTQRFPQSVVTTPMSRGPEDVSWPSPLSVEKNSPPSSLVSSSSVTSPSPLYSTPSGSSHSSPVPVTSLFTSIMMKATDMLDASLEPETTSAPNMNITSDESLAASKATTETEAIHVFENTAASHVETTSATEELYSSSPGFSEPTKVISPVVTSSSIRDNMVSTTMPGSSGITRIEIESMSSLTPGLRETRTSQDITSSTETSTVLYKMPSGATPEVSRTEVMPSSRTSIPGPAQSTMSLDISDEVVTRLSTSPIMTESAEITITTQTGYSLATSQVTLPLGTSMTFLSGTHSTMSQGLSHSEMTNLMSRGPESLSWTSPRFVETTRSSSSLTSLPLTTSLSPVSSTLLDSSPSSPLPVTSLILPGLVKTTEVLDTSSEPKTSSSPNLSSTSVEIPATSEIMTDTEKIHPSSNTAVAKVRTSSSVHESHSSVLADSETTITIPSMGITSAVDDTTVFTSNPAFSETRRIPTEPTFSLTPGFRETSTSEETTSITETSAVLYGVPTSATTEVSMTEIMSSNRIHIPDSDQSTMSPDIITEVITRLSSSSMMSESTQMTITTQKSSPGATAQSTLTLATTTAPLARTHSTVPPRFLHSEMTTLMSRSPENPSWKSSLFVEKTSSSSSLLSLPVTTSPSVSSTLPQSIPSSSFSVTSLLTPGMVKTTDTSTEPGTSLSPNLSGTSVEILAASEVTTDTEKIHPSSSMAVTNVGTTSSGHELYSSVSIHSEPSKATYPVGTPSSMAETSISTSMPANFETTGFEAEPFSHLTSGFRKTNMSLDTSSVTPTNTPSSPGSTHLLQSSKTDFTSSAKTSSPDWPPASQYTEIPVDIITPFNASPSITESTGITSFPESRFTMSVTESTHHLSTDLLPSAETISTGTVMPSLSEAMTSFATTGVPRAISGSGSPFSRTESGPGDATLSTIAESLPSSTPVPFSSSTFTTTDSSTIPALHEITSSSATPYRVDTSLGTESSTTEGRLVMVSTLDTSSQPGRTSSSPILDTRMTESVELGTVTSAYQVPSLSTRLTRTDGIMEHITKIPNEAAHRGTIRPVKGPQTSTSPASPKGLHTGGTKRMETTTTALKTTTTALKTTSRATLTTSVYTPTLGTLTPLNASMQMASTIPTEMMITTPYVFPDVPETTSSLATSLGAETSTALPRTTPSVFNRESETTASLVSRSGAERSPVIQTLDVSSSEPDTTASWVIHPAETIPTVSKTTPNFFHSELDTVSSTATSHGADVSSAIPTNISPSELDALTPLVTISGTDTSTTFPTLTKSPHETETRTTWLTHPAETSSTIPRTIPNFSHHESDATPSIATSPGAETSSAIPIMTVSPGAEDLVTSQVTSSGTDRNMTIPTLTLSPGEPKTIASLVTHPEAQTSSAIPTSTISPAVSRLVTSMVTSLAAKTSTTNRALTNSPGEPATTVSLVTHPAQTSPTVPWTTSIFFHSKSDTTPSMTTSHGAESSSAVPTPTVSTEVPGVVTPLVTSSRAVISTTIPILTLSPGEPETTPSMATSHGEEASSAIPTPTVSPGVPGVVTSLVTSSRAVTSTTIPILTFSLGEPETTPSMATSHGTEAGSAVPTVLPEVPGMVTSLVASSRAVTSTTLPTLTLSPGEPETTPSMATSHGAEASSTVPTVSPEVPGVVTSLVTSSSGVNSTSIPTLILSPGELETTPSMATSHGAEASSAVPTPTVSPGVSGVVTPLVTSSRAVTSTTIPILTLSSSEPETTPSMATSHGVEASSAVLTVSPEVPGMVTSLVTSSRAVTSTTIPTLTISSDEPETTTSLVTHSEAKMISAIPTLAVSPTVQGLVTSLVTSSGSETSAFSNLTVASSQPETIDSWVAHPGTEASSVVPTLTVSTGEPFTNISLVTHPAESSSTLPRTTSRFSHSELDTMPSTVTSPEAESSSAISTTISPGIPGVLTSLVTSSGRDISATFPTVPESPHESEATASWVTHPAVTSTTVPRTTPNYSHSEPDTTPSIATSPGAEATSDFPTITVSPDVPDMVTSQVTSSGTDTSITIPTLTLSSGEPETTTSFITYSETHTSSAIPTLPVSPGASKMLTSLVISSGTDSTTTFPTLTETPYEPETTAIQLIHPAETNTMVPRTTPKFSHSKSDTTLPVAITSPGPEASSAVSTTTISPDMSDLVTSLVPSSGTDTSTTFPTLSETPYEPETTATWLTHPAETSTTVSGTIPNFSHRGSDTAPSMVTSPGVDTRSGVPTTTIPPSIPGVVTSQVTSSATDTSTAIPTLTPSPGEPETTASSATHPGTQTGFTVPIRTVPSSEPDTMASWVTHPPQTSTPVSRTTSSFSHSSPDATPVMATSPRTEASSAVLTTISPGAPEMVTSQITSSGAATSTTVPTLTHSPGMPETTALLSTHPRTETSKTFPASTVFPQVSETTASLTIRPGAETSTALPTQTTSSLFTLLVTGTSRVDLSPTASPGVSAKTAPLSTHPGTETSTMIPTSTLSLGLLETTGLLATSSSAETSTSTLTLTVSPAVSGLSSASITTDKPQTVTSWNTETSPSVTSVGPPEFSRTVTGTTMTLIPSEMPTPPKTSHGEGVSPTTILRTTMVEATNLATTGSSPTVAKTTTTFNTLAGSLFTPLTTPGMSTLASESVTSRTSYNHRSWISTTSSYNRRYWTPATSTPVTSTFSPGISTSSIPSSTAATVPFMVPFTLNFTITNLQYEEDMRHPGSRKFNATERELQGLLKPLFRNSSLEYLYSGCRLASLRPEKDSSATAVDAICTHRPDPEDLGLDRERLYWELSNLTNGIQELGPYTLDRNSLYVNGFTHRSSMPTTSTPGTSTVDVGTSGTPSSSPSPTTAGPLLMPFTLNFTITNLQYEEDMRRTGSRKFNTMESVLQGLLKPLFKNTSVGPLYSGCRLTLLRPEKDGAATGVDAICTHRLDPKSPGLNREQLYWELSKLTNDIEELGPYTLDRNSLYVNGFTHQSSVSTTSTPGTSTVDLRTSGTPSSLSSPTIMAAGPLLVPFTLNFTITNLQYGEDMGHPGSRKFNTTERVLQGLLGPIFKNTSVGPLYSGCRLTSLRSEKDGAATGVDAICIHHLDPKSPGLNRERLYWELSQLTNGIKELGPYTLDRNSLYVNGFTHRTSVPTSSTPGTSTVDLGTSGTPFSLPSPATAGPLLVLFTLNFTITNLKYEEDMHRPGSRKFNTTERVLQTLLGPMFKNTSVGLLYSGCRLTLLRSEKDGAATGVDAICTHRLDPKSPGVDREQLYWELSQLTNGIKELGPYTLDRNSLYVNGFTHWIPVPTSSTPGTSTVDLGSGTPSSLPSPTTAGPLLVPFTLNFTITNLKYEEDMHCPGSRKFNTTERVLQSLLGPMFKNTSVGPLYSGCRLTLLRSEKDGAATGVDAICTHRLDPKSPGVDREQLYWELSQLTNGIKELGPYTLDRNSLYVNGFTHQTSAPNTSTPGTSTVDLGTSGTPSSLPSPTSAGPLLVPFTLNFTITNLQYEEDMHHPGSRKFNTTERVLQGLLGPMFKNTSVGLLYSGCRLTLLRPEKNGAATGMDAICSHRLDPKSPGLNREQLYWELSQLTHGIKELGPYTLDRNSLYVNGFTHRSSVAPTSTPGTSTVDLGTSGTPSSLPSPTTAVPLLVPFTLNFTITNLQYGEDMRHPGSRKFNTTERVLQGLLGPLFKNSSVGPLYSGCRLISLRSEKDGAATGVDAICTHHLNPQSPGLDREQLYWQLSQMTNGIKELGPYTLDRNSLYVNGFTHRSSGLTTSTPWTSTVDLGTSGTPSPVPSPTTTGPLLVPFTLNFTITNLQYEENMGHPGSRKFNITESVLQGLLKPLFKSTSVGPLYSGCRLTLLRPEKDGVATRVDAICTHRPDPKIPGLDRQQLYWELSQLTHSITELGPYTLDRDSLYVNGFTQRSSVPTTSTPGTFTVQPETSETPSSLPGPTATGPVLLPFTLNFTITNLQYEEDMRRPGSRKFNTTERVLQGLLMPLFKNTSVSSLYSGCRLTLLRPEKDGAATRVDAVCTHRPDPKSPGLDRERLYWKLSQLTHGITELGPYTLDRHSLYVNGFTHQSSMTTTRTPDTSTMHLATSRTPASLSGPMTASPLLVLFTINFTITNLRYEENMHHPGSRKFNTTERVLQGLLRPVFKNTSVGPLYSGCRLTLLRPKKDGAATKVDAICTYRPDPKSPGLDREQLYWELSQLTHSITELGPYTLDRDSLYVNGFTQRSSVPTTSIPGTPTVDLGTSGTPVSKPGPSAASPLLVLFTLNFTITNLRYEENMQHPGSRKFNTTERVLQGLLRSLFKSTSVGPLYSGCRLTLLRPEKDGTATGVDAICTHHPDPKSPRLDREQLYWELSQLTHNITELGPYALDNDSLFVNGFTHRSSVSTTSTPGTPTVYLGASKTPASIFGPSAASHLLILFTLNFTITNLRYEENMWPGSRKFNTTERVLQGLLRPLFKNTSVGPLYSGCRLTLLRPEKDGEATGVDAICTHRPDPTGPGLDREQLYLELSQLTHSITELGPYTLDRDSLYVNGFTHRSSVPTTSTGVVSEEPFTLNFTINNLRYMADMGQPGSLKFNITDNVMQHLLSPLFQRSSLGARYTGCRVIALRSVKNGAETRVDLLCTYLQPLSGPGLPIKQVFHELSQQTHGITRLGPYSLDKDSLYLNGYNEPGPDEPPTTPKPATTFLPPLSEATTAMGYHLKTLTLNFTISNLQYSPDMGKGSATFNSTEGVLQHLLRPLFQKSSMGPFYLGCQLISLRPEKDGAATGVDTTCTYHPDPVGPGLDIQQLYWELSQLTHGVTQLGFYVLDRDSLFINGYAPQNLSIRGEYQINFHIVNWNLSNPDPTSSEYITLLRDIQDKVTTLYKGSQLHDTFRFCLVTNLTMDSVLVTVKALFSSNLDPSLVEQVFLDKTLNASFHWLGSTYQLVDIHVTEMESSVYQPTSSSSTQHFYLNFTITNLPYSQDKAQPGTTNYQRNKRNIEDALNQLFRNSSIKSYFSDCQVSTFRSVPNRHHTGVDSLCNFSPLARRVDRVAIYEEFLRMTRNGTQLQNFTLDRSSVLVDGYSPNRNEPLTGNSDLPFWAVILIGLAGLLGVITCLICGVLVTTRRRKKEGEYNVQQQCPGYYQSHLDLEDLQ

SEQ ID NO: 14697 - protein, 4493 aa, Homo sapiens
MPRPGTMALCLLTLVLSLLPPQAAAEQDLSVNRAVWDGGGCISQGDVLNRQCQQLSQHVRTGSAANTATGTTSTNVVEPRMYLSCSTNPEMTSIESSVTSDTPGVSSTRMTPTESRTTSESTSDSTTLFPSSTEDTSSPTTPEGTDVPMSTPSEESISSTMAFVSTAPLPSFEAYTSLTYKVDMSTPLTTSTQASSSPTTPESTTIPKSTNSEGSTPLTSMPASTMKVASSEAITLLTTPVEISTPVTISAQASSSPTTAEGPSLSNSAPSGGSTPLTRMPLSVMLVVSSEASTLSTTPAATNIPVITSTEASSSPTTAEGTSIPTSTYTEGSTPLTSTPASTMPVATSEMSTLSITPVDTSTLVTTSTEPSSLPTTAEATSMLTSTLSEGSTPLTNMPVSTILVASSEASTTSTIPVDSKTFVTTASEASSSPTTAEDTSIATSTPSEGSTPLTSMPVSTTPVASSEASNLSTTPVDSKTQVTTSTEASSSPPTAEVNSMPTSTPSEGSTPLTSMSVSTMPVASSEASTLSTTPVDTSTPVTTSSEASSSSTTPEGTSIPTSTPSEGSTPLTNMPVSTRLVVSSEASTTSTTPADSNTFVTTSSEASSSSTTAEGTSMPTSTYSERGTTITSMSVSTTLVASSEASTLSTTPVDSNTPVTTSTEATSSSTTAEGTSMPTSTYTEGSTPLTSMPVNTTLVASSEASTLSTTPVDTSTPVTTSTEASSSPTTADGASMPTSTPSEGSTPLTSMPVSKTLLTSSEASTLSTTPLDTSTHITTSTEASCSPTTTEGTSMPISTPSEGSPLLTSIPVSITPVTSPEASTLSTTPVDSNSPVTTSTEVSSSPTPAEGTSMPTSTYSEGRTPLTSMPVSTTLVATSAISTLSTTPVDTSTPVTNSTEARSSPTTSEGTSMPTSTPGEGSTPLTSMPDSTTPVVSSEARTLSATPVDTSTPVTTSTEATSSPTTAEGTSIPTSTPSEGTTPLTSTPVSHTLVANSEASTLSTTPVDSNTPLTTSTEASSPPPTAEGTSMPTSTPSEGSTPLTRMPVSTTMVASSETSTLSTTPADTSTPVTTYSQASSSSTTADGTSMPTSTYSEGSTPLTSVPVSTRLVVSSEASTLSTTPVDTSIPVTTSTEASSSPTTAEGTSIPTSPPSEGTTPLASMPVSTTLVVSSEANTLSTTPVDSKTQVATSTEASSPPPTAEVTSMPTSTPGERSTPLTSMPVRHTPVASSEASTLSTSPVDTSTPVTTSAETSSSPTTAEGTSLPTSTTSEGSTLLTSIPVSTTLVTSPEASTLLTTPVDTKGPVVTSNEVSSSPTPAEGTSMPTSTYSEGRTPLTSIPVNTTLVASSAISILSTTPVDNSTPVTTSTEACSSPTTSEGTSMPNSNPSEGTTPLTSIPVSTTPVVSSEASTLSATPVDTSTPGTTSAEATSSPTTAEGISIPTSTPSEGKTPLKSIPVSNTPVANSEASTLSTTPVDSNSPVVTSTAVSSSPTPAEGTSIAISTPSEGSTALTSIPVSTTTVASSEINSLSTTPAVTSTPVTTYSQASSSPTTADGTSMQTSTYSEGSTPLTSLPVSTMLVVSSEANTLSTTPIDSKTQVTASTEASSSTTAEGSSMTISTPSEGSPLLTSIPVSTTPVASPEASTLSTTPVDSNSPVITSTEVSSSPTPAEGTSMPTSTYTEGRTPLTSITVRTTPVASSAISTLSTTPVDNSTPVTTSTEARSSPTTSEGTSMPNSTPSEGTTPLTSIPVSTTPVLSSEASTLSATPIDTSTPVTTSTEATSSPTTAEGTSIPTSTLSEGMTPLTSTPVSHTLVANSEASTLSTTPVDSNSPVVTSTAVSSSPTPAEGTSIATSTPSEGSTALTSIPVSTTTVASSETNTLSTTPAVTSTPVTTYAQVSSSPTTADGSSMPTSTPREGRPPLTSIPVSTTTVASSEINTLSTTLADTRTPVTTYSQASSSPTTADGTSMPTPAYSEGSTPLTSMPLSTTLVVSSEASTLSTTPVDTSTPATTSTEGSSSPTTAGGTSIQTSTPSERTTPLAGMPVSTTLVVSSEGNTLSTTPVDSKTQVTNSTEASSSATAEGSSMTISAPSEGSPLLTSIPLSTTPVASPEASTLSTTPVDSNSPVITSTEVSSSPIPTEGTSMQTSTYSDRRTPLTSMPVSTTVVASSAISTLSTTPVDTSTPVTNSTEARSSPTTSEGTSMPTSTPSEGSTPFTSMPVSTMPVVTSEASTLSATPVDTSTPVTTSTEATSSPTTAEGTSIPTSTLSEGTTPLTSIPVSHTLVANSEVSTLSTTPVDSNTPFTTSTEASSPPPTAEGTSMPTSTSSEGNTPLTRMPVSTTMVASFETSTLSTTPADTSTPVTTYSQAGSSPTTADDTSMPTSTYSEGSTPLTSVPVSTMPVVSSEASTHSTTPVDTSTPVTTSTEASSSPTTAEGTSIPTSPPSEGTTPLASMPVSTTPVVSSEAGTLSTTPVDTSTPMTTSTEASSSPTTAEDIVVPISTASEGSTLLTSIPVSTTPVASPEASTLSTTPVDSNSPVVTSTEISSSATSAEGTSMPTSTYSEGSTPLRSMPVSTKPLASSEASTLSTTPVDTSIPVTTSTETSSSPTTAKDTSMPISTPSEVSTSLTSILVSTMPVASSEASTLSTTPVDTRTLVTTSTGTSSSPTTAEGSSMPTSTPGERSTPLTNILVSTTLLANSEASTLSTTPVDTSTPVTTSAEASSSPTTAEGTSMRISTPSDGSTPLTSILVSTLPVASSEASTVSTTAVDTSIPVTTSTEASSSPTTAEVTSMPTSTPSETSTPLTSMPVNHTPVASSEAGTLSTTPVDTSTPVTTSTKASSSPTTAEGIVVPISTASEGSTLLTSIPVSTTPVASSEASTLSTTPVDTSIPVTTSTEGSSSPTTAEGTSMPISTPSEVSTPLTSILVSTVPVAGSEASTLSTTPVDTRTPVTTSAEASSSPTTAEGTSMPISTPGERRTPLTSMSVSTMPVASSEASTLSRTPADTSTPVTTSTEASSSPTTAEGTGIPISTPSEGSTPLTSIPVSTTPVAIPEASTLSTTPVDSNSPVVTSTEVSSSPTPAEGTSMPISTYSEGSTPLTGVPVSTTPVTSSAISTLSTTPVDTSTPVTTSTEAHSSPTTSEGTSMPTSTPSEGSTPLTYMPVSTMLVVSSEDSTLSATPVDTSTPVTTSTEATSSTTAEGTSIPTSTPSEGMTPLTSVPVSNTPVASSEASILSTTPVDSNTPLTTSTEASSSPPTAEGTSMPTSTPSEGSTPLTSMPVSTTTVASSETSTLSTTPADTSTPVTTYSQASSSPPIADGTSMPTSTYSEGSTPLTNMSFSTTPVVSSEASTLSTTPVDTSTPVTTSTEASLSPTTAEGTSIPTSSPSEGTTPLASMPVSTTPVVSSEVNTLSTTPVDSNTLVTTSTEASSSPTIAEGTSLPTSTTSEGSTPLSIMPLSTTPVASSEASTLSTTPVDTSTPVTTSSPTNSSPTTAEVTSMPTSTAGEGSTPLTNMPVSTTPVASSEASTLSTTPVDSNTFVTSSSQASSSPATLQVTTMRMSTPSEGSSSLTTMLLSSTYVTSSEASTPSTPSVDRSTPVTTSTQSNSTPTPPEVITLPMSTPSEVSTPLTIMPVSTTSVTISEAGTASTLPVDTSTPVITSTQVSSSPVTPEGTTMPIWTPSEGSTPLTTMPVSTTRVTSSEGSTLSTPSVVTSTPVTTSTEAISSSATLDSTTMSVSMPMEISTLGTTILVSTTPVTRFPESSTPSIPSVYTSMSMTTASEGSSSPTTLEGTTTMPMSTTSERSTLLTTVLISPISVMSPSEASTLSTPPGDTSTPLLTSTKAGSFSIPAEVTTIRISITSERSTPLTTLLVSTTLPTSFPGASIASTPPLDTSTTFTPSTDTASTPTIPVATTISVSVITEGSTPGTTIFIPSTPVTSSTADVFPATTGAVSTPVITSTELNTPSTSSSSTTTSFSTTKEFTTPAMTTAAPLTYVTMSTAPSTPRTTSRGCTTSASTLSATSTPHTSTSVTTRPVTPSSESSRPSTITSHTIPPTFPPAHSSTPPTTSASSTTVNPEAVTTMTTRTKPSTRTTSFPTVTTTAVPTNTTIKSNPTSTPTVPRTTTCFGDGCQNTASRCKNGGTWDGLKCQCPNLYYGELCEEVVSSIDIGPPETISAQMELTVTVTSVKFTEELKNHSSQEFQEFKQTFTEQMNIVYSGIPEYVGVNITKLRLGSVVVEHDVLLRTKYTPEYKTVLDNATEVVKEKITKVTTQQIMINDICSDMMCFNTTGTQVQNITVTQYDPEEDCRKMAKEYGDYFVVEYRDQKPYCISPCEPGFSVSKNCNLGKCQMSLSGPQCLCVTTETHWYSGETCNQGTQKSLVYGLVGAGVVLMLIILVALLMLVFRSKREVKRQKYRLSQLYKWQEEDSGPAPGTFQNIGFDICQDDDSIHLESIYSNFQPSLRHIDPETKIRIQRPQVMTTSF

SEQ ID NO: 14698 - protein, 8384 aa, Homo sapiens
MKLILWYLVVALWCFFKDVEALLYRQKSDGKIAASRSGGFSYGSSSSGDLDRKKPLFSLEFGSPGETEDKSRQRQDAGSPKSEDTPAGGFFNSSSSSGDSDRTKPFFSLGLGAPGKAEDKSGDSQDAGGSKSEDTPPGGFFYGSSSSGDSDKKKPLFSFEFGATGEDEDKSRERWDAGNSRSEDSPADSTNTRYGAGFSSSGASLDVGFGWGISDEKGLEVSKADGRETRGSGSAGGETIVFGPDAGSSVGTGSSGLKLGAGKGDAAFGFEVSDSNSFGDTGISSKTVEGNQTSSSGGSVSIDLGDTSFRSENQFVGGGSLNSISNLWDSGQEGFGINEIGGNGMSGSVSAEAGFKGFGSDSSSSGDSSARNGFENSSGISEDSGVILGSSDQHEVELSRTGGNRKRSSDPDEAGNLSPGSDVSDSGGNTWSSDSGSGGGGVTSSSEYSTSGPLNTPEKGSHIPEATPKYSETNAIIGEISTWSKGAYKSFNGRIFFFESSCPYTFCRHCIESGGDFNIEIKRNNDSEIEKITVLIDNNDVSIFGDTILVNGESVQIPYNNKLIHIKKYGEHNVLNSRRGILTLMWDKNNKLSLTLHKQYPTCGLCGNFNSTPGQDINEHIANSKIPGDCPNAVGKSYEVCEDGIQHCNKIIGTYFEKCGKVAALSNDYKMICIDEYCQTRDKTSTCDTYSELSRLCASDGPGTFESWRSDSDVVCGTQRCPEQHIYKECGPSNPATCSNVAPFQDSECVSGCTCPEGYLLDDIGEKGKCVLKAECPCESSGTVYQPGEVREGPCGSQCTCQDAKWSCTEALCPGRCKVEGSSLTTFDGVKYNFPGNCHFLAVHNEDWSISVELRPCPSGQTGTCLNSVTLLLNSSVPVDKYVFNSDGTVTNDKIRNQGYYYSDKIQIFNASSSYLQVETYFHVKLQIQIVPVMQLYVSMPPNQFTDTVGLCGSYNNKAEDDFMSSQNILEKTSQAFANSWEMMSCPKGNPSSCISIEKEKFAERHCGILLDSSGPLASCHPIVNPKPYHEECKKYTCTCENSQDCLCTILGNYVKACAEKETYIVGWRTGLCEHSCPSGLVFKYNVKACNSSCRSLSERDRSCDVEDVPVDGCTCPDAMYQNNEGNCVLKSQCDCYINDEVMQPGKLIHIDDNKCVCRDGILLCQIPIDLTLQNCSGGAEYVDCSDPKAQRRTNRTCSTRNIPVFDENLPCKRGCFCPEGMVRNSKGICVFPNDCPCSFGGREYDEGSVTSVGCNECTCIKGSWSCTQNECQTICHIYGEGHVRTFDGKSYSFDGLCQYSFLEDYCGHENGTFRILTESVPCCEDGLTCSRKIIVAFQDQNIVLQDGKVTAVKSTESKKCELNANAYSIHTVGLYLILKFQNGIIVIWDKNTRLSVILDPNWNGKVCGLCGNNNGDLKDDFTTRYSSVASGALEFGNSWKTSQECSDTVAQTFPCDSNPYCKAWAVRKCEILRDSTFRDCHNKVDPSAYHDACIEEACACDMEGKYLGFCTAVAMYAEACSAVGVCVSWRKPNLCPVYCDYYNAPGECRWHYEPCGTVTAKTCKDQLVGQKFSSLLEGCYAKCPDSAPYLDENTMKCVSLSECSCFYNDVIPAGGVIEDNCGRTCYCIAGQLECSETAPTNSTFAVSTTTATTILSTGAAITLVTGGPSTAASIPAITTSSSETTGTTLGPLTEPFTTGITETSVPIISTSGNAGMTGVVSPTVTGASGMAGTTGGVDAATTGAASENTSERAGTPRVSGETPAVGGGSTPGEAGPGATVSGSTGVSAGSITASPGASATSSESSKSGTTGPSVGGKTGATSSEATSSEGMSGVTGQSLGSTAGSDSEITAKTSFTGSSPPGKLTRPSPGSPGHFSGGTTEWGNVATTGAAGENTSGALGSTEGSVEATTSAGSGNTAGTSGTGDTGPGNTAVSGTPVVSPGATPGAPGSSTPGEADIGNTSFGKSGTPTVSAASTTSSPVSKHTDAASATAVTISGSKPGTPGTPGGATSGGKITSGWSSSGTSTGASNTPGATGSSTGQTDTSGPSAKVTGNYGQSSEIPGTIKSSSDVSGTMGQSDTTSGPSVAVTRTSEQSSGVTVASEPSVGVSGTTGPLAEISGTTRPLVSGLRTTGSSAEGSGTTGPSSRESVTTRPLAEGSGTSGQSVTGSRATGLSATELGTTVSFTGGLGTSRSSARETRTTGPSADGSGTTGPSVVRSGTTRLSVGVTRATESSPGVTGTTTPSAEESRTTGPSVLVTGTTGQSGQGSGTTGKSFIESGPSVVGSGTTGPTSAGLGTTAPSTRRSSTTKPSVGRTGTTGQSGAESGTTEPSARVAGVTGTSAEVSGRIEPSATESSTSRPLGETTGTTIPSMEGSEATGPSVIGSETTRLSVIGSGTTGTSSGGSGATRSSGGGMGTTGQSTARSETTGPLFGLTGTFGQSATVTGTSSNSAGVTTPEKSPGVAMTTGLLVEGSATTQPRILESETTESSAGVIVTSGQSARVTGATGPSAGETGTTEPSTEGSVAAVLFVIGSETTRPLDIGSGTTGTLSGGSSTTRSSDGTTGTTRKSTARSETTGLSGLTGTSGQLAGVTGTSSKSAGVTVTSEKSAGVAVITGSFVERPVTTGPPLLESETTRPSGGVTVTSGQSARVTETVGASAGVTGTTGPSTEGSGATGPSVVGSGTTRPLAGESGTTESSAGVTGTRPSSSRESATTGPSDEGSGTTGLSAGVTVTSGQSVRKTGTTGAPAGVTETTRPSVVKSGTTGPSVIGTRTTGTSSGGSGATRSSGGETETTGQSAVKSGTTESFTRLTRTSGQSAGMTGTSAQSAGVALTSPFVEGLVTTGSSTVGLETTRPSAVGSGKTGPPVVKAQTTGPSAGVTVTSGQSARMTGASGPSVGVTGTTGPASKGLGTIRPSVVGLETTELSAEGSGTTGPPIVGETTVPSAGVTVTSGYSDRVTGATEPLAGVTGTIKPSVAGSVTTGPSVTGVETTAKTTSGGLSTTISSVGGTGTTGQSPERSGTTGPFTGLTGTSAQSAGVTMTSIQSAGVLVTTGLNVDGLGTTGKALIGSGTTGLSAEATGTIGPSTEGLEKTGPSITGSGTTRPLVTESWTAGTSSGGHSTTSPSVRGTETTGQSAAESVTTGPVTGYTETSGPSAGVTVTPRQSPTVTQTTGSSAAVSGTTVQSLTVSGTTRPSSGQTEITGSSVKESGTTESSAVRSGTTGPTAGVTGTNGPSSAGVTGITGSSPGVTGTTGSSPGVTGTTGSSARSGTSIPSVGKTGTTRTSVEESRTTRPSAGITGTNGLSAEVTGTTGPLAGVTGTTGPSAGVTRTTGLSAGETGTTGLSPGVTRTTRSSAGLTGKTGLSAGVTGKTGLSAEVTGTTRLSAGVTGTTGPSPGVTGTTGTPAGVTGTTELSAGVTGKTGLSSEVTETTGLSYGVKRTIGLSAGSTGTSGQSAGVAGTTTLSAEVTGTTRPSAGVTGTTGLSAEVTEITGISAVVTGTTGPSAGVTETTGSSAGVAGTTRLSAGVTGITGLSAGVTGTTGLSTEVTGTTGPSAGATGTTGLSVGVTGITGLSDVVTETTGSSARSGTGIPSVGETRTTSTSVEESRTTRPSAGIMGTNGLPAEVTGTTEPLAGGTGTTGILAGVTGTTGLSAGETGKIGSSAGVTGKTGSSARVTGKTGPSAEVTGKTGLSAGVTGTTGLSPGVTGTSGLSAEVTGTTGPSAEATGLPGVSAGVTGTTGSLAGGTGTIGLSAGVTGTTGSSAGVTGTTGLSAGVTGIAGLSAGVTGITGPSAGVTGTTTVSAGVTGTTGLSAEATEITGLSAGVTGTTGLSAGVTETIRLSAGVTGTIRSSAGVTGITGLSAGVTGTTGPSAGVTGSTGLLAGVTETTGQSAKVTGTTGQSVGVTGTTRSSGGVTGITGLSAGVTGTNGLSAVTGMTGLSAEVTGTTGLSVGVTGIAGLSAGVTGITGPSAGITGTTTISAGVTGTSGLSAEATGITGLSAGVTGKTGLSAGVTETIGLSAEATGTIGSSPGVTGTTGSSTGVTGITGLSAGVTGTTGLSTEVTGTTGPSAGVTRTTGLSAGVTGITGLSAIVTETTGSSARSGTSIPSVGETGTTRTSVEESRTTRPSAGITGTNGLSAEVTGTIGPLAGGTGTTGLSAGVTGTVGSSAVVTGTTGLSAGVTGTTGPSAEETGATGPSAEVTETTGPSAGVTGTGRLSAEVTGTTGPSAEVTGLPGESAEVTGTIGSPAGVTGTTQLSAVVTGITGLSAEVTGTTGLSAGVTGITGLSAEVTRTTGLSAGVTGTIGLSAGVTGTTRPSAGVTGTTGQSAEVTGTTEPSAGLTETTGSSTGVTGATGPLAGVTGTTGISTEVTGTTGPSARVTGTTVLSAGVTGITGLSAIVTETTGSSARSGTSTPSVGETGTTRTSVEESRATRPSAGITGTNGQSAEVTWITGPLAGVTGTTGISAGVTGTTGLSAGVTGTIGSSAVVTGINGLSAGVTGTTGPSAEETGATGPSAEVTGTTGPSAEETGATGPSAEVTGTTGPSGGVTGTNGLSAEVTGTTGPSAEVTGLPGVSAGVTGTIGSPAAVTGTIRPSAVVTGITGLSAEVTGTTGLSAWVTGIAGLSAGVTETIGSSAGVTGTNGLSAEATGTTGPSAGVTGTTGLSAGVTGTAGLSARVTESTGLSAGVTGTTGLSAGVTGTTGPSAGITGTNGLSAEVTGTTGPLAGVTGTIGLSAGVTGIAGLSAGVTESTGLSAGVTGTIRSSAVVTGINGLSAGVTGTTGPSAEETGATGPSAEVTGTTGPSGGVTGTSGISAEVTGTTGPSAEVTGLPGVSAGVTGTIGSPAAVTGTTRPSAVVTGISGLSAEVTGTTGLSAGVTETIGSSAGVTGTNGLSAEATETTGPSAGVTGTTGLSAGVTGTTGPSAGIAGTNGLSAGVTGTTGLSARVTESTGLSAGVTGTIGSSAVVTETTRLSSGVTGTIGPSAEETGATGLSAEVTGTTGSLAEVTGTTGLSAGVTGTIGSSAVVTGTTGLSAGITGTNGLSAEVTGTAGPLAGVTGTTGLSAGVTGTTGLSAGVTETTGQSAGVTESTGLSPGVTGTIGSSAVVTGIKGLSAGVTGTTGPSAEETGATGPSAEVTGTTGPSGGVTGTSVLSVEVTGTTGPSAEVTGLPGVSAGLTGTIGSPAAVRGTTWPSAVVTGISGLSGEVTGTTGLSAGVTGIGGLSAGVTGTIGSSAGVTGTNALSAEATGTTGPSAGVTGTTGLSAGVTGTTGLSAGVTGTIRSSAVVTETTGLSAGVTGTTGPSAGIAGTNGLSAEVTGTTGLSAGMTGTTGLSARVTESTGLSAGVTGTIGSSAVVTETTRLSAGVTGTIGPSAEETGATGLSAEVTRTTGSLAGVTGTTGPSAVVTGKTELSAEVTGTTELSAEVTEKTGPSAEVTGKTGLSAGVMETTGPSAEVTGTTGSSAGVTGTTGPSAGVTGTTGPSAEATGLPGVSAGVTGTIGSPAGVTGTARLSAVVTGISGLSAEVTGTTGLSTGVTGIAGHSAAVTGITRPSAGVTGTTTVSAGVTGTIGLSAEATGITLPSAGVTETTGLSAGVTETIGLSAGVTGTIGSSAGVTEITGLSAGVTGTTGPSAGVTGSTVLSAGVTATTGQSVGVTGTTGPSAGVTGTTGLSAGVTGIAGLSAGVTGITGPSAGVTGTTTVSAGVTGTTGLSAEATEITGLSAGVTGTTGLSAGVTGIAGLSAGVTETIGSSAGVTGTNGLSAEATGKTGPSAGVTGTTGLSAGVTGTTGLSAGVTETIGLSAGVTGTIGSSAGVKGTTGQSAEVTGATGQSVGVTGTTRSSGGVTGITGLSAGLRGTTVSSAKAGTSIPLTGKTGTTRTSVEESTTTGPSAGITGTNGLSAEMTGTNELSAGVTGTIGSSAGVTGTTGLSVEATVTTGLSAGVTGTTVPLAGVTWTPGPSAGVTGIAALSAGVTGKSGLSAGVTGKTGLSAGVTGTTGPSAEATGKTGLSAGVTGITGPFAEVTGTTGLSAGVIGTTGSSAEVTGITGLSAGVTGKTRSSAGVTGTTGLSAKSGTSIPSAGKTGTTKTSVEESRTTRPSAGITATTGVPAATSPGAEGESIASTSVATGAIPRSTIAPGSTTTGTTGVTTGTTLAPRSFNIGTSGGISGKTLKPGSYVSEATTATGTPGAGPSGGTTISSPEVSTISEVSNTGITGVGSETSIETGISNTATTGVAPGTTLAPGSSSTEATTSIGGSASTRGGIATEATGSTRGVRTTGSEAPEGTSGEFSGTTISSGGFHTEATTLTGGRGSIGTESRAESTTSLPQSAKTRGGILTEATSSTGRIRATGSEAPGGTSRKFSGTTISSGGSHTEATTLAGGRDSTESEFRTATIGVVPATTVAPGSSKTEATTFLGVSGTTSVGRATGATTSIAGSDTSQAEHPGGTSGEFPGTTITSGDSHTEATALTGSRGSIGTESTVETTTYIGESGTTRGGLATATTGAFSGKTLEPGNDNTEATGSTGGIRATRTEAPGGTSGEFPGTTFTSGGSHTEATTFTGGKGSTGTESRAATTRAAPGTTLVPGSSNTGATASPGGSATTRGRITTATTGAFSGKTLESENDNTEATSSTRGVRTTRSEAPGGTSGEFPGTRITSGGSYTATTRAAPGTTLAPGSSNTGATASLGGSAMTRGRITTATTGAFSGKTLEPGNNNTEATSSTRGVRTTRSEAPGEATTLTGDRSSTGSESRTATTGVAPGTTVAPGSSKTEATTFLGVSGTTNIGRATGATTSIVGSDTSQAERPGGTTVVSPGASSTSQSSRPGTSVTPDSSASESETVTTKEFSGTTAISRTSHTGTPAASGGQATGSLTATTGVAPGTTVAPGSSNTEATTSVGERETTKAEIITGDTGELSGTTIISENSTTAGITAATGKQAGTSEVAPSTTVAPGSFSTAATTSPGASGTTGVTTTTKTTTSLGGSGTTGAEIKSATTGAPGSRTGTAGVPSATTVSPGSSNSEATTSVGESGKTGAETITEATTSTEGTGTSGTGFKTGTSEVAPATTVAPGSFSTAATTSPGASGMTGVTTTTKTTTSLGGSGTTGAKIKLVGTTTTAPESRTAGVPSGTRVTPGSSNSEATTSVEESRITRAEVITEATTFSGGSGATRAGLPRGTTGEFSGTNFISGSSNTEATTSTEGTGTSGTGFKIAGITSAPGKQAGTSGVSLATTVAPGSFSTATTSSGASGITRAGPTSETTTSLGGSGTTGAEIKSAAVPSGTTVAPGSSNSEATTSVGENGKTRGEIITDTTEGTSGKVLEPGSAHTEATTFPGGSGTTRAGPPGGTTGELSRMTIIPGSSNTEATTSTKGTGTSGTGFKTGTSWVAPGTTVSPGSFSTATISPGASRTTGAAPAAETTTSLEGGGTTGAEIKSGATSGVPGSKTGTAGVPSATTIAPGSSNSEATTSLGESGKTRVETITGTTEGKTLAAGSAHTEATTFSGGSGSTRAGPLGGASGTSGGYVPGRETEPTTSIEETGTSRTIFKTVGITSAPGRQAGTSVVAPSTTVAPGSFSTAATTSPGASGMTGVRTTSKTTTSLGGTGTTRTEIKSGATTGAPGIKTDIMGESSRTTILSGSSNTEATNSIEETGTSGTGFKTAGITAAPGKQAGTSGVAPGTTVAPGSFSTAATTSPGASGVTGTGPTAETTTFLGGSSTTGAEIKSGATTGAPGSKTGTAKVLSGTTVASGSSNSEATTFSGITEAVTVPSKNGSMTTALGSQLSSSQTVIPGSSGTISHTTVAPGSSVTGTTTGASDDQVTGSKTGTTGVALSTTVAPGSSSTEATTSTGVHRTTVVGQKTGATTRGSAKQGTRSTIEATTSFRGTGTTGSGMNTGTTGVVSGNTISPSSFNTEATSGTSERPNPGSEIGTTGIVSGTTVAPGSSNTEATTSLGNGGTTEAGSKIVTTGITTGTTIVPGSFNTKATTSTDVGVATGVGMATGITNIISGRSQPTGSKTGYTVTGSGTTALPGGFRTGNTPGSTGVTSSQEGTTVVSSGITGIPETSISGPSKEASDKTTAPGPPTTVTASTGVKETSETGVQTGSTLVTAGVPTRPQVSQPETTVVATREVETENKTECLASLPPAPVCHGPLGEEKSPGDIWTANCHRGTCTDAKTIDCKPEECPSPPTCKTGEKLVKFQSNDTCCEIGYCEPRTCLFNNTDYEIGASFDDPSNPCVSYSCKDTGFAAVVQDCPKQTWCAEANRIYDSKKCCYTCKNNCRSSLVNVTVIYSGCKKRVQMAKCTGECEKTAKYNYDILLLEHSCLCCREENYELRDIVLDCPDGSTIPYQYKHITTCSCLDICQLYTTFMYS

SEQ ID NO: 14699 - protein, 709 aa, Homo sapiens; identical to SEQ ID NO: 9097

SEQ ID NO: 14700 - protein, 566 aa, Homo sapiens
MKMQKGNVLLMFGLLLHLEAATNSNETSTSANTGSSVISSGASTATNSGSSVTSSGVSTATISGSSVTSNGVSIVTNSEFHTTSSGISTATNSEFSTVSSGISIATNSESSTTSSGASTATNSESSTPSSGASTATNSDSSTTSSGASTATNSDSSTTSSEASTATNSESSTTSSGASTATNSESSTVSSRASTATNSESSTTSSGASTATNSESRTTSNGAGTATNSESSTTSSGASTATNSESSTPSSGAGTATNSESSTTSSGAGTATNSESSTVSSGISTVTNSESSTPSSGANTATNSESSTTSSGANTATNSDSSTTSSGASTATNSESSTTSSGASTATNSESSTTSSGASTATNSGSSTTSSGTSTATNSESSTVSSGASTATTSESSTTSSGASTATNSESSTVSSGASTATNSESSTTSSGANTATNSGSSVTSAGSGTAALTGMHTTSHSASTAVSEAKPGGSLVPWEIFLITLVSVVAAVGLFAGLFFCVRNSLSLRNTFNTAVYHPHGLNHGLGPGPGGNHGAPHRPRWSPNWFWRRPVSSIAMEMSGRNSGP

SEQ ID NO: 14701 - protein, 1773 aa, Homo sapiens
MRRGNISPAFWFLWLLLFGLLGPSSENTTAFTKGSDTTTASITGSETTMASTMASTSALTTGSKITTDSTTGSETTSASTMASTAAFTTGSETNTASTTDSGTTIASTRTFTTGSDTTTGSTAGSETIVASTTVSGTTTTFTIASTTVPETTMASSTTSTAGSEKTMASSIISETTMASTTGSETATVSTTGSETTTTSTASSEATKVSTTGSETTTASTAGSETTTTSTSMAGSEATTTSTADSKVITASSMSSETTVAPAAGSNTTTASTTGSETTTILIKASETTTASTAGSETTTPSPTGSQTTIVSISGSEITTTSTAGSENTTVSSAGSGTTTASMAGSETTVSTAGSETTTVSITGTETTMVSAMGSETTTNSTTSSETTVTSTAGSETTTVSTVGSETTTAYTADSETTAASTTGSEMTTVFTAGSETITPSTAGSETTTVSTAGSETTTVSTTGSETTTASTAHSETTAASTMGSETTKVSTAGSETTVSTAGSETTAASTEDSETNTAFTEDSKTTTASTTGFETTAASTTGSEPTMASTMGSETTMASTIGPETTKVSTASSEVTTVFAAGSETIRASTVGSETTTVSTTGSETTTASIMGSETSTDSTTGSETTTASTEGSETTTASTEGSEATTVSTTGSETTTVSITDSETTTTCTEGSEMTAVSTTVFETTTASTEGSEITIASTSDSETTTASTEGSETTTVTTAGSETKTAYTTGSETTTASNTGLETTTVFTIGSDTTTASTEGSETTAVSATGSEMTTVSTEGSENTTVSTTGSETTTVSTTGLETTTTSTEGSEMTTVSTTGAETTTDSTEGSGTTAASTAGSETTTVSTADSENTTASTADSETTSASTTGSETTTASTTSSETTTASTEGSETTTVSTTDSETTMVSTTGSERTITSTEGSETTTVSATGSETTVSTEGSGTTTVSITGSETTKVSTTGSETTTTSTEGSEITTASITGSETTTASTEGSETTTASTEGSETTSASTTGSETTTASTTSSETTMASIMGSETTMASTIGSETTKVSTASSKMTTVFTENSETTIASTTASETTTVSTAGSETIPASTAGSETTTTTSTEGSETTTASTEGSETTTASTESSETTTATTIGSETTTASTEGSETTTTSTEGSETTTASTEGSEITTVSTTGSETTTASTEGSETTTASTEGSELTTVSTTGSETITVSAEGSETTTVTTMGSETTTASTAGSETTTVSTAGSETTTASIEGSETTTVSSTGSETTTVSTTGTETTITSTEGSETTTVTTAGSETTAVYTTGSETTTTSTEGSETTTVSTTGSETTTASTADLETTTVSTSGSGTTTASTAGSETTTVYITGSKTTTASTEGSEATTVSTTSSETTTASTTGSEMTTVFTTVSETTTVSTIGSEATTSSAAGSEATTTSTEGSETTTASTAGSETTTASTAGSETTTASTSGSETNTACTTGSETSTPSSAGSETNTAFIIGSESTIASTASLEPTATSLTGSETTTVSITASGATAASTTVSSTTFVLTKATDVSIQPITNTPMSGTRTTGTRLTASSSVTMAPGMDFTASAASHTVPGIVLNTSGLGTSTMGASSTTSAHGVRTTTGSTREPTSSTFQETGPVSMGTNTVSMSHTPTNVIKPSGYLQPWAIILISLAAVVAAVGLSVGLSFCLRNLFFPLRYCGIYYPHGHSHSLGLDLNLGLGSGTFHSLGNALVHGGELEMGHGGTHGFGYGVGHGLSHIHGDGYGVNHGGHYGHGGGH

SEQ ID NO: 14702 - protein, 403 aa, Homo sapiens [sequence omitted]

SEQ ID NO: 14703 - protein, 420 aa, Homo sapiens
MLHFHYYDTSNKIMEPHRPNVKTAVPLSLESYHISEEYGFLLPDSLKELPDHYRPWMEIANKLPQLIDAHQLQAHVDKMPLLSCQFLKGHREQRLAHLVLSFLTMGYVWQEGEAQPAEVLPRNLALPFVEVSRNLGLPPILVHSDLVLTNWTKKDPDGFLEIGNLETIISFPGGESLHGFILVTALVEKEAVPGIKALVQATNAILQPNQEALLQALQRLRLSIQDITKTLGQMHDYVDPDIFYAGIRIFLSGWKDNPAMPAGLMYEGVSQEPLKYSGGSAAQSTVLHAFDEFLGIRHSKESGDFLYRMRDYMPPSHKAFIEDIHSAPSLRDYILSSGQDHLLTAYNQCVQALAELRSYHITMVTKYLITAAAKAKHGKPNHLPGPPQALKDRGTGGTAVMSFLKSVRDKTLESILHPRG

SEQ ID NO: 14704 - protein, 302 aa, Homo sapiens
MRLGSPGLLFLLFSSLRADTQEKEVRAMVGSDVELSCACPEGSRFDLNDVYVYWQTSESKTVVTYHIPQNSSLENVDSRYRNRALMSPAGMLRGDFSLRLFNVTPQDEQKFHCLVLSQSLGFQEVLSVEVTLHVAANFSVPVVSAPHSPSQDELTFTCTSINGYPRPNVYWINKTDNSLLDQALQNDTVFLNMRGLYDVVSVLRIARTPSVNIGCCIENVLLQQNLTVGSQTGNDIGERDKITENPVSTGEKNAATWSILAVLCLLVVVAVAIGWVCRDRCLQHSYAGAWAVSPETELTGHV

SEQ ID NO: 14705 - protein, 2347 aa, Homo sapiens
MKNIYCLIPKLVNFATLGCLWISVVQCTVLNSCLKSCVTNLGQQLDLGTPHNLSEPCIQGCHFWNSVDQKNCALKCRESCEVGCSSAEGAYEEEVLENADLPTAPFASSIGSHNMTLRWKSANFSGVKYIIQWKYAQLLGSWTYTKTVSRPSYVVKPLHPFTEYIFRVVWIFTAQLQLYSPPSPSYRTHPHGVPETAPLIRNIESSSPDTVEVSWDPPQFPGGPILGYNLRLISKNQKLDAGTQRTSFQFYSTLPNTIYRFSIAAVNEVGEGPEAESSITTSSSAVQQEEQWLFLSRKTSLRKRSLKHLVDEAHCLRLDAIYHNITGISVDVHQQIVYFSEGTLIWAKKAANMSDVSDLRIFYRGSGLISSISIDWLYQRMYFIMDELVCVCDLENCSNIEEITPPSISAPQKIVADSYNGYVFYLLRDGIYRADLPVPSGRCAEAVRIVESCTLKDFAIKPQAKRIIYFNDTAQVFMSTFLDGSASHLILPRIPFADVKSFACENNDFLVTDGKVIFQQDALSFNEFIVGCDLSHIEEFGFGNLVIFGSSSQLHPLPGRPQELSVLFGSHQALVQWKPPALAIGANVILISDIIELFELGPSAWQNWTYEVKVSTQDPPEVTHIFLNISGTMLNVPELQSAMKYKVSVRASSPKRPGPWSEPSVGTTLVPASEPPFIMAVKEDGLWSKPLNSFGPGEFLSSDIGNVSDMDWYNNSLYYSDTKGDVFVWLLNGTDISENYHLPSIAGAGALAFEWLGHFLYWAGKTYVIQRQSVLTGHTDIVTHVKLLVNDMVVDSVGGYLYWTTLYSVESTRLNGESSLVLQTQPWFSGKKVIALTLDLSDGLLYWLVQDSQCIHLYTAVLRGQSTGDTTITEFAAWSTSEISQNALMYYSGRLFWINGFRIITTQEIGQKTSVSVLEPARFNQFTIIQTSLKPLPGNFSFTPKVIPDSVQESSFRIEGNASSFQILWNGPPAVDWGVVFYSVEFSAHSKFLASEQHSLPVFTVEGLEPYALFNLSVTPYTYWGKGPKTSLSLRAPETVPSAPENPRIFILPSGKCCNKNEVVVEFRWNKPKHENGVLTKFEIFYNISNQSITNKTCEDWIAVNVTPSVMSFQLEGMSPRCFIAFQVRAFTSKGPGPYADVVKSTTSEINPFPHLITLLGNKIVFLDMDQNQVVWTFSAERVISAVCYTADNEMGYYAEGDSLFLLHLHNRSSSELFQDSLVFDITVITIDWISRHLYFALKESQNGMQVFDVDLEHKVKYPREVKIHNRNSTIISFSVYPLLSRLYWTEVSNFGYQMFYYSIISHTLHRILQPTATNQQNKRNQCSCNVTEFELSGAMAIDTSNLEKPLIYFAKAQEIWAMDLEGCQCWRVITVPAMLAGKTLVSLTVDGDLIYWIITAKDSTQIYQAKKGNGAIVSQVKALRSRHILAYSSVMQPFPDKAFLSLASDTVEPTILNATNTSLTIRLPLAKTNLTWYGITSPTPTYLVYYAEVNDRKNSSDLKYRILEFQDSIALIEDLQPFSTYMIQIAVKNYYSDPLEHLPPGKEIWGKTKNGVPEAVQLINTTVRSDTSLIISWRESHKPNGPKESVRYQLAISHLALIPETPLRQSEFPNGRLTLLVTRLSGGNIYVLKVLACHSEEMWCTESHPVTVEMFNTPEKPYSLVPENTSLQFNWKAPLNVNLIRFWVELQKWKYNEFYHVKTSCSQGPAYVCNITNLQPYTSYNVRVVVVYKTGENSTSLPESFKTKAGVPNKPGIPKLLEGSKNSIQWEKAEDNGCRITYYILEIRKSTSNNLQNQNLRWKMTFNGSCSSVCTWKSKNLKGIFQFRVVAANNLGFGEYSGISENIILVGDDFWIPETSFILTIIVGIFLVVTIPLTFVWHRRLKNQKSAKEGVTVLINEDKELAELRGLAAGVGLANACYAIHTLPTQEEIENLPAFPREKLTLRLLLGSGAFGEVYEGTAVDILGVGSGEIKVAVKTLKKGSTDQEKIEFLKEAHLMSKFNHPNILKQLGVCLLNEPQYIILELMEGGDLLTYLRKARMATFYGPLLTLVDLVDLCVDISKGCVYLERMHFIHRDLAARNCLVSVKDYTSPRIVKIGDFGLARDIYKNDYYRKRGEGLLPVRWMAPESLMDGIFTTQSDVWSFGILIWEILTLGHQPYPAHSNLDVLNYVQTGGRLEPPRNCPDDLWNLMTQCWAQEPDQRPTFHRIQDQLQLFRNFFLNSIYKSRDEANNSGVINESFEGEDGDVICLNSDDIMPVALMETKNREGLNYMVLATECGQGEEKSEGPLGSQESESCGLRKEEKEPHADKDFCQEKQVAYCPSGKPEGLNYACLTHSGYGDGSD

SEQ ID NO: 14706 - protein, 255 aa, Homo sapiens
MGNSCYNIVATLLLVLNFERTRSLQDPCSNCPAGTFCDNNRNQICSPCPPNSFSSAGGQRTCDICRQCKGVFRTRKECSSTSNAECDCTPGFHCLGAGCSMCEQDCKQGQELTKKGCKDCCFGTFNDQKRGICRPWTNCSLDGKSVLVNGTKERDVVCGPSPADLSPGASSVTPPAPAREPGHSPQIISFFLALTSTALLFLLFFLTLRFSVVKRGRKKLLYIFKQPFMRPVQTTQEEDGCSCRFPEEEEGGCEL

SEQ ID NO: 14707 - protein, 254 aa, Homo sapiens
MEYASDASLDPEAPWPPAPRARACRVLPWALVAGLLLLLLLAAACAVFLACPWAVSGARASPGSAASPRLREGPELSPDDPAGLLDLRQGMFAQLVAQNVLLIDGPLSWYSDPGLAGVSLTGGLSYKEDTKELVVAKAGVYYVFFQLELRRVVAGEGSGSVSLALHLQPLRSAAGAAALALTVDLPPASSEARNSAFGFQGRLLHLSAGQRLGVHLHTEARARHAWQLTQGATVLGLFRVTPEIPAGLPSPRSE

SEQ ID NO: 14708 - protein, 241 aa, Homo sapiens; identical to SEQ ID NO: 13579

SEQ ID NO: 14709 - protein, 199 aa, Homo sapiens
MTLHPSPITCEFLFSTALISPKMCLSHLENMPLSHSRTQGAQRSSWKLWLFCSIVMLLFLCSFSWLIFIFLQLETAKEPCMAKFGPLPSKWQMASSEPPCVNKVSDWKLEILQNGLYLIYGQVAPNANYNDVAPFEVRLYKNKDMIQTLTNKSKIQNVGGTYELHVGDTIDLIFNSEHQVLKNNTYWGIILLANPQFIS

SEQ ID NO: 14710 - protein, 1068 aa, Homo sapiens; identical to SEQ ID NO: 14664

SEQ ID NO: 14711 - protein, 1102 aa, Homo sapiens; identical to SEQ ID NO: 14665

SEQ ID NO: 14712 - protein, 597 aa, Homo sapiens; identical to SEQ ID NO: 14666

SEQ ID NO: 14713 - protein, 524 aa, Homo sapiens; identical to SEQ ID NO: 14667

SEQ ID NO: 14714 - protein, 497 aa, Homo sapiens; identical to SEQ ID NO: 14668

SEQ ID NO: 14715 - protein, 602 aa, Homo sapiens; identical to SEQ ID NO: 14669

SEQ ID NO: 14716 - protein, 467 aa, Homo sapiens; identical to SEQ ID NO: 14670

SEQ ID NO: 14717 - protein, 486 aa, Homo sapiens; identical to SEQ ID NO: 14671

SEQ ID NO: 14718 - protein, 480 aa, Homo sapiens [sequence omitted]

SEQ ID NO: 14719 - protein, 619 aa, Homo sapiens
MPDPAAHLPFFYGSISRAEAEEHLKLAGMADGLFLLRQCLRSLGGYVLSLVHDVRFHHFPIERQLNGTYAIAGGKAHCGPAELCEFYSRDPDGLPCNLRKPCNRPSGLEPQPGVFDCLRDAMVRDYVRQTWKLEGEALEQAIISQAPQVEKLIATTAHERMPWYHSSLTREEAERKLYSGAQTDGKFLLRPRKEQGTYALSLIYGKTVYHYLISQDKAGKYCIPEGTKFDTLWQLVEYLKLKADGLIYCLKEACPNSSASNASGAAAPTLPAHPSTLTHPQRRIDTLNSDGYTPEPARITSPDKPRPMPMDTSVYESPYSDPEELKDKKLFLKRDNLLIADIELGCGNFGSVRQGVYRMRKKQIDVAIKVLKQGTEKADTEEMMREAQIMHQLDNPYIVRLIGVCQAEALMLVMEMAGGGPLHKFLVGKREEIPVSNVAELLHQVSMGMKYLEEKNFVHRDLAARNVLLVNRHYAKISDFGLSKALGADDSYYTARSAGKWPLKWYAPECINFRKFSSRSDVWSYGVTMWEALSYGQKPYKKMKGPEVMAFIEQGKRMECPPECPPELYALMSDCWIYKWEDRPDFLTVEQRMRACYYSLASKVEGPPGSTQKAEAACA

SEQ ID NO: 14720 - protein, 1132 aa, Homo sapiens
MEPNDSTSTAVEEPDSLEVLVKTLDSQTRTFIVGAQMNVKEFKEHIAASVSIPSEKQRLIYQGRVLQDDKKLQEYNVGGKVIHLVERAPPQTHLPSGASSGTGSASATHGGGSPPGTRGPGASVHDRNANSYVMVGTFNLPSDGSAVDVHINMEQAPIQSEPRVRLVMAQHMIRDIQTLLSRMETLPYLQCRGGPQPQHSQPPPQPPAVTPEPVALSSQTSEPVESEAPPREPMEAEEVEERAPAQNPELTPGPAPAGPTPAPETNAPNHPSPAEYVEVLQELQRLESRLQPFLQRYYEVLGAAATTDYNNNHEGREEDQRLINLVGESLRLLGNTFVALSDLRCNLACTPPRHLHVVRPMSHYTTPMVLQQAAIPIQINVGTTVTMTGNGTRPPPTPNAEAPPPGPGQASSVAPSSTNVESSAEGAPPPGPAPPPATSHPRVIRISHQSVEPVVMMHMNIQDSGTQPGGVPSAPTGPLGPPGHGQTLGQQVPGFPTAPTRVVIARPTPPQARPSHPGGPPVSGTLQGAGLGTNASLAQMVSGLVGQLLMQPVLVAQGTPGMAPPPAPATASASAGTTNTATTAGPAPGGPAQPPPTPQPSMADLQFSQLLGNLLGPAGPGAGGSGVASPTITVAMPGVPAFLQGMTDFLQATQTAPPPPPPPPPPPPAPEQQTMPPPGSPSGGAGSPGGLGLESLSPEFFTSVVQGVLSSLLGSLGARAGSSESIAAFIQRLSGSSNIFEPGADGALGFFGALLSLLCQNFSMVDVVMLLHGHFQPLQRLQPQLRSFFHQHYLGGQEPTPSNIRMATHTLITGLEEYVRESFSLVQVQPGVDIIRTNLEFLQEQFNSIAAHVLHCTDSGFGARLLELCNQGLFECLALNLHCLGGQQMELAAVINGRIRRMSRGVNPSLVSWLTTMMGLRLQVVLEHMPVGPDAILRYVRRVGDPPQPLPEEPMEVQGAERASPEPQRENASPAPGTTAEEAMSRGPPPAPEGGSRDEQDGASAETEPWAAAVPPEWVPIIQQDIQSQRKVKPQPPLSDAYLSGMPAKRRKTMQGEGPQLLLSEAVSRAAKAAGARPLTSPESLSRDLEAPEVQESYRQQLRSDIQKRLQEDPNYSPQRFPNAQRAFADDP

SEQ ID NO: 14721 - protein, 233 aa, Homo sapiens
MSQSNRELVVDFLSYKLSQKGYSWSQFSDVEENRTEAPEGTESEMETPSAINGNPSWHLADSPAVNGATGHSSSLDAREVIPMAAVKQALREAGDEFELRYRRAFSDLTSQLHITPGTAYQSFEQVVNELFRDGVNWGRIVAFFSFGGALCVESVDKEMQVLVSRIAAWMATYLNDHLEPWIQENGGWDTFVELYGNNAAAESRKGQERFNRWFLTGMTVAGVVLLGSLFSRK

SEQ ID NO: 14722 - protein, 175 aa, Homo sapiens
MTDCEFGYIYRLAQDYLQCVLQIPQPGSGPSKTSRVLQNVAFSVQKEVEKNLKSCLDNVNVVSVDTARTLFNQVMEKEFEDGIINWGRIVTIFAFEGILIKKLLRQQIAPDVDTYKEISYFVAEFIMNNTGEWIRQNGGWENGFVKKFEPKSGWMTFLEVTGKICEMLSLLKQYC

SEQ ID NO: 14723 - protein, 1102 aa, Homo sapiens
MFQLPVNNLGSLRKARKTVKKILSDIGLEYCKEHIEDFKQFEPNDFYLKNTTWEDVGLWDPSLTKNQDYRTKPFCCSACPFSSKFFSAYKSHFRNVHSEDFENRILLNCPYCTFNADKKTLETHIKIFHAPNASAPSSSLSTFKDKNKNDGLKPKQADSVEQAVYYCKKCTYRDPLYEIVRKHIYREHFQHVAAPYIAKAGEKSLNGAVPLGSNAREESSIHCKRCLFMPKSYEALVQHVIEDHERIGYQVTAMIGHTNVVVPRSKPLMLIAPKPQDKKSMGLPPRIGSLASGNVRSLPSQQMVNRLSIPKPNLNSTGVNMMSSVHLQQNNYGVKSVGQGYSVGQSMRLGLGGNAPVSIPQQSQSVKQLLPSGNGRSYGLGSEQRSQAPARYSLQSANASSLSSGQLKSPSLSQSQASRVLGQSSSKPAAAATGPPPGNTSSTQKWKICTICNELFPENVYSVHFEKEHKAEKVPAVANYIMKIHNFTSKCLYCNRYLPTDTLLNHMLIHGLSCPYCRSTFNDVEKMAAHMRMVHIDEEMGPKTDSTLSFDLTLQQGSHTNIHLLVTTYNLRDAPAESVAYHAQNNPPVPPKPQPKVQEKADIPVKSSPQAAVPYKKDVGKTLCPLCFSILKGPISDALAHHLRERHQVIQTVHPVEKKLTYKCIHCLGVYTSNMTASTITLHLVHCRGVGKTQNGQDKTNAPSRLNQSPSLAPVKRTYEQMEFPLLKKRKLDDDSDSPSFFEEKPEEPVVLALDPKGHEDDSYEARKSFLTKYFNKQPYPTRREIEKLAASLWLWKSDIASHFSNKRKKCVRDCEKYKPGVLLGFNMKELNKVKHEMDFDAEWLFENHDEKDSRVNASKTADKKLNLGKEDDSSSDSFENLEEESNESGSPFDPVFEVEPKISNDNPEEHVLKVIPEDASESEEKLDQKEDGSKYETIHLTEEPTKLMHNASDSEVDQDDVVEWKDGASPSESGPGSQQVSDFEDNTCEMKPGTWSDESSQSEDARSSKPAAKKKATMQGDREQLKWKNSSYGKVEGFWSKDQSQWKNASENDERLSNPQIEWQNSTIDSEDGEQFDNMTDGVAEPMHGSLAGVKLSSQQA

SEQ ID NO: 14724 - protein, 1131 aa, Homo sapiens
MFQIPVENLDNIRKVRKKVKGILVDIGLDSCKELLKDLKGFDPGEKYFHNTSWGDVSLWEPSGKKVRYRTKPYCCGLCKYSTKVLTSFKNHLHRYHEDEIDQELVIPCPNCVFASQPKVVGRHFRMFHAPVRKVQNYTVNILGETKSSRSDVISFTCLKCNFSNTLYYSMKKHVLVAHFHYLINSYFGLRTEEMGEQPKTNDTVSIEKIPPPDKYYCKKCNANASSQDALMYHILTSDIHRDLENKLRSVISEHIKRTGLLKQTHIAPKPAAHLAAPANGSAPSAPAQPPCFHLALPQNSPSPAAGQPVTVAQGAPGSLTHSPPAAGQSHMTLVSSPLPVGQNSLTLQPPAPQPVFLSHGVPLHQSVNPPVLPLSQPVGPVNKSVGTSVLPINQTVRPGVLPLTQPVGPINRPVGPGVLPVSPSVTPGVLQAVSPGVLSVSRAVPSGVLPAGQMTPAGQMTPAGVIPGQTATSGVLPTGQMVQSGVLPVGQTAPSRVLPPGQTAPLRVISAGQVVPSGLLSPNQTVSSSAVVPVNQGVNSGVLQLSQPVVSGVLPVGQPVRPGVLQLNQTVGTNILPVNQPVRPGASQNTTFLTSGSILRQLIPTGKQVNGIPTYTLAPVSVTLPVPPGGLATVAPPQMPIQLLPSGAAAPMAGSMPGMPSPPVLVNAAQSVFVQASSSAADTNQVLKQAKQWKTCPVCNELFPSNVYQVHMEVAHKHSESKSGEKLEPEKLAACAPFLKWMREKTVRCLSCKCLVSEEELIHHLLMHGLGCLFCPCTFHDIKGLSEHSRNRHLGKKKLPMDYSNRGFQLDVDANGNLLFPHLDFITILPKEKLGEREVYLAILAGIHSKSLVPVYVKVRPQAEGTPGSTGKRVSTCPFCFGPFVTTEAYELHLKERHHIMPTVHTVLKSPAFKCIHCCGVYTGNMTLAAIAVHLVRCRSAPKDSSSDLQAQPGFIHNSELLLVSGEVMHDSSFSVKRKLPDGHLGAEDQRHGEEQPPILNADAAPGPEKVTSVVPFKRQRNESRTEGPIVKDEALQILALDPKKYEGRSYEEKKQFLKDYFHKKPYPSKKEIELLSSLFWVWKIDVASFFGKRRYICMKAIKNHKPSVLLGFDMSELKNVKHRLNFEYEP

SEQ ID NO: 14725 - protein, 1158 aa, Homo sapiens; identical to SEQ ID NO: 574

SEQ ID NO: 14726 - protein, 517 aa, Homo sapiens
MAAAITDMADLEELSRLSPLPPGSPGSAARGRAEPPEEEEEEEEEEEEAEAEAVAALLLNGGSGGGGGGGGGGVGGGEAETMSEPSPESASQAGEDEDEEEDDEEEEDESSSSGGGEEESSAESLVGSSGGSSSDETRSLSPGAASSSSGDGDGKEGLEEPKGPRGSQGGGGGGSSSSSVVSSGGDEGYGTGGGGSSATSGGRRGSLEMSSDGEPLSRMDSEDSISSTIMDVDSTISSGRSTPAMMNGQGSTTSSSKNIAYNCCWDQCQACFNSSPDLADHIRSIHVDGQRGGVFVCLWKGCKVYNTPSTSQSWLQRHMLTHSGDKPFKCVVGGCNASFASQGGLARHVPTHFSQQNSSKVSSQPKAKEESPSKAGMNKRRKLKNKRRRSLPRPHDFFDAQTLDAIRHRAICFNLSAHIESLGKGHSVVFHSTVIAKRKEDSGKIKLLLHWMPEDILPDVWVNESERHQLKTKVVHLSKLPKDTALLLDPNIYRTMPQKRLKRTLIRKVFNLYLSKQ

SEQ ID NO: 14727 - protein, 1210 aa, Homo sapiens
MAAQSSLYNDDRNLLRIREKERRNQEAHQEKEAFPEKIPLFGEPYKTAKGDELSSRIQNMLGNYEEVKEFLSTKSHTHRLDASENRLGKPKYPLIPDKGSSIPSSSFHTSVHHQSIHTPASGPLSVGNISHNPKMAQPRTEPMPSLHAKSCGPPDSQHLTQDRLGQEGFGSSHHKKGDRRADGDHCASVTDSAPERELSPLISLPSPVPPLSPIHSNQQTLPRTQGSSKVHGSSNNSKGYCPAKSPKDLAVKVHDKETPQDSLVAPAQPPSQTFPPPSLPSKSVAMQQKPTAYVRPMDGQDQAPSESPELKPLPEDYRQQTFEKTDLKVPAKAKLTKLKMPSQSVEQTYSNEVHCVEEILKEMTHSWPPPLTAIHTPSTAEPSKFPFPTKDSQHVSSVTQNQKQYDTSSKTHSNSQQGTSSMLEDDLQLSDSEDSDSEQTPEKPPSSSAPPSAPQSLPEPVASAHSSSAESESTSDSDSSSDSESESSSSDSEENEPLETPAPEPEPPTTNKWQLDNWLTKVSQPAAPPEGPRSTEPPRRHPESKGSSDSATSQEHSESKDPPPKSSSKAPRAPPEAPHPGKRSCQKSPAQQEPPQRQTVGTKQPKKPVKASARAGSRTSLQGEREPGLLPYGSRDQTSKDKPKVKTKGRPRAAASNEPKPAVPPSSEKKKHKSSLPAPSKALSGPEPAKDNVEDRTPEHFALVPLTESQGPPHSGSGSRTSGCRQAVVVQEDSRKDRLPLPLRDTKLLSPLRDTPPPQSLMVKITLDLLSRIPQPPGKGSRQRKAEDKQPPAGKKHSSEKRSSDSSSKLAKKRKGEAERDCDNKKIRLEKEIKSQSSSSSSSHKESSKTKPSRPSSQSSKKEMLPPPPVSSSSQKPAKPALKRSRREADTCGQDPPKSASSTKSNHKDSSIPKQRRVEGKGSRSSSEHKGSSGDTANPFPVPSLPNGNSKPGKPQVKFDKQQADLHMREAKKMKQKAELMTDRVGKAFKYLEAVLSFIECGIATESESQSSKSAYSVYSETVDLIKFIMSLKSFSDATAPTQEKIFAVLCMRCQSILNMAMFRCKKDIAIKYSRTLNKHFESSSKVAQAPSPCIASTGTPSPLSPMPSPASSVGSQSSAGSVGSSGVAATISTPVTIQNMTSSYVTITSHVLTAFDLWEQAEALTRKNKEFFARLSTNVCTLALNSSLVDLVHYTRQGFQQLQELTKTP

SEQ ID NO: 14728 - protein, 1311 aa, Homo sapiens
MDLFDFFRDWDLEQQCHYEQDRSALKKREWERRNQEVQQEDDLFSSGFDLFGEPYKVAEYTNKGDALANRVQNTLGNYDEMKNLLTNHSNQNHLVGIPKNSVPQNPNNKNEPSFFPEQKNRIIPPHQDNTHPSAPMPPPSVVILNSTLIHSNRKSKPEWSRDSHNPSTVLASQASGQPNKMQTLTQDQSQAKLEDFFVYPAEQPQIGEVEESNPSAKEDSNPNSSGEDAFKEIFQSNSPEESEFAVQAPGSPLVASSLLAPSSGLSVQNFPPGLYCKTSMGQQKPTAYVRPMDGQDQAPDISPTLKPSIEFENSFGNLSFGTLLDGKPSAASSKTKLPKFTILQTSEVSLPSDPSCVEEILREMTHSWPTPLTSMHTAGHSEQSTFSIPGQESQHLTPGFTLQKWNDPTTRASTKSVSFKSMLEDDLKLSSDEDDLEPVKTLTTQCTATELYQAVEKAKPRNNPVNPPLATPQPPPAVQASGGSGSSSESESSSESDSDTESSTTDSESNEAPRVATPEPEPPSTNKWQLDKWLNKVTSQNKSFICGQNETPMETISLPPPIIQPMEVQMKVKTNASQVPAEPKERPLLSLIREKARPRPTQKIPETKALKHKLSTTSETVSQRTIGKKQPKKVEKNTSTDEFTWPKPNITSSTPKEKESVELHDPPRGRNKATAHKPAPRKEPRPNIPLAPEKKKYRGPGKIVPKSREFIETDSSTSDSNTDQEETLQIKVLPPCIISGGNTAKSKEICGASLTLSTLMSSSGSNNNLSISNEEPTFSPIPVMQTEILSPLRDHENLKNLWVKIDLDLLSRVPGHSSLHAAPAKPDHKETATKPKRQTAVTAVEKPAPKGKRKHKPIEVAEKIPEKKQRLEEATTICLLPPCISPAPPHKPPNTRENNSSRRANRRKEEKLFPPPLSPLPEDPPRRRNVSGNNGPFGQDKNIAMTGQITSTKPKRTEGKFCATFKGISVNEGDTPKKASSATITVTNTAIATATVTATAIVTTTVTATATATATTTTTTTTISTITSTITTGLMDSSHLEMTSWAALPLLSSSSTNVRRPKLTFDDSVHNADYYMQEAKKLKHKADALFEKFGKAVNYADAALSFTECGNAMERDPLEAKSPYTMYSETVELLRYAMRLKNFASPLASDGDKKLAVLCYRCLSLLYLRMFKLKKDHAMKYSRSLMEYFKQNASKVAQIPSPWVSNGKNTPSPVSLNNVSPINAMGNCNNGPVTIPQRIHHMAASHVNITSNVLRGYEHWDMADKLTRENKEFFGDLDTLMGPLTQHSSMTNLVRYVRQGLCWLRIDAHLL

SEQ ID NO: 14729 - protein, 1226 aa, Homo sapiens
MDSFDLALLQEWDLESLCVYEPDRNALRRKERERRNQETQQDDGTFNSSYSLFSEPYKTNKGDELSNRIQNTLGNYDEMKDFLTDRSNQSHLVGVPKPGVPQTPVNKIDEHFVADSRAQNQPSSICSTTTSTPAAVPVQQSKRGTMGWQKAGHPPSDGQQRATQQGSLRTLLGDGVGRQQPRAKQVCNVEVGLQTQERPPAMAAKHSSSGHCVQNFPPSLASKPSLVQQKPTAYVRPMDGQDQAPDESPKLKSSSETSVHCTSYRGVPASKPEPARAKAKLSKFSIPKQGEESRSGETNSCVEEIIREMTWLPPLSAIQAPGKVEPTKFPFPNKDSQLVSSGHNNPKKGDAEPESPDSGTSNTSMLEDDLKLSSDEEENEQQAAQRTALRALSDSAVVQQPNCRTSVPSSKGSSSSSSSGSSSSSSDSESSSGSDSETESSSSESEGSKPPHFSSPEAEPASSNKWQLDKWLNKVNPHKPPILIQNESHGSESNQYYNPVKEDVQDCGKVPDVCQPSLREKEIKSTCKEEQRPRTANKAPGSKGVKQKSPPAAVAVAVSAAAPPPAVPCAPAENAPAPARRSAGKKPTRRTERTSAGDGANCHRPEEPAAADALGTSVVVPPEPTKTRPCGNNRASHRKELRSSVTCEKRRTRGLSRIVPKSKEFIETESSSSSSSSDSDLESEQEEYPLSKAQTVAASASSGNDQRLKEAAANGGSGPRAPVGSINARTTSDIAKELEEQFYTLVPFGRNELLSPLKDSDEIRSLWVKIDLTLLSRIPEHLPQEPGVLSAPATKDSESAPPSHTSDTPAEKALPKSKRKRKCDNEDDYREIKKSQGEKDSSSRLATSTSNTLSANHCNMNINSVAIPINKNEKMLRSPISPLSDASKHKYTSEDLTSSSRPNGNSLFTSASSSKKPKADSQLQPHGGDLTKAAHNNSENIPLHKSRPQTKPWSPGSNGHRDCKRQKLVFDDMPRSADYFMQEAKRMKHKADAMVEKFGKALNYAEAALSFIECGNAMEQGPMESKSPYTMYSETVELIRYAMRLKTHSGPNATPEDKQLAALCYRCLALLYWRMFRLKRDHAVKYSKALIDYFKNSSKAAQAPSPWGASGKSTGTPSPMSPNPSPASSVGSQGSLSNASALSPSTIVSIPQRIHQMAANHVSITNSILHSYDYWEMADNLAKENREFFNDLDLLMGPVTLHSSMEHLVQYSQQGLHWLRNSAHLS

SEQ ID NO: 14730 - protein, 1163 aa, Homo sapiens
MNREDRNVLRMKERERRNQEIQQGEDAFPPSSPLFAEPYKVTSKEDKLSSRIQSMLGNYDEMKDFIGDRSIPKLVAIPKPTVPPSADEKSNPNFFEQRHGGSHQSSKWTPVGPAPSTSQSQKRSSGLQSGHSSQRTSAGSSSGTNSSGQRHDRESYNNSGSSSRKKGQHGSEHSKSRSSSPGKPQAVSSLNSSHSRSHGNDHHSKEHQRSKSPRDPDANWDSPSRVPFSSGQHSTQSFPPSLMSKSNSMLQKPTAYVRPMDGQESMEPKLSSEHYSSQSHGNSMTELKPSSKAHLTKLKIPSQPLDASASGDVSCVDEILKEMTHSWPPPLTAIHTPCKTEPSKFPFPTKESQQSNFGTGEQKRYNPSKTSNGHQSKSMLKDDLKLSSSEDSDGEQDCDKTMPRSTPGSNSEPSHHNSEGADNSRDDSSSHSGSESSSGSDSESESSSSDSEANEPSQSASPEPEPPPTNKWQLDNWLNKVNPHKVSPASSVDSNIPSSQGYKKEGREQGTGNSYTDTSGPKETSSATPGRDSKTIQKGSESGRGRQKSPAQSDSTTQRRTVGKKQPKKAEKAAAEEPRGGLKIESETPVDLASSMPSSRHKAATKGSRKPNIKKESKSSPRPTAEKKKYKSTSKSSQKSREIIETDTSSSDSDESESLPPSSQTPKYPESNRTPVKPSSVEEEDSFFRQRMFSPMEEKELLSPLSEPDDRYPLIVKIDLNLLTRIPGKPYKETEPPKGEKKNVPEKHTREAQKQASEKVSNKGKRKHKNEDDNRASESKKPKTEDKNSAGHKPSSNRESSKQSAAKEKDLLPSPAGPVPSKDPKTEHGSRKRTISQSSSLKSSSNSNKETSGSSKNSSSTSKQKKTEGKTSSSSKEVKEKAPSSSSNCPPSAPTLDSSKPRRTKLVFDDRNYSADHYLQEAKKLKHNADALSDRFEKAVYYLDAVVSFIECGNALEKNAQESKSPFPMYSETVDLIKYTMKLKNYLAPDATAADKRLTVLCLRCESLLYLRLFKLKKENALKYSKTLTEHLKNSYNNSQAPSPGLGSKAVGMPSPVSPKLSPGNSGNYSSGASSASASGSSVTIPQKIHQMAASYVQVTSNFLYATEIWDQAEQLSKEQKEFFAELDKVMGPLIFNASIMTDLVRYTRQGLHWLRQDAKLIS

SEQ ID NO: 14731 - protein, 2266 aa, Homo sapiens
MRDLRAQVTSGLLPFPEVTLQALGEDEITLESVLRGKFAAGKNGLACLACGPQLEVVNSITGERLSAYRFSGVNEQPPVVLAVKEFSWQKRTGLLIGLEETEGSVLCLYDLGISKVVKAVVLPGRVTAIEPIINHGGASASTQHLHPSLRWLFGVAAVVTDVGQILLVDLCLDDLSCNQNEVEASDLEVLTGIPAEVPHIRESVMRQGRHLCFQLVSPTGTAVSTLSYISRTNQLAVGFSDGYLALWNMKSMKREYYIQLESGQVPVYAVTFQEPENDPRNCCYLWAVQSTQDSEGDVLSLHLLQLAFGNRKCLASGQILYEGLEYCEERYTLDLTGGMFPLRGQTSNTKLLGCQSIEKFRSHGDREEGVNEALSPDTSVSVFTWQVNIYGQGKPSVYLGLFDINRWYHAQMPDSLRSGEYLHNCSYFALWSLESVVSRTSPHGILDILVHERSLNRGVPPSYPPPEQFFNPSTYNFDATCLLNSGVVHLTCTGFQKETLTFLKKSGPSLNELIPDGYNRCLVAGLLSPRFVDVQPSSLSQEEQLEAILSAAIQTSSLGLLTGYIRRWITEEQPNSATNLRFVLEWTWNKVVLTKEEFDRLCVPLFDGSCHFMDPQTIQSIQQCYLLLSNLNIVLSCFASEAREITERGLIDLSNKFVVSHLICQYAQVVLWFSHSGLLPEGIDDSVQLSRLCYNYPVIQNYYTSRRQKFERLSRGKWNPDCLMIDGLVSQLGERIEKLWKRDEGGTGKYPPASLHAVLDMYLLDGVTEAAKHSITIYLLLDIMYSFPNKTDTPIESFPTVFAISWGQVKLIQGFWLIDHNDYESGLDLLFHPATAKPLSWQHSKIIQAFMSQGEHRQALRYIQTMKPTVSSGNDVILHLTVLLFNRCMVEAWNFLRQHCNRLNIEELLKHMYEVCQEMGLMEDLLKLPFTDTEQECLVKFLQSSASVQNHEFLLVHHLQRANYVPALKLNQTLKINVMNDRDPRLRERSLARNSILDQYGKILPRVHRKLAIERAKPYHLSTSSVFRLVSRPKPLSAVPKQVVTGTVLTRSVFINNVLSKIGEVWASKEPINSTTPFNSSKIEEPSPIVYSLPAPELPEAFFGTPISKASQKISRLLDLVVQPVPRPSQCSEFIQQSSMKSPLYLVSRSLPSSSQLKGSPQAISRASELHLLETPLVVKKAKSLAMSVTTSGFSEFTPQSILRSTLRSTPLASPSPSPGRSPQRLKETRISFVEEDVHPKWIPGAADDSKLEVFTTPKKCAVPVETEWLKSKDRTTSFFLNSPEKEHQEMDEGSQSLEKLDVSKGNSSVSITSDETTLEYQDAPSPEDLEETVFTASKPKSSSTALTTNVTEQTEKDGDKDVFASEVTPSDLQKQMGNLEDAETKDLLVAAEAFSELNHLSPVQGTEASLCAPSVYEGKIFTQKSKVPVLDEGLTSVETYTPAIRANDNKSMADVLGDGGNSSLTISEGPIVSERRLNQEVALNLKEDHEVEVGVLKESVDLPEEKLPISDSPPDTQEIHVIEQEKLEAQDSGEEARNLSFNELYPSGTLKLQYNFDTIDQQFCDLADNKDTAECDIAEVDGELFVAQSNFTLILEGEEGEVEPGDFASSDVLPKAANTATEEKLVCSGENDNHGQIANLPSAVTSDQKSQKVDTLPYVPEPIKVAIAENLLDVIKDTRSKEITSDTMEQSIHETIPLVSQNIMCPTKLVKSAFKTAQETSTMTMNVSQVDDVVSSKTRTRGQRIQNVNVKSAQQEASADVATPKMPGQSVRKKTRKAKEISEASENIYSDVRGLSQNQQIPQNSVTPRRGRRKKEVNQDILENTSSVEQELQITTGRESKRLKSSQLLEPAVEETTKKEVKVSSVTKRTPRRIKRSVENQESVEIINDLKVSTVTSPSRMIRKLRSTNLDASENTGNKQDDKSSDKQLRIKHVRRVRGREVSPSDVREDSNLESSQLTVQAEFDMSAIPRKRGRPRKINPSEDVGSKAVKEERSPKKKEAPSIRRRSTRNTPAKSENVDVGKPALGKSILVPNEELSMVMSSKKKLTKKTESQSQKRSLHSVSEERTDEMTHKETNEQEERLLATASFTKSSRSSRTRSSKAILLPDLSEPNNEPLFSPASEVPRKAKAKKIEVPAQLKELVSDLSSQFVISPPALRSRQKNTSNKNKLEDELKDDAQSVETLGKPKAKRIRTSKTKQASKNTEKESAWSPPPIEIRLISPLASPADGVKSKPRKTTEVTGTGLGRNRKKLSSYPKQILRRKML

SEQ ID NO: 14732 - protein, 848 aa, Homo sapiens
MNSSSANITYASRKRRKPVQKTVKPIPAEGIKSNPSKRHRDRLNTELDRLASLLPFPQDVINKLDKLSVLRLSVSYLRAKSFFDVALKSSPTERNGGQDNCRAANFREGLNLQEGEFLLQALNGFVLVVTTDALVFYASSTIQDYLGFQQSDVIHQSVYELIHTEDRAEFQRQLHWALNPSQCTESGQGIEEATGLPQTVVCYNPDQIPPENSPLMERCFICRLRCLLDNSSGFLAMNFQGKLKYLHGQKKKGKDGSILPPQLALFAIATPLQPPSILEIRTKNFIFRTKHKLDFTPIGCDAKGRIVLGYTEAELCTRGSGYQFIHAADMLYCAESHIRMIKTGESGMIVFRLLTKNNRWTWVQSNARLLYKNGRPDYIIVTQRPLTDEEGTEHLRKRNTKLPFMFTTGEAVLYEATNPFPAIMDPLPLRTKNGTSGKDSATTSTLSKDSLNPSSLLAAMMQQDESIYLYPASSTSSTAPFENNFFNESMNECRNWQDNTAPMGNDTILKHEQIDQPQDVNSFAGGHPGLFQDSKNSDLYSIMKNLGIDFEDIRHMQNEKFFRNDFSGEVDFRDIDLTDEILTYVQDSLSKSPFIPSDYQQQQSLALNSSCMVQEHLHLEQQQQHHQKQVVVEPQQQLCQKMKHMQVNGMFENWNSNQFVPFNCPQQDPQQYNVFTDLHGISQEFPYKSEMDSMPYTQNFISCNQPVLPQHSKCTELDYPMGSFEPSPYPTTSSLEDFVTCLQLPENQKHGLNPQSAIITPQTCYAGAVSMYQCQPEPQHTHVGQMQYNPVLPGQQAFLNKFQNGVLNETYPAELNNINNTQTTTHLQPLHHPSEARPFPDLTSSGFL

SEQ ID NO: 14733 - protein, 701 aa, Homo sapiens
MPRTMIPPGECTYAGRKRRRPLQKQRPAVGAEKSNPSKRHRDRLNAELDHLASLLPFPPDIISKLDKLSVLRLSVSYLRVKSFFQVVQEQSSRQPAAGAPSPGDSCPLAGSAVLEGRLLLESLNGFALVVSAEGTIFYASATIVDYLGFHQTDVMHQNIYDYIHVDDRQDFCRQLHWAMDPPQVVFGQPPPLETGDDAILGRLLRAQEWGTGTPTEYSAFLTRCFICRVRCLLDSTSGFLTMQFQGKLKFLFGQKKKAPSGAMLPPRLSLFCIAAPVLLPSAAEMKMRSALLRAKPRADTAATADAKVKATTSLCESELHGKPNYSAGRSSRESGVLVLREQTDAGRWAQVPARAPCLCLRGGPDLVLDPKGGSGDREEEQHRMLSRASGVTGRRETPGPTKPLPWTAGKHSEDGARPRLQPSKNDPPSLRPMPRGSCLPCPCVQGTFRNSPISHPPSPSPSAYSSRTSRPMRDVGEDQVHPPLCHFPQRSLQHQLPQPGAQRFATRGYPMEDMKLQGVPMPPGDLCGPTLLLDVSIKMEKDSGCEGAADGCVPSQVWLGASDRSHPATFPTRMHLKTEPDSRQQVYISHLGHGVRGAQPHGRATAGRSRELTPFHPAHCACLEPTDGLPQSEPPHQLCARGRGEQSCTCRAAEAAPVVKREPLDSPQWATHSQGMVPGMLPKSALATLVPPQASGCTFLP

SEQ ID NO: 14734 - protein, 545 aa, Homo sapiens
MATDAALRRLLRLHRTEIAVAVDSAFPLLHALADHDVVPEDKFQETLHLKEKEGCPQAFHALLSWLLTQDSTAILDFWRVLFKDYNLERYGRLQPILDSFPKDVDLSQPRKGRKPPAVPKALVPPPRLPTKRKASEEARAAAPAALTPRGTASPGSQLKAKPPKKPESSAEQQRLPLGNGIQTMSASVQRAVAMSSGDVPGARGAVEGILIQQVFESGGSKKCIQVGGEFYTPSKFEDSGSGKNKARSSSGPKPLVRAKGAQGAAPGGGEARLGQQGSVPAPLALPSDPQLHQKNEDECAVCRDGGELICCDGCPRAFHLACLSPPLREIPSGTWRCSSCLQATVQEVQPRAEEPRPQEPPVETPLPPGLRSAGEEVRGPPGEPLAGMDTTLVYKHLPAPPSAAPLPGLDSSALHPLLCVGPEGQQNLAPGARCGVCGDGTDVLRCTHCAAAFHWRCHFPAGTSRPGTGLRCRSCSGDVTPAPVEGVLAPSPARLAPGPAKDDTASHEPALHRDDLESLLSEHTFDGILQWAIQSMARPAAPFPS

SEQ ID NO: 14735 - protein, 1439 aa, Homo sapiens
MASSETEIRWAEPGLGKGPQRRRWAWAEDKRDVDRSSSQSWEEERLFPNATSPELLEDFRLAQQHLPPLEWDPHPQPDGHQDSESGETSGEEAEAEDVDSPASSHEPLAWLPQQGRQLDMTEEEPDGTLGSLEVEEAGESSSRLGYEAGLSLEGHGNTSPMALGHGQARGWVASGEQASGDKLSEHSEVNPSVELSPARSWSSGTVSLDHPSDSLDSTWEGETDGPQPTALAETLPEGPSHHLLSPDGRTGGSVARATPMEFQDSSAPPAQSPQHATDRWRRETTRFFCPQPKEHIWKQTKTSPKPLPSRFIGSISPLNPQPRPTRQGRPLPRQGATLAGRSSSNAPKYGRGQLNYPLPDFSKVGPRVRFPKDESYRPPKSRSHNRKPQAPARPLIFKSPAEIVQEVLLSSGEAALAKDTPPAHPITRVPQEFQTPEQATELVHQLQEDYHRLLTKYAEAENTIDQLRLGAKVNLFSDPPQPNHSIHTGMVPQGTKVLSFTIPQPRSAEWWPGPAEDPQASAASGWPSARGDLSPSSLTSMPTLGWLPENRDISEDQSSAEQTQALASQASQFLAKVESFERLIQAGRLMPQDQVKGFQRLKAAHAALEEEYLKACREQHPAQPLAGSKGTPGRFDPRRELEAEIYRLGSCLEELKEHIDQTQQEPEPPGSDSALDSTPALPCLHQPTHLPAPSGQAPMPAIKTSCPEPATTTAAASTGPCPLHVNVEVSSGNSEVEDRPQDPLARLRHKELQMEQVYHGLMERYLSVKSLPEAMRMEEEEEGEEEEEEEGGGDSLEVDGVAATPGKAEATRVLPRQCPVQAEKSHGAPLEEATEKMVSMKPPGFQASLARDGHMSGLGKAEAAPPGPGVPPHPPGTKSAASHQSSMTSLEGSGISERLPQKPLHRGGGPHLEETWMASPETDSGFVGSETSRVSPLTQTPEHRLSHISTAGTLAQPFAASVPRDGASYPKARGSLIPRRATEPSTPRSQAQRYLSSPSGPLRQRAPNFSLERTLAAEMAVPGSEFEGHKRISEQPLPNKTISPPPAPAPAAAPLPCGPTETIPSFLLTRAGRDQAICELQEEVSRLRLRLEDSLHQPLQGSPTRPASAFDRPARTRGRPADSPATWGSHYGSKSTERLPGEPRGEEQIVPPGRQRARSSSVPREVLRLSLSSESELPSLPLFSEKSKTTKDSPQAARDGKRGVGSAGWPDRVTFRGQYTGHEYHVLSPKAVPKGNGTVSCPHCRPIRTQDAGGAVTGDPLGPPPADTLQCPLCGQVGSPPEADGPGSATSGAEKATTRRKASSTPSPKQRSKQAGSSPRPPPGLWYLATAPPAPAPPAFAYISSVPIMPYPPAAVYYAPAGPTSAQPAAKWPPTASPPPARRHRHSIQLDLGDLEELNKALSRAVQAAESVRSTTRQMRSSLSADLRQAHSLRGSCLF

SEQ ID NO: 14736 - protein, 326 aa, Homo sapiens
MEFLSEKFALKSPPSKNSDFYMGAGGPLEHVMETLDNESFYSKASAGKCVQAFGPLPRAEHHVRLERTSPCQDSSVNYGITKVEGQPLHTELNRAMDNCNSLRMSPVKGMQEKGELDELGDKCDSNVSSSKKRRHRTTFTSLQLEELEKVFQKTHYPDVYVREQLALRTELTEARVQVWFQNRRAKWRKRERYGQIQQAKSHFAATYDISVLPRTDSYPQIQNNLWAGNASGGSVVTSCMLPRDTSSCMTPYSHSPRTDSSYTGFSNHQNQFSHVPLNNFFTDSLLTGATNGHAFETKPEFERRSSSIAVLRMKAKEHTANISWAM

SEQ ID NO: 14737 - protein, 343 aa, Homo sapiens
MDPEHCAPFRVGPAPGPYVASGDEPPGPQGTPAAAPHLHPAPPRGPRLTRFPACGPLEPYLPEPAKPPAKYLQDLGPGPALNGGHFYEGPAEAEEKTSKAASFPQLPLDCRGGPRDGPSNLQGSPGPCLASLHLPLSPGLPDSMELAKNKSKKRRNRTTFSTFQLEELEKVFQKTHYPDVYAREQLALRTDLTEARVQVWFQNRRAKWRKRERYGKIQEGRNPFTAAYDISVLPRTDSHPQLQNSLWASPGSGSPGGPCLVSPEGIPSPCMSPYSHPHGSVAGFMGVPAPSAAHPGIYSIHGFPPTLGGHSFEPSSDGDYKSPSLVSLRVKPKEPPGLLNWTT

SEQ ID NO: 14738 - protein, 411 aa, Homo sapiens
MNAETCVSYCESPAAAMDAYYSPVSQSREGSSPFRAFPGGDKFGTTFLSAAAKAQGFGDAKSRARYGAGQQDLATPLESGAGARGSFNKFQPQPSTPQPQPPPQPQPQQQQPQPQPPAQPHLYLQRGACKTPPDGSLKLQEGSSGHSAALQVPCYAKESSLGEPELPPDSDTVGMDSSYLSVKEAGVKGPQDRASSDLPSPLEKADSESNKGKKRRNRTTFTSYQLEELEKVFQKTHYPDVYAREQLAMRTDLTEARVQVWFQNRRAKWRKRERFGQMQQVRTHFSTAYELPLLTRAENYAQIQNPSWLGNNGAASPVPACVVPCDPVPACMSPHAHPPGSGASSVTDFLSVSGAGSHVGQTHMGSLFGAASLSPGLNGYELNGEPDRKTSSIAALRMKAKEHSAAISWAT

SEQ ID NO: 14739 - protein, 726 aa, Homo sapiens
MSPAPDAAPAPASISLFDLSADAPVFQGLSLVSHAPGEALARAPRTSCSGSGERESPERKLLQGPMDISEKLFCSTCDQTFQNHQEQREHYKLDWHRFNLKQRLKDKPLLSALDFEKQSSTGDLSSISGSEDSDSASEEDLQTLDRERATFEKLSRPPGFYPHRVLFQNAQGQFLYAYRCVLGPHQDPPEEAELLLQNLQSRGPRDCVVLMAAAGHFAGAIFQGREVVTHKTFHRYTVRAKRGTAQGLRDARGGPSHSAGANLRRYNEATLYKDVRDLLAGPSWAKALEEAGTILLRAPRSGRSLFFGGKGAPLQRGDPRLWDIPLATRRPTFQELQRVLHKLTTLHVYEEDPREAVRLHSPQTHWKTVREERKKPTEEEIRKICRDEKEALGQNEESPKQGSGSEGEDGFQVELELVELTVGTLDLCESEVLPKRRRRKRNKKEKSRDQEAGAHRTLLQQTQEEEPSTQSSQAVAAPLGPLLDEAKAPGQPELWNALLAACRAGDVGVLKLQLAPSPADPRVLSLLSAPLGSGGFTLLHAAAAAGRGSVVRLLLEAGADPTVQDSRARPPYTVAADKSTRNEFRRFMEKNPDAYDYNKAQVPGPLTPEMEARQATRKREQKAARRQREEQQQRQQEQEEREREEQRRFAALSDREKRALAAERRLAAQLGAPTSPIPDSAIVNTRRCWSCGASLQGLTPFHYLDFSFCSTRCLQDHRRQAGRPSS

SEQ ID NO: 14740 - protein, 807 aa, Homo sapiens
MFSAGAESLLHQAREIQDEELKKFCSRICKLLQAEDLGPDTLDSLQRLFLIISATKYSRRLEKTCVDLLQATLGLPACPEQLQVLCAAILREMSPSDSLSLAWDHTQNSRQLSLVASVLLAQGDRNEEVRAVGQGVLRALESRQPEGPSLRHLLPVMAKVVVLSPGTLQEDQATLLSKRLVDWLRYASLQQGLPHSGGFFSTPRARQPGPVTEVDGAVATDFFTVLSSGHRFTDDQWLNVQAFSMLRAWLLHSGPEGPGTLDTDDRSEQEGSTLSVISATSSAGRLLPPRERLREVAFEYCQRLIEQSNRRALRKGDSDLQKACLVEAVLVLDVLCRQDPSFLYRSLSCLKALHGRVRGDPASVRVLLPLAHFFLSHGEAAAVDSEAVYQHLFTRIPVEQFHSPMLAFEFIQFCRDNLHLFSGHLSTLRLSFPNLFKFLAWNSPPLTSEFVALLPALVDAGTALEMLHALLDLPCLTAVLDLQLRSAPAASERPLWDTSLRAPSCLEAFRDPQFQGLFQYLLRPKASGATERLAPLHQLLQPMAGCARVAQCAQAVPTLLQAFFSAVTQVADGSLINQLALLLLGRSDSLYPAPGYAAGVHSVLSSQFLALCTLKPSLVVELARDLLEFLGSVNGLCSRASLVTSVVWAIGEYLSVTYDRRCTVEQINKFFEALEALLFEVTQCRPSAALPRCPPQVVTVLMTTLTKLASRSQDLIPRASLLLSKMRTLAHSPATSSTHSEEGAEAIRTRATELLTLLKMPSVAQFVLTPSTEVCSPRYHRDANTALPLALRTVSRLVEREAGLMPG

SEQ ID NO: 14741 - protein, 920 aa, Homo sapiens
MEVQLGLGRVYPRPPSKTYRGAFQNLFQSVREVIQNPGPRHPEAASAAPPGASLLLLQQQQQQQQQQQQQQQQQQQQQQQETSPRQQQQQQGEDGSPQAHRRGPTGYLVLDEEQQPSQPQSALECHPERGCVPEPGAAVAASKGLPQQLPAPPDEDDSAAPSTLSLLGPTFPGLSSCSADLKDILSEASTMQLLQQQQQEAVSEGSSSGRAREASGAPTSSKDNYLGGTSTISDNAKELCKAVSVSMGLGVEALEHLSPGEQLRGDCMYAPLLGVPPAVRPTPCAPLAECKGSLLDDSAGKSTEDTAEYSPFKGGYTKGLEGESLGCSGSAAAGSSGTLELPSTLSLYKSGALDEAAAYQSRDYYNFPLALAGPPPPPPPPHPHARIKLENPLDYGSAWAAAAAQCRYGDLASLHGAGAAGPGSGSPSAAASSSWHTLFTAEEGQLYGPCGGGGGGGGGGGGGGGGGGGGGGGEAGAVAPYGYTRPPQGLAGQESDFTAPDVWYPGGMVSRVPYPSPTCVKSEMGPWMDSYSGPYGDMRLETARDHVLPIDYYFPPQKTCLICGDEASGCHYGALTCGSCKVFFKRAAEGKQKYLCASRNDCTIDKFRRKNCPSCRLRKCYEAGMTLGARKLKKLGNLKLQEEGEASSTTSPTEETTQKLTVSHIEGYECQPIFLNVLEAIEPGVVCAGHDNNQPDSFAALLSSLNELGERQLVHVVKWAKALPGFRNLHVDDQMAVIQYSWMGLMVFAMGWRSFTNVNSRMLYFAPDLVFNEYRMHKSRMYSQCVRMRHLSQEFGWLQITPQEFLCMKALLLFSIIPVDGLKNQKFFDELRMNYIKELDRIIACKRKNPTSCSRRFYQLTKLLDSVQPIARELHQFTFDLLIKSHMVSVDFPEMMAEIISVQVPKILSGKVKPIYFHTQ

SEQ ID NO: 14742 - protein, 315 aa, Homo sapiens
MRNRMAPENPQPDPFINRNYSNMKVIPPQDPASPSFTLLSKLECSGTVSAYCSLNLPGSTDPPTSASRVAATTAIRRRHKERTSFTHQQYEELEALFSQTMFPDRNLQEKLALRLDLPESTVKVWFRNRRFKLKKQQQQQSAKQRNQILPSKKNVPTSPRTSPSPYAFSPVISDFYSSLPSQPLDPSNWAWNSTFTESSTSDFQMQDTQWERLVASVPALYSDAYDIFQIIELYNLPDENEISSSSFHCLYQYLSPTKYQVGGQGSSLSIFAGPAVGLSPAQTWPNMTSQAFEAYSLTDSLEFQKTSNMVDLGFL

SEQ ID NO: 14743 - protein, 1499 aa, Homo sapiens
MMMARKQDVRIPTYNISVVGLSGTEKEKGQCGIGKSCLCNRFVRPSADEFHLDHTSVLSTSDFGGRVVNNDHFLYWGEVSRSLEDCVECKMHIVEQTEFIDDQTFQPHRSTALQPYIKRAAATKLASAEKLMYFCTDQLGLEQDFEQKQMPDGKLLVDGFLLGIDVSRGMNRNFDDQLKFVSNLYNQLAKTKKPIVVVLTKCDEGVERYIRDAHTFALSKKNLQVVETSARSNVNVDLAFSTLVQLIDKSRGKTKIIPYFEALKQQSQQIATAKDKYEWLVSRIVKNHNENWLSVSRKMQASPEYQDYVYLEGTQKAKKLFLQHIHRLKHEHIERRRKLYLAALPLAFEALIPNLDEIDHLSCIKAKKLLETKPEFLKWFVVLEETPWDATSHIDNMENERIPFDLMDTVPAEQLYEAHLEKLRNERKRVEMRRAFKENLETSPFITPGKPWEEARSFIMNEDFYQWLEESVYMDIYGKHQKQIIDKAKEEFQELLLEYSELFYELELDAKPSKEKMGVIQDVLGEEQRFKALQKLQAERDALILKHIHFVYHPTKETCPSCPACVDAKIEHLISSRFIRPSDRNQKNSLSDPNIDRINLVILGKDGLARELANEIRALCTNDDKYVIDGKMYELSLRPIEGNVRLPVNSFQTPTFQPHGCLCLYNSKESLSYVVESIEKSRESTLGRRDNHLVHLPLTLILVNKRGDTSGETLHSLIQQGQQIASKLQCVFLDPASAGIGYGRNINEKQISQVLKGLLDSKRNLNLVSSTASIKDLADVDLRIVMCLMCGDPFSADDILFPVLQSQTCKSSHCGSNNSVLLELPIGLHKKRIELSVLSYHSSFSIRKSRLVHGYIVFYSAKRKASLAMLRAFLCEVQDIIPIQLVALTDGAVDVLDNDLSREQLTEGEEIAQEIDGRFTSIPCSQPQHKLEIFHPFFKDVVEKKNIIEATHMYDNAAEACSTTEEVFNSPRAGSPLCNSNLQDSEEDIEPSYSLFREDTSLPSLSKDHSKLSMELEGNDGLSFIMSNFESKLNNKVPPPVKPKPPVHFEITKGDLSYLDQGHRDGQRKSVSSSPWLPQDGFDPSDYAEPMDAVVKPRNEEENIYSVPHDSTQGKIITIRNINKAQSNGSGNGSDSEMDTSSLERGRKVSIVSKPVLYRTRCTRLGRFASYRTSFSVGSDDELGPIRKKEEDQASQGYKGDNAVIPYETDEDPRRRNILRSLRRNTKKPKPKPRPSITKATWESNYFGVPLTTVVTPEKPIPIFIERCIEYIEATGLSTEGIYRVSGNKSEMESLQRQFDQDHNLDLAEKDFTVNTVAGAMKSFFSELPDPLVPYNMQIDLVEAHKINDREQKLHALKEVLKKFPKENHEVFKYVISHLNKVSHNNKVNLMTSENLSICFWPTLMRPDFSTMDALTATRTYQTIIELFIQQCPFFFYNRPITEPPGARPSSPSAVASTVPFLTSTPVTSQPSPPQSPPPTPQSPMQPLLPSQLQAEHTL

SEQ ID NO: 14744 - protein, 2285 aa, Homo sapiens
MAAQVAPAAASSLGNPPPPPPSELKKAEQQQREEAGGEAAAAAAAERGEMKAAAGQESEGPAVGPPQPLGKELQDGAESNGGGGGGGAGSGGGPGAEPDLKNSNGNAGPRPALNNNLTEPPGGGGGGSSDGVGAPPHSAAAALPPPAYGFGQPYGRSPSAVAAAAAAVFHQQHGGQQSPGLAALQSGGGGGLEPYAGPQQNSHDHGFPNHQYNSYYPNRSAYPPPAPAYALSSPRGGTPGSGAAAAAGSKPPPSSSASASSSSSSFAQQRFGAMGGGGPSAAGGGTPQPTATPTLNQLLTSPSSARGYQGYPGGDYSGGPQDGGAGKGPADMASQCWGAAAAAAAAAAASGGAQQRSHHAPMSPGSSGGGGQPLARTPQPSSPMDQMGKMRPQPYGGTNPYSQQQGPPSGPQQGHGYPGQPYGSQTPQRYPMTMQGRAQSAMGGLSYTQQIPPYGQQGPSGYGQQGQTPYYNQQSPHPQQQQPPYSQQPPSQTPHAQPSYQQQPQSQPPQLQSSQPPYSQQPSQPPHQQSPAPYPSQQSTTQQHPQSQPPYSQPQAQSPYQQQQPQQPAPSTLSQQAAYPQPQSQQSQQTAYSQQRFPPPQELSQDSFGSQASSAPSMTSSKGGQEDMNLSLQSRPSSLPDLSGSIDDLPMGTEGALSPGVSTSGISSSQGEQSNPAQSPFSPHTSPHLPGIRGPSPSPVGSPASVAQSRSGPLSPAAVPGNQMPPRPPSGQSDSIMHPSMNQSSIAQDRGYMQRNPQMPQYSSPQPGSALSPRQPSGGQIHTGMGSYQQNSMGSYGPQGGQYGPQGGYPRQPNYNALPNANYPSAGMAGGINPMGAGGQMHGQPGIPPYGTLPPGRMSHASMGNRPYGPNMANMPPQVGSGMCPPPGGMNRKTQETAVAMHVAANSIQNRPPGYPNMNQGGMMGTGPPYGQGINSMAGMINPQGPPYSMGGTMANNSAGMAASPEMMGLGDVKLTPATKMNNKADGTPKTESKSKKSSSSTTTNEKITKLYELGGEPERKMWVDRYLAFTEEKAMGMTNLPAVGRKPLDLYRLYVSVKEIGGLTQVNKNKKWRELATNLNVGTSSSAASSLKKQYIQCLYAFECKIERGEDPPPDIFAAADSKKSQPKIQPPSPAGSGSMQGPQTPQSTSSSMAEGGDLKPPTPASTPHSQIPPLPGMSRSNSVGIQDAFNDGSDSTFQKRNSMTPNPGYQPSMNTSDMMGRMSYEPNKDPYGSMRKAPGSDPFMSSGQGPNGGMGDPYSRAAGPGLGNVAMGPRQHYPYGGPYDRVRTEPGIGPEGNMSTGAPQPNLMPSNPDSGMYSPSRYPPQQQQQQQQRHDSYGNQFSTQGTPSGSPFPSQQTTMYQQQQQNYKRPMDGTYGPPAKRHEGEMYSVPYSTGQGQPQQQQLPPAQPQPASQQQAAQPSPQQDVYNQYGNAYPATATAATERRPAGGPQNQFPFQFGRDRVSAPPGTNAQQNMPPQMMGGPIQASAEVAQQGTMWQGRNDMTYNYANRQSTGSAPQGPAYHGVNRTDEMLHTDQRANHEGSWPSHGTRQPPYGPSAPVPPMTRPPPSNYQPPPSMQNHIPQVSSPAPLPRPMENRTSPSKSPFLHSGMKMQKAGPPVPASHIAPAPVQPPMIRRDITFPPGSVEATQPVLKQRRRLTMKDIGTPEAWRVMMSLKSGLLAESTWALDTINILLYDDNSIMTFNLSQLPGLLELLVEYFRRCLIEIFGILKEYEVGDPGQRTLLDPGRFSKVSSPAPMEGGEEEEELLGPKLEEEEEEEVVENDEEIAFSGKDKPASENSEEKLISKFDKLPVKIVQKNDPFVVDCSDKLGRVQEFDSGLLHWRIGGGDTTEHIQTHFESKTELLPSRPHAPCPPAPRKHVTTAEGTPGTTDQEGPPPDGPPEKRITATMDDMLSTRSSTLTEDGAKSSEAIKESSKFPFGISPAQSHRNIKILEDEPHSKDETPLCTLLDWQDSLAKRCVCVSNTIRSLSFVPGNDFEMSKHPGLLLILGKLILLHHKHPERKQAPLTYEKEEEQDQGVSCNKVEWWWDCLEMLRENTLVTLANISGQLDLSPYPESICLPVLDGLLHWAVCPSAEAQDPFSTLGPNAVLSPQRLVLETLSKLSIQDNNVDLILATPPFSRLEKLYSTMVRFLSDRKNPVCREMAVVLLANLAQGDSLAARAIAVQKGSIGNLLGFLEDSLAATQFQQSQASLLHMQNPPFEPTSVDMMRRAARALLALAKVDENHSEFTLYESRLLDISVSPLMNSLVSQVICDVLFLIGQS

SEQ ID NO: 14745 - protein, 2236 aa, Homo sapiens
MAHNAGAAAAAGTHSAKSGGSEAALKEGGSAAALSSSSSSSAAAAAASSSSSSGPGSAMETGLLPNHKLKTVGEAPAAPPHQQHHHHHHAHHHHHHAHHLHHHHALQQQLNQFQQQQQQQQQQQQQQQQQQHPISNNNSLGGAGGGAPQPGPDMEQPQHGGAKDSAAGGQADPPGPPLLSKPGDEDDAPPKMGEPAGGRYEHPGLGALGTQQPPVAVPGGGGGPAAVPEFNNYYGSAAPASGGPGGRAGPCFDQHGGQQSPGMGMMHSASAAAAGAPGSMDPLQNSHEGYPNSQCNHYPGYSRPGAGGGGGGGGGGGGGSGGGGGGGGAGAGGAGAGAVAAAAAAAAAAAGGGGGGGYGGSSAGYGVLSSPRQQGGGMMMGPGGGGAASLSKAAAGSAAGGFQRFAGQNQHPSGATPTLNQLLTSPSPMMRSYGGSYPEYSSPSAPPPPPSQPQSQAAAAGAAAGGQQAAAGMGLGKDMGAQYAAASPAWAAAQQRSHPAMSPGTPGPTMGRSQGSPMDPMVMKRPQLYGMGSNPHSQPQQSSPYPGGSYGPPGPQRYPIGIQGRTPGAMAGMQYPQQQMPPQYGQQGVSGYCQQGQQPYYSQQPQPPHLPPQAQYLPSQSQQRYQPQQDMSQEGYGTRSQPPLAPGKPNHEDLNLIQQERPSSLPDLSGSIDDLPTGTEATLSSAVSASGSTSSQGDQSNPAQSPFSPHASPHLSSIPGGPSPSPVGSPVGSNQSRSGPISPASIPGSQMPPQPPGSQSESSSHPALSQSPMPQERGFMAGTQRNPQMAQYGPQQTGPSMSPHPSPGGQMHAGISSFQQSNSSGTYGPQMSQYGPQGNYSRPPAYSGVPSASYSGPGPGMGISANNQMHGQGPSQPCGAVPLGRMPSAGMQNRPFPGNMSSMTPSSPGMSQQGGPGMGPPMPTVNRKAQEAAAAVMQAAANSAQSRQGSFPGMNQSGLMASSSPYSQPMNNSSSLMNTQAPPYSMAPAMVNSSAASVGLADMMSPGESKLPLPLKADGKEEGTPQPESKSKKSSSSTTTGEKITKVYELGNEPERKLWVDRYLTFMEERGSPVSSLPAVGKKPLDLFRLYVCVKEIGGLAQVNKNKKWRELATNLNVGTSSSAASSLKKQYIQYLFAFECKIERGEEPPPEVFSTGDTKKQPKLQPPSPANSGSLQGPQTPQSTGSNSMAEVPGDLKPPTPASTPHGQMTPMQGGRSSTISVHDPFSDVSDSSFPKRNSMTPNAPYQQGMSMPDVMGRMPYEPNKDPFGGMRKVPGSSEPFMTQGQMPNSSMQDMYNQSPSGAMSNLGMGQRQQFPYGASYDRRHEPYGQQYPGQGPPSGQPPYGGHQPGLYPQQPNYKRHMDGMYGPPAKRHEGDMYNMQYSSQQQEMYNQYGGSYSGPDRRPIQGQYPYPYSRERMQGPGQIQTHGIPPQMMGGPLQSSSSEGPQQNMWAARNDMPYPYQNRQGPGGPTQAPPYPGMNRTDDMMVPDQRINHESQWPSHVSQRQPYMSSSASMQPITRPPQPSYQTPPSLPNHISRAPSPASFQRSLENRMSPSKSPFLPSMKMQKVMPTVPTSQVTGPPPQPPPIRREITFPPGSVEASQPVLKQRRKITSKDIVTPEAWRVMMSLKSGLLAESTWALDTINILLYDDSTVATFNLSQLSGFLELLVEYFRKCLIDIFGILMEYEVGDPSQKALDHNAARKDDSQSLADDSGKEEEDAECIDDDEEDEEDEEEDSEKTESDEKSSIALTAPDAAADPKEKPKQASKFDKLPIKIVKKNNLFVVDRSDKLGRVQEFNSGLLHWQLGGGDTTEHIQTHFESKMEIPPRRRPPPPLSSAGRKKEQEGKGDSEEQQEKSIIATIDDVLSARPGALPEDANPGPQTESSKFPFGIQQAKSHRNIKLLEDEPRSRDETPLCTIAHWQDSLAKRCICVSNIVRSLSFVPGNDAEMSKHPGLVLILGKLILLHHEHPERKRAPQTYEKEEDEDKGVACSKDEWWWDCLEVLRDNTLVTLANISGQLDLSAYTESICLPILDGLLHWMVCPSAEAQDPFPTVGPNSVLSPQRLVLETLCKLSIQDNNVDLILATPPFSRQEKFYATLVRYVGDRKNPVCREMSMALLSNLAQGDALAARAIAVQKGSIGNLISFLEDGVTMAQYQQSQHNLMHMQPPPLEPPSVDMMCRAAKALLAMARVDENRSEFLLHEGRLLDISISAVLNSLVASVICDVLFQIGQL

SEQ ID NO: 14746 - protein, 1835 aa, Homo sapiens
MANSTGKAPPDERRKGLAFLDELRQFHHSRGSPFKKIPAVGGKELDLHGLYTRVTTLGGFAKVSEKNQWGEIVEEFNFPRSCSNAAFALKQYYLRYLEKYEKVHHFGEDDDEVPPGNPKPQLPIGAIPSSYNYQQHSVSDYLRQSYGLSMDFNSPNDYNKLVLSLLSGLPNEVDFAINVCTLLSNESKHVMQLEKDPKIITLLLANAGVFDDTLGSFSTVFGEEWKEKTDRDFVKFWKDIVDDNEVRDLISDRNKSHEGTSGEWIWESLFHPPRKLGINDIEGQRVLQIAVILRNLSFEEGNVKLLAANRTCLRFLLLSAHSHFISLRQLGLDTLGNIAAELLLDPVDFKTTHLMFHTVTKCLMSRDRFLKMRGMEILGNLCKAEDNGVLICEYVDQDSYREIICHLTLPDVLLVISTLEVLYMLTEMGDVACTKIAKVEKSIDMLVCLVSMDIQMFGPDALAAVKLIEHPSSSHQMLSEIRPQAIEQVQTQTHVASAPASRAVVAQHVAPPPGIVEIDSEKFACQWLNAHFEVNPDCSVSRAEMYSEYLSTCSKLARGGILTSTGFYKCLRTVFPNHTVKRVEDSSSNGQAHIHVVGVKRRAIPLPIQMYYQQQPVSTSVVRVDSVPDVSPAPSPAGIPHGSQTIGNHFQRTPVANQSSNLTATQMSFPVQGVHTVAQTVSRIPQNPSPHTHQQQNAPVTVIQSKAPIPCEVVKATVIQNSIPQTGVPVSIAVGGGPPQSSVVQNHSTGPQPVTVVNSQTLLHHPSVIPQQSPLHTVVPGQIPSGTPVTVIQQAVPQSHMFGRVQNIPACTSTVSQGQQLITTSPQPVQTSSQQTSAGSQSQDTVIIAPPQYVTTSASNIVSATSVQNFQVATGQMVTIAGVPSPQASRVGFQNIAPKPLPSQQVSSTVVQQPIQQPQQPTQQSVVIVSQPAQQGQTYAPAIHQIVLANPAALPAGQTVQLTGQPNITPSSSPSPVPATNNQVPTAMSSSSTPQSQGPPPTVSQMLSVKRQQQQQHSPAPPPQQVQVQVQQPQQVQMQVQPQQSNAGVGQPASGESSLIKQLLLPKRGPSTPGGKLILPAPQIPPPNNARAPSPQVVYQVASNQAAGFGVQGQTPAQQLLVGQQNVQLVPSAMPPSGGVQTVPISNLQILPGPLISNSPATIFQGTSGNQVTITVVPNTSFAPATVSQGNATQLIAPAGITMSGTQTGVGLPVQTLPATQASPAGQSSCTTATPPFKGDKIICQKEEEAKEATGLHVHERKIEVMENPSCRRGATNTSNGDTKENEMHVGSLLNGRKYSDSSLPPSNSGKIQSETNQCSLISNGPSLELGENGASGKQNSEQIDMQDIKSDLRKPLVNGICDFDKGDGSHLSKNIPNHKTSNHVGNGEISPMEPQGTLDITQQDTAKGDQLERISNGPVLTLGGSSVSSIQEASNAATQQFSGTDLLNGPLASSLNSDVPQQRPSVVVSPHSTTSVIQGHQIIAVPDSGSKVSHSPALSSDVRSTNGTAECKTVKRPAEDTDRETVAGIPNKVGVRIVTISDPNNAGCSATMVAVPAGADPSTVAKVAIESAVQQKQQHPPTYVQNVVPQNTPMPPSPAVQVQGQPNSSQPSPFSGSSQPGDPMRKPGQNFMCLWQSCKKWFQTPSQVFYHAATEHGGKDVYPGQCLWEGCEPFQRQRFSFITHLQDKHCSKDALLAGLKQDEPGQAGSQKSSTKQPTVGGTSSTPRAQKAIVNHPSAALMALRRGSRNLVFRDFTDEKEGPITKHIRLTAALILKNIGKYSECGRRLLKRHENNLSVLAISNMEASSTLAKCLYELNFTVQSKEQEKDSEMLQ

SEQ ID NO: 14747 - protein, 593 aa, Homo sapiens
MKLQAVMETLLQRQQRARQELEARQQLPPDPPAAPPGRARAAPDEDREPESARMQRAQMAALAAMRAAAAGLGHPASPGGSEDGPPGSEEEDAAREGTPGSPGRGREGPGEEHFEDMASDEDMKPKWEEEEMEEDLGEDEEEEEEDYEDEEEEEDEEGLGPPGPASLGTTALFPRKAQPPQAFRGDGVPRVLGGQERPGPGPAHPGGAAHVAPQLQPPDHGDWTYEEQFKQLYELDGDPKRKEFLDDLFSFMQKRGTPVNRIPIMAKQVLDLFMLYVLVTEKGGLVEVINKKLWREITKGLNLPTSITSAAFTLRTQYMKYLYPYECEKRGLSNPNELQAAIDSNRREGRRQSFGGSLFAYSPGGAHGMLSSPKLPVSSLGLAASTNGSSITPAPKIKKEEDSAIPITVPGRLPVSLAGHPVVAAQAAAVQAAAAQAAVAAQAAALEQLREKLESAEPPEKKMALVADEQQRLMQRALQQNFLAMAAQLPMSIRINSQASESRQDSAVNLTGTNGSNSISMSVEINGIMYTGVLFAQPPAPTPTSAPNKGGGGGGGSSSNAGGRGGNTGTSGGQAGPAGLSTPSTSTSNNSLP

SEQ ID NO: 14748 - protein, 561 aa, Homo sapiens
MEPLQQQQQQQQQQQKQPHLAPLQMDAREKQGQQMREAQFLYAQKLVTQPTLLSATAGRPSGSTPLGPLARVPPTAAVAQVFERGNMNSEPEEEDGGLEDEDGDDEVAEVAEKETQAASKYFHVQKVARQDPRVAPMSNLLPAPGLPPHGQQAKEDHTKDASKASPSVSTAGQPNWNLDEQLKQNGGLAWSDDADGGRGREISRDFAKLYELDGDPERKEFLDDLFVFMQKRGTPINRIPIMAKQILDLYMLYKLVTEKGGLVEIINKKIWREITKGLNLPTSITSAAFTLRTQYMKYLYAYECEKKALSSPAELQAAIDGNRREGRRPSYSSSLFGYSPAAATAAAAAGAPALLSPPKIRFPILGLGSSSGTNTSSPRISPATTLRKGDGAPVTTVPVPNRLAVPVTLASQQAGTRTAALEQLRERLESGEPAEKKASRLSEEEQRLVQQAFQRNFFSMARQLPMKIRINGRAEDRAEASAAALNLTTSSIGSINMSVDIDGTTYAGVLFAQKPVVHLITGSAPQSLGSSASSSSSSHCSPSPTSSRGTPSAEPSTSWSL

SEQ ID NO: 14749 - protein, 412 aa, Homo sapiens
MEALQKQQAARLAQGVGPLAPACPLLPPQPPLPDHRTLQAPEGALGNVGAEEEEDAEEDEEKREEAGAEEEAAEESRPGAQGPSSPSSQPPGLHPHEWTYEEQFKQLYELDADPKRKEFLDDLFSFMQKRGTPVNRVPIMAKQVLDLYALFRLVTAKGGLVEVINRKVWREVTRGLSLPTTITSAAFTLRTQYMKYLYPYECETRALSSPGELQAAIDSNRREGRRQAYTATPLFGLAGPPPRGAQDPALGPGPAPPATQSSPGPAQGSTSGLPAHACAQLSPSPIKKEESGIPNPCLALPVGLALGPTREKLAPEEPPEKRAVLMGPMDPPRPCMPPSFLPRGKVPLREERLDGPLNLAGSGISSINMALEINGVVYTGVLFARRQPVPASQGPTNPAPPPSTGPPSSILP

SEQ ID NO: 14750 - protein, 1257 aa, Homo sapiens
MKAADEPAYLTVGTDVSAKYRGAFCEAKIKTVKRLVKVKVLLKQDNTTQLVQDDQVKGPLRVGAIVETRTSDGSFQEAIISKLTDASWYTVVFDDGDERTLRRTSLCLKGERHFAESETLDQLPLTNPEHFGTPVIAKKTNRGRRSSLPVTEDEKEEESSEEEDEDKRRLNDELLGKVVSVVSATERTEWYPALVISPSCNDDITVKKDQCLVRSFIDSKFYSIARKDIKEVDILNLPESELSTKPGLQKASIFLKTRVVPDNWKMDISEILESSSSDDEDGPAEENDEEKEKEAKKTEEEVPEEELDPEERDNFLQQLYKFMEDRGTPINKPPVLGYKDLNLFKLFRLVYHQGGCDNIDSGAVWKQIYMDLGIPILNSAASYNVKTAYRKYLYGFEEYCRSANIQFRTVHHHEPKVKEEKKDLEESMEEALKLDQEMPLTEVKSEPEENIDSNSESEREEIELKSPRGRRRIARDVNSIKKEIEEEKTEDKLKDNDTENKDVDDDYETAEKKENELLLGRKNTPKQKEKKIKKQEDSDKDSDEEEEKSQEREETESKCDSEGEEDEEDMEPCLTGTKVKVKYGRGKTQKIYEASIKSTEIDDGEVLYLVHYYGWNVRYDEWVKADRIIWPLDKGGPKKKQKKKAKNKEDSEKDEKRDEERQKSKRGRPPLKSTLSSNMPYGLSKTANSEGKSDSCSSDSETEDALEKNLINEELSLKDELEKNENLNDDKLDEENPKISAHILKENDRTQMQPLETLKLEVGENEQIVQIFGNKMEKTEEVKKEAEKSPKGKGRRSKTKDLSLEIIKISSFGQNEAGSEPHIEAHSLELSSLDNKNFSSATEDEIDQCVKEKKLKRKILGQSSPEKKIRIENGMEMTNTVSQERTSDCIGSEGMKNLNFEQHFERENEGMPSLIAESNQCIQQLTSERFDSPAEETVNIPLKEDEDAMPLIGPETLVCHEVDLDDLDEKDKTSIEDVAVESSESNSLVSIPPALPPVVQHNFSVASPLTLSQDESRSVKSESDITIEVDSIAEESQEGLCERESANGFETNVASGTCSIIVQERESREKGQKRPSDGNSGLMAKKQKRTPKRTSAAAKNEKNGTGQSSDSEDLPVLDNSSKCTPVKHLNVSKPQKLARSPARISPHIKDGEKDKHREKHPNSSPRTYKWSFQLNELDNMNSTERISFLQEKLQEIRKYYMSLKSEVATIDRRRKRLKKKDREVSHAGASMSSASSDTGMSPSSSSPPQNVLAVECR

SEQ ID NO: 14751 - protein, 1312 aa, Homo sapiens
MKALDEPPYLTVGTDVSAKYRGAFCEAKIKTAKRLVKVKVTFRHDSSTVEVQDDHIKGPLKVGAIVEVKNLDGAYQEAVINKLTDASWYTVVFDDGDEKTLRRSSLCLKGERHFAESETLDQLPLTNPEHFGTPVIGKKTNRGRRSNHIPEEESSSSSSDEDEDDRKQIDELLGKVVCVDYISLDKKKALWFPALVVCPDCSDEIAVKKDNILVRSFKDGKFTSVPRKDVHEITSDTAPKPDAVLKQAFEQALEFHKSRTIPANWKTELKEDSSSSEAEEEEEEEDDEKEKEDNSSEEEEEIEPFPEERENFLQQLYKFMEDRGTPINKRPVLGYRNLNLFKLFRLVHKLGGFDNIESGAVWKQVYQDLGIPVLNSAAGYNVKCAYKKYLYGFEEYCRSANIEFQMALPEKVVNKQCKECENVKEIKVKEENETEIKEIKMEEERNIIPREEKPIEDEIERKENIKPSLGSKKNLLESIPTHSDQEKEVNIKKPEDNENLDDKDDDTTRVDESLNIKVEAEEEKAKSGDETNKEEDEDDEEAEEEEEEEEEEEDEDDDDNNEEEEFECYPPGMKVQVRYGRGKNQKMYEASIKDSDVEGGEVLYLVHYCGWNVRYDEWIKADKIVRPADKNVPKIKHRKKIKNKLDKEKDKDEKYSPKNCKLRRLSKPPFQTNPSPEMVSKLDLTDAKNSDTAHIKSIEITSILNGLQASESSAEDSEQEDERGAQDMDNNGKEESKIDHLTNNRNDLISKEEQNSSSLLEENKVHADLVISKPVSKSPERLRKDIEVLSEDTDYEEDEVTKKRKDVKKDTTDKSSKPQIKRGKRRYCNTEECLKTGSPGKKEEKAKNKESLCMENSSNSSSDEDEEETKAKMTPTKKYNGLEEKRKSLRTTGFYSGFSEVAEKRIKLLNNSDERLQNSRAKDRKDVWSSIQGQWPKKTLKELFSDSDTEAAASPPHPAPEEGVAEESLQTVAEEESCSPSVELEKPPPVNVDSKPIEEKTVEVNDRKAEFPSSGSNSVLNTPPTTPESPSSVTVTEGSRQQSSVTVSEPLAPNQEEVRSIKSETDSTIEVDSVAGELQDLQSEGNSSPAGFDASVSSSSSNQPEPEHPEKACTGQKRVKDAQGGGSSSKKQKRSHKATVVNNKKKGKGTNSSDSEELSAGESITKSQPVKSVSTGMKSHSTKSPARTQSPGKCGKNGDKDPDLKEPSNRLPKVYKWSFQMSDLENMTSAERITILQEKLQEIRKHYLSLKSEVASIDRRRKRLKKKERESAATSSSSSSPSSSSITAAVMLTLAEPSMSSASQNGMSVECR

SEQ ID NO: 14752 - protein, 594 aa, Homo sapiens
MAAPVKGNRKQSTEGDALDPPASPKPAGKQNGIQNPISLEDSPEAGGEREEEQEREEEQAFLVSLYKFMKERHTPIERVPHLGFKQINLWKIYKAVEKLGAYELVTGRRLWKNVYDELGGSPGSTSAATCTRRHYERLVLPYVRHLKGEDDKPLPTSKPRKQYKMAKENRGDDGATERPKKAKEERRMDQMMPGKTKADAADPAPLPSQEPPRNSTEQQGLASGSSVSFVGASGCPEAYKRLLSSFYCKGTHGIMSPLAKKKLLAQVSKVEALQCQEEGCRHGAEPQASPAVHLPESPQSPKGLTENSRHRLTPQEGLQAPGGSLREEAQAGPCPAAPIFKGCFYTHPTEVLKPVSQHPRDFFSRLKDGVLLGPPGKEGLSVKEPQLVWGGDANRPSAFHKGGSRKGILYPKPKACWVSPMAKVPAESPTLPPTFPSSPGLGSKRSLEEEGAAHSGKRLRAVSPFLKEADAKKCGAKPAGSGLVSCLLGPALGPVPPEAYRGTMLHCPLNFTGTPGPLKGQAALPFSPLVIPAFPAHFLATAGPSPMAAGLMHFPPTSFDSALRHRLCPASSAWHAPPVTTYAAPHFFHLNTKL

SEQ ID NO: 14753 - protein, 1188 aa, Homo sapiens
MEPNSLQWVGSPCGLHGPYIFYKAFQFHLEGKPRILSLGDFFFVRCTPKDPICIAELQLLWEERTSRQLLSSSKLYFLPEDTPQGRNSDHGEDEVIAVSEKVIVKLEDLVKWVHSDFSKWRCGFHAGPVKTEALGRNGQKEALLKYRQSTLNSGLNFKDVLKEKADLGEDEEETNVIVLSYPQYCRYRSMLKRIQDKPSSILTDQFALALGGIAVVSRNPQILYCRDTFDHPTLIENESICDEFAPNLKGRPRKKKPCPQRRDSFSGVKDSNNNSDGKAVAKVKCEARSALTKPKNNHNCKKVSNEEKPKVAIGEECRADEQAFLVALYKYMKERKTPIERIPYLGFKQINLWTMFQAAQKLGGYETITARRQWKHIYDELGGNPGSTSAATCTRRHYERLILPYERFIKGEEDKPLPPIKPRKQENSSQENENKTKVSGTKRIKHEIPKSKKEKENAPKPQDAAEVSSEQEKEQETLISQKSIPEPLPAADMKKKIEGYQEFSAKPLASRVDPEKDNETDQGSNSEKVAEEAGEKGPTPPLPSAPLAPEKDSALVPGASKQPLTSPSALVDSKQESKLCCFTESPESEPQEASFPSFPTTQPPLANQNETEDDKLPAMADYIANCTVKVDQLGSDDIHNALKQTPKVLVVQSFDMFKDKDLTGPMNENHGLNYTPLLYSRGNPGIMSPLAKKKLLSQVSGASLSSSYPYGSPPPLISKKKLIARDDLCSSLSQTHHGQSTDHMAVSRPSVIQHVQSFRSKPSEERKTINDIFKHEKLSRSDPHRCSFSKHHLNPLADSYVLKQEIQEGKDKLLEKRALPHSHMPSFLADFYSSPHLHSLYRHTEHHLHNEQTSKYPSRDMYRESENSSFPSHRHQEKLHVNYLTSLHLQDKKSAAAEAPTDDQPTDLSLPKNPHKPTGKVLGLAHSTTGPQESKGISQFQVLGSQSRDCHPKACRVSPMTMSGPKKYPESLSRSGKPHHVRLENFRKMEGMVHPILHRKMSPQNIGAARPIKRSLEDLDLVIAGKKARAVSPLDPSKEVSGKEKASEQESEGSKAAHGGHSGGGSEGHKLPLSSPIFPGLYSGSLCNSGLNSRLPAGYSHSLQYLKNQTVLSPLMQPLAFHSLVMQRGIFTSPTNSQQLYRHLAAATPVGSSYGDLLHNSIYPLAAINPQAAFPSSQLSSVHPSTKL

SEQ ID NO: 14754 - protein, 789 aa, Homo sapiens
MAATTANPEMTSDVPSLGPAIASGNSGPGIQGGGAIVQRAIKRRPGLDFDDDGEGNSKFLRCDDDQMSNDKERFARSDDEQSSADKERLARENHSEIERRRRNKMTAYITELSDMVPTCSALARKPDKLTILRMAVSHMKSLRGTGNTSTDGSYKPSFLTDQELKHLILEAADGFLFIVSCETGRVVYVSDSVTPVLNQPQSEWFGSTLYDQVHPDDVDKLREQLSTSENALTGRILDLKTGTVKKEGQQSSMRMCMGSRRSFICRMRCGSSSVDPVSVNRLSFVRNRCRNGLGSVKDGEPHFVVVHCTGYIKAWPPAGVSLPDDDPEAGQGSKFCLVAIGRLQVTSSPNCTDMSNVCQPTEFISRHNIEGIFTFVDHRCVATVGYQPQELLGKNIVEFCHPEDQQLLRDSFQQVVKLKGQVLSVMFRFRSKNQEWLWMRTSSFTFQNPYSDEIEYIICTNTNVKNSSQEPRPTLSNTIQRPQLGPTANLPLEMGSGQLAPRQQQQQTELDMVPGRDGLASYNHSQVVQPVTTTGPEHSKPLEKSDGLFAQDRDPRFSEIYHNINADQSKGISSSTVPATQQLFSQGNTFPPTPRPAENFRNSGLAPPVTIVQPSASAGQMLAQISRHSNPTQGATPTWTPTTRSGFSAQQVATQATAKTRTSQFGVGSFQTPSSFSSMSLPGAPTASPGAAAYPSLTNRGSNFAPETGQTAGQFQTRTAEGVGVWPQWQGQQPHHRSSSSEQHVQQPPAQQPGQPEVFQEMLSMLGDQSNSYNNEEFPDLTMFPPFSE

SEQ ID NO: 14755 - protein, 717 aa, Homo sapiens
MATPAAVNPPEMASDIPGSVTLPVAPMAATGQVRMAGAMPARGGKRRSGMDFDDEDGEGPSKFSRENHSEIERRRRNKMTQYITELSDMVPTCSALARKPDKLTILRMAVSHMKSMRGTGNKSTDGAYKPSFLTEQELKHLILEAADGFLFVVAAETGRVIYVSDSVTPVLNQPQSEWFGSTLYEQVHPDDVEKLREQLCTSENSMTGRILDLKTGTVKKEGQQSSMRMCMGSRRSFICRMRCGNAPLDHLPLNRITTMRKRFRNGLGPVKEGEAQYAVVHCTGYIKAWPPAGMTIPEEDADVGQGSKYCLVAIGRLQVTSSPVCMDMNGMSVPTEFLSRHNSDGIITFVDPRCISVIGYQPQDLLGKDILEFCHPEDQSHLRESFQQVVKLKGQVLSVMYRFRTKNREWMLIRTSSFTFQNPYSDEIEYIICTNTNVKQLQQQQAELEVHQRDGLSSYDLSQVPVPNLPAGVHEAGKSVEKADAIFSQERDPRFAEMFAGISASEKKMMSSASAAGTQQIYSQGSPFPSGHSGKAFSSSVVHVPGVNDIQSSSSTGQNMSQISRQLNQSQVAWTGSRPPFPGQQIPSQSSKTQSSPFGIGTSHTYPADPSSYSPLSSPATSSPSGNAYSSLANRTPGFAESGQSSGQFQGRPSEVWSQWQSQHHGQQSGEQHSHQQPGQTEVFQDMLPMPGDPTQGTGNYNIEDFADLGMFPPFSE

SEQ ID NO: 14756 - protein, 626 aa, Homo sapiens; identical to SEQ ID NO: 1081

SEQ ID NO: 14757 - protein, 636 aa, Homo sapiens
MAAEEEAAAGGKVLREENQCIAPVVSSRVSPGTRPTAMGSFSSHMTEFPRKRKGSDSDPSQSGIMTEKVVEKLSQNPLTYLLSTRIEISASSGSRVEDGEHQVKMKAFREAHSQTEKRRRDKMNNLIEELSAMIPQCNPMARKLDKLTVLRMAVQHLRSLKGLTNSYVGSNYRPSFLQDNELRHLILKTAEGFLFVVGCERGKILFVSKSVSKILNYDQASLTGQSLFDFLHPKDVAKVKEQLSSFDISPREKLIDAKTGLQVHSNLHAGRTRVYSGSRRSFFCRIKSCKISVKEEHGCLPNSKKKEHRKFYTIHCTGYLRSWPPNIVGMEEERNSKKDNSNFTCLVAIGRLQPYIVPQNSGEINVKPTEFITRFAVNGKFVYVDQRATAILGYLPQELLGTSCYEYFHQDDHNNLTDKHKAVLQSKEKILTDSYKFRAKDGSFVTLKSQWFSFTNPWTKELEYIVSVNTLVLGHSEPGEASFLPCSSQSSEESSRQSCMSVPGMSTGTVLGAGSIGTDIANEILDLQRLQSSSYLDDSSPTGLMKDTHTVNCRSMSNKELFPPSPSEMGELEATRQNQSTVAVHSHEPLLSDGAQLDFDALCDNDDTAMAAFMNYLEAEGGLGDPGDFSDIQWTL

SEQ ID NO: 14758 - protein, 562 aa, Homo sapiens
MSNQYQEEGCSERPECKSKSPTLLSSYCIDSILGRRSPCKMRLLGAAQSLPAPLTSRADPEKAVQGSPKSSSAPFEAELHLPPKLRRLYGPGGGRLLQGAAAAAAAAAAAAAAAATATAGPRGEAPPPPPPTARPGERPDGAGAAAAAAAAAAAAWDTLKISQAPQVSISRSKSYRENGAPFVPPPPALDELGGPGGVTHPEERLGVAGGPGSAPAAGGGTGTEDDEEELLEDEEDEDEEEELLEDDEEELLEDDARALLKEPRRCPVAATGAVAAAAAAAVATEGGELSPKEELLLHPEDAEGKDGEDSVCLSAGSDSEEGLLKRKQRRYRTTFTSYQLEELERAFQKTHYPDVFTREELAMRLDLTEARVQVWFQNRRAKWRKREKAGAQTHPPGLPFPGPLSATHPLSPYLDASPFPPHHPALDSAWTAAAAAAAAAFPSLPPPPGSASLPPSGAPLGLSTFLGAAVFRHPAFISPAFGRLFSTMAPLTSASTAAALLRQPTPAVEGAVASGALADPATAAADRRASSIAALRLKAKEHAAQLTQLNILPGTSTGKEVC

SEQ ID NO: 14759 - protein, 236 aa, Homo sapiens; identical to SEQ ID NO: 1202

SEQ ID NO: 14760 - protein, 193 aa, Homo sapiens
MDGGTLPRSAPPAPPVPVGCAARRRPASPELLRCSRRRRPATAETGGGAAAVARRNERERNRVKLVNLGFQALRQHVPHGGASKKLSKVETLRSAVEYIRALQRLLAEHDAVRNALAGGLRPQAVRPSAPRGPPGTTPVAASPSRASSSPGRGGSSEPGSPRSAYSSDDSGCEGALSPAERELLDFSSWLGGY

SEQ ID NO: 14761 - protein, 180 aa, Homo sapiens [sequence omitted]

SEQ ID NO: 14762 - protein, 172 aa, Homo sapiens
METRKPAERLALPYSLRTAPLGVPGTLPGLPRRDPLRVALRLDAACWEWARSGCARGWQYLPVPLDSAFEPAFLRKRNERERQRVRCVNEGYARLRDHLPRELADKRLSKVETLRAAIDYIKHLQELLERQAWGLEGAAGAVPQRRAECNSDGESKASSAPSPSSEPEEGGS

SEQ ID NO: 14763 - protein, 278 aa, Homo sapiens
MPMGAAERGAGPQSSAAPWAGSEKAAKRGPSKSWYPRAAASDVTCPTGGDGADPKPGPFGGGLALGPAPRGTMNNNFCRALVDRRPLGPPSCMQLGVMPPPRQAPLPPAEPLGNVPFLLYPGPAEPPYYDAYAGVFPYVPFPGAFGVYEYPFEPAFIQKRNERERQRVKCVNEGYARLRGHLPGALAEKRLSKVETLRAAIRYIKYLQELLSSAPDGSTPPASRGLPGTGPCPAPPATPRPDRPGDGEARAPSSLVPESSESSCFSPSPFLESEESWH

SEQ ID NO: 14764 - protein, 2969 aa, Homo sapiens
MDPRNTAMLGLGSDSEGFSRKSPSAISTGTLVSKREVELEKNTKEEEDLRKRNRERNIEAGKDDGLTDAQQQFSVKETNFSEGNLKLKIGLQAKRTKKPPKNLENYVCRPAIKTTIKHPRKALKSGKMTDEKNEHCPSKRDPSKLYKKADDVAAIECQSEEVIRLHSQGENNPLSKKLSPVHSEMADYINATPSTLLGSRDPDLKDRALLNGGTSVTEKLAQLIATCPPSKSSKTKPKKLGTGTTAGLVSKDLIRKAGVGSVAGIIHKDLIKKPTISTAVGLVTKDPGKKPVFNAAVGLVNKDSVKKLGTGTTAVFINKNLGKKPGTITTVGLLSKDSGKKLGIGIVPGLVHKESGKKLGLGTVVGLVNKDLGKKLGSTVGLVAKDCAKKIVASSAMGLVNKDIGKKLMSCPLAGLISKDAINLKAEALLPTQEPLKASCSTNINNQESQELSESLKDSATSKTFEKNVVRQNKESILEKFSVRKEIINLEKEMFNEGTCIQQDSFSSSEKGSYETSKHEKQPPVYCTSPDFKMGGASDVSTAKSPFSAVGESNLPSPSPTVSVNPLTRSPPETSSQLAPNPLLLSSTTELIEEISESVGKNQFTSESTHLNVGHRSVGHSISIECKGIDKEVNDSKTTHIDIPRISSSLGKKPSLTSESSIHTITPSVVNFTSLFSNKPFLKLGAVSASDKHCQVAESLSTSLQSKPLKKRKGRKPRWTKVVARSTCRSPKGLELERSELFKNVSCSSLSNSNSEPAKFMKNIGPPSFVDHDFLKRRLPKLSKSTAPSLALLADSEKPSHKSFATHKLSSSMCVSSDLLSDIYKPKRGRPKSKEMPQLEGPPKRTLKIPASKVFSLQSKEEQEPPILQPEIEIPSFKQGLSVSPFPKKRGRPKRQMRSPVKMKPPVLSVAPFVATESPSKLESESDNHRSSSDFFESEDQLQDPDDLDDSHRPSVCSMSDLEMEPDKKITKRNNGQLMKTIIRKINKMKTLKRKKLLNQILSSSVESSNKGKVQSKLHNTVSSLAATFGSKLGQQINVSKKGTIYIGKRRGRKPKTVLNGILSGSPTSLAVLEQTAQQAAGSALGQILPPLLPSSASSSEILPSPICSQSSGTSGGQSPVSSDAGFVEPSSVPYLHLHSRQGSMIQTLAMKKASKGRRRLSPPTLLPNSPSHLSELTSLKEATPSPISESHSDETIPSDSGIGTDNNSTSDRAEKFCGQKKRRHSFEHVSLIPPETSTVLSSLKEKHKHKCKRRNHDYLSYDKMKRQKRKRKKKYPQLRNRQDPDFIAELEELISRLSEIRITHRSHHFIPRDLLPTIFRINFNSFYTHPSFPLDPLHYIRKPDLKKKRGRPPKMREAMAEMPFMHSLSFPLSSTGFYPSYGMPYSPSPLTAAPIGLGYYGRYPPTLYPPPPSPSFTTPLPPPSYMHAGHLLLNPAKYHKKKHKLLRQEAFLTTSRTPLLSMSTYPSVPPEMAYGWMVEHKHRHRHKHREHRSSEQPQVSMDTGSSRSVLESLKRYRFGKDAVGERYKHKEKHRCHMSCPHLSPSKSLINREEQWVHREPSESSPLALGLQTPLQIDCSESSPSLSLGGFTPNSEPASSDEHTNLFTSAIGSCRVSNPNSSGRKKLTDSPGLFSAQDTSLNRLHRKESLPSNERAVQTLAGSQPTSDKPSQRPSESTNCSPTRKRSSSESTSSTVNGVPSRSPRLVASGDDSVDSLLQRMVQNEDQEPMEKSIDAVIATASAPPSSSPGRSHSKDRTLGKPDSLLVPAVTSDSCNNSISLLSEKLTSSCSPHHIKRSVVEAMQRQARKMCNYDKILATKKNLDHVNKILKAKKLQRQARTGNNFVKRRPGRPRKCPLQAVVSMQAFQAAQFVNPELNRDEEGAALHLSPDTVTDVIEAVVQSVNLNPEHKKGLKRKGWLLEEQTRKKQKPLPEEEEQENNKSFNEAPVEIPSPSETPAKPSEPESTLQPVLSLIPREKKPPRPPKKKYQKAGLYSDVYKTTDPKSRLIQLKKEKLEYTPGEHEYGLFPAPIHVVFFVSGKYLRQKRIDFQLPYDILWQWKHNQLYKKPDVPLYKKIRSNVYVDVKPLSGYEATTCNCKKPDDDTRKGCVDDCLNRMIFAECSPNTCPCGEQCCNQRIQRHEWVQCLERFRAEEKGWGIRTKEPLKAGQFIIEYLGEVVSEQEFRNRMIEQYHNHSDHYCLNLDSGMVIDSYRMGNEARFINHSCDPNCEMQKWSVNGVYRIGLYALKDMPAGTELTYDYNFHSFNVEKQQLCKCGFEKCRGIIGGKSQRVNGLTSSKNSQPMATHKKSGRSKEKRKSKHKLKKRRGHLSEEPSENINTPTRLTPQLQMKPMSNRERNFVLKHHVFLVRNWEKIRQKQEEVKHTSDNIHSASLYTRWNGICRDDGNIKSDVFMTQFSALQTARSVRTRRLAAAEENIEVARAARLAQIFKEICDGIISYKDSSRQALAAPLLNLPPKKKNADYYEKISDPLDLITIEKQILTGYYKTVEAFDADMLKVFRNAEKYYGRKSPVGRDVCRLRKAYYNARHEASAQIDEIVGETASEADSSETSVSEKENGHEKDDDVIRCICGLYKDEGLMIQCDKCMVWQHCDCMGVNSDVEHYLCEQCDPRPVDREVPMIPRPHYAQPGCVYFICLLRDDLLLRQGDCVYLMRDSRRTPDGHPVRQSYRLLSHINRDKLDIFRIEKLWKNEKEERFAFGHHYFRPHETHHSPSRRFYHNELFRVPLYEIIPLEAVVGTCCVLDLYTYCKGRPKGVKEQDVYICDYRLDKSAHLFYKIHRNRYPVCTKPYAFDHFPKKLTPKKDFSPHYVPDNYKRNGGRSSWKSERSKPPLKDLGQEDDALPLIEEVLASQEQAANEIPSLEEPEREGATANVSEGEKKTEESSQEPQSTCTPEERRHNQRERLNQILLNLLEKIPGKNAIDVTYLLEEGSGRKLRRRTLFIPENSFRK

SEQ ID NO: 14765 - protein, 628 aa, Homo sapiens
MAAAGAGPGQEAGAGPGPGAVANATGAEEGEMKPVAAGAAAPPGEGISAAPTVEPSSGEAEGGEANLVDVSGGLETESSNGKDTLEGAGDTSEVMDTQAGSVDEENGRQLGEVELQCGICTKWFTADTFGIDTSSCLPFMTNYSFHCNVCHHSGNTYFLRKQANLKEMCLSALANLTWQSRTQDEHPKTMFSKDKDIIPFIDKYWECMTTRQRPGKMTWPNNIVKTMSKERDVFLVKEHPDPGSKDPEEDYPKFGLLDQDLSNIGPAYDNQKQSSAVSTSGNLNGGIAAGSSGKGRGAKRKQQDGGTTGTTKKARSDPLFSAQRLPPHGYPLEHPFNKDGYRYILAEPDPHAPDPEKLELDCWAGKPIPGDLYRACLYERVLLALHDRAPQLKISDDRLTVVGEKGYSMVRASHGVRKGAWYFEITVDEMPPDTAARLGWSQPLGNLQAPLGYDKFSYSWRSKKGTKFHQSIGKHYSSGYGQGDVLGFYINLPEDTETAKSLPDTYKDKALIKFKSYLYFEEKDFVDKAEKSLKQTPHSEIIFYKNGVNQGVAYKDIFEGVYFPAISLYKSCTVSINFGPCFKYPPKDLTYRPMSDMGWGAVVEHTLADVLYHVETEVDGRRSPPWEP

SEQ ID NO: 14766 - protein, 271 aa, Homo sapiens
MEDSHKSTTSETAPQPGSAVQGAHISHIAQQVSSLSESEESQDSSDSIGSSQKAHGILARRPSYRKILKDLSSEDTRGRKGDGENSGVSAAVTSMSVPTPIYQTSSGQYIAIAPNGALQLASPGTDGVQGLQTLTMTNSGSTQQGTTILQYAQTSDGQQILVPSNQVVVQTASGDMQTYQIRTTPSATSLPQTVVMTSPVTLTSQTTKTDDPQLKREIRLMKNREAARECRRKKKEYVKCLENRVAVLENQNKTLIEELKTLKDLYSNKSV

SEQ ID NO: 14767 - protein, 505 aa, Homo sapiens
MKFKLHVNSARQYKDLWNMSDDKPFLCTAPGCGQRFTNEDHLAVHKHKHEMTLKFGPARNDSVIVADQTPTPTRFLKNCEEVGLFNELASPFENEFKKASEDDIKKMPLDLSPLATPIIRSKIEEPSVVETTHQDSPLPHPESTTSDEKEVPLAQTAQPTSAIVRPASLQVPNVLLTSSDSSVIIQQAVPSPTSSTVITQAPSSNRPIVPVPGPFPLLLHLPNGQTMPVAIPASITSSNVHVPAAVPLVRPVTMVPSVPGIPGPSSPQPVQSEAKMRLKAALTQQHPPVTNGDTVKGHGSGLVRTQSEESRPQSLQQPATSTTETPASPAHTTPQTQSTSGRRRRAANEDPDEKRRKFLERNRAAASRCRQKRKVWVQSLEKKAEDLSSLNGQLQSEVTLLRNEVAQLKQLLLAHKDCPVTAMQKKSGYHTADKDDSSEDISVPSSPHTEAIQHSSVSTSNGVSSTSKAEAVATSVLTQMADQSTEPALSQIVMAPSSQSQPSGS

SEQ ID NO: 14768 - protein, 181 aa, Homo sapiens
MMLQHPGQVSASEVSASAIVPCLSPPGSLVFEDFANLTPFVKEELRFAIQNKHLCHRMSSALESVTVSDRPLGVSITKAEVAPEEDERKKRRRERNKIAAAKCRNKKKEKTECLQKESEKLESVNAELKAQIEELKNEKQHLIYMLNLHRPTCIVRAQNGRTPEDERNLFIQQIKEGTLQS

SEQ ID NO: 14769 - protein, 351 aa, Homo sapiens
MTEMSFLSSEVLVGDLMSPFDQSGLGAEESLGLLDDYLEVAKHFKPHGFSSDKAKAGSSEWLAVDGLVSPSNNSKEDAFSGTDWMLEKMDLKEFDLDALLGIDDLETMPDDLLTTLDDTCDLFAPLVQETNKQPPQTVNPIGHLPESLTKPDQVAPFTFLQPLPLSPGVLSSTPDHSFSLELGSEVDITEGDRKPDYTAYVAMIPQCIKEEDTPSDNDSGICMSPESYLGSPQHSPSTRGSPNRSLPSPGVLCGSARPKPYDPPGEKMVAAKVKGEKLDKKLKKMEQNKTAATRYRQKKRAEQEALTGECKELEKKNEALKERADSLAKEIQYLKDLIEEVRKARGKKRVP

SEQ ID NO: 14770 - protein, 282 aa, Homo sapiens
MSLLATLGLELDRALLPASGLGWLVDYGKLPPAPAPLAPYEVLGGALEGGLPVGGEPLAGDGFSDWMTERVDFTALLPLEPPLPPGTLPQPSPTPPDLEAMASLLKKELEQMEDFFLDAPPLPPPSPPPLPPPPLPPAPSLPLSLPSFDLPQPPVLDTLDLLAIYCRNEAGQEEVGMPPLPPPQQPPPPSPPQPSRLAPYPHPATTRGDRKQKKRDQNKSAALRYRQRKRAEGEALEGECQGLEARNRELKERAESVEREIQYVKDLLIEVYKARSQRTRSC

SEQ ID NO: 14771 - protein, 670 aa, Homo sapiens
MGEPAGVAGTMESPFSPGLFHRLDEDWDSALFAELGYFTDTDELQLEAANETYENNFDNLDFDLDLMPWESDIWDINNQICTVKDIKAEPQPLSPASSSYSVSSPRSVDSYSSTQHVPEELDLSSSSQMSPLSLYGENSNSLSSAEPLKEDKPVTGPRNKTENGLTPKKKIQVNSKPSIQPKPLLLPAAPKTQTNSSVPAKTIIIQTVPTLMPLAKQQPIISLQPAPTKGQTVLLSQPTVVQLQAPGVLPSAQPVLAVAGGVTQLPNHVVNVVPAPSANSPVNGKLSVTKPVLQSTMRNVGSDIAVLRRQQRMIKNRESACQSRKKKKEYMLGLEARLKAALSENEQLKKENGTLKRQLDEVVSENQRLKVPSPKRRVVCVMIVLAFIILNYGPMSMLEQDSRRMNPSVSPANQRRHLLGFSAKEAQDTSDGIIQKNSYRYDHSVSNDKALMVLTEEPLLYIPPPPCQPLINTTESLRLNHELRGWVHRHEVERTKSRRMTNNQQKTRILQGALEQGSNSQLMAVQYTETTSSISRNSGSELQVYYASPRSYQDFFEAIRRRGDTFYVVSFRRDHLLLPATTHNKTTRPKMSIVLPAININENVINGQDYEVMMQIDCQVMDTRILHIKSSSVPPYLRDQQRNQTNTFFGSPPAATEATHVVSTIPESLQ

SEQ ID NO: 14772 - protein, 703 aa, Homo sapiens
MAELMLLSEIADPTRFFTDNLLSPEDWGLQNSTLYSGLDEVAEEQTQLFRCPEQDVPFDGSSLDVGMDVSPSEPPWELLPIFPDLQVKSEPSSPCSSSSLSSESSRLSTEPSSEALGVGEVLHVKTESLAPPLCLLGDDPTSSFETVQINVIPTSDDSSDVQTKIEPVSPCSSVNSEASLLSADSSSQAFIGEEVLEVKTESLSPSGCLLWDVPAPSLGAVQISMGPSLDGSSGKALPTRKPPLQPKPVVLTTVPMPSRAVPPSTTVLLQSLVQPPPVSPVVLIQGAIRVQPEGPAPSLPRPERKSIVPAPMPGNSCPPEVDAKLLKRQQRMIKNRESACQSRRKKKEYLQGLEARLQAVLADNQQLRRENAALRRRLEALLAENSELKLGSGNRKVVCIMVFLLFIAFNFGPVSISEPPSAPISPRMNKGEPQPRRHLLGFSEQEPVQGVEPLQGSSQGPKEPQPSPTDQPSFSNLTAFPGGAKELLLRDLDQLFLSSDCRHFNRTESLRLADELSGWVQRHQRGRRKIPQRAQERQKSQPRKKSPPVKAVPIQPPGPPERDSVGQLQLYRHPDRSQPAFLDAIDRREDTFYVVSFRRDHLLLPAISHNKTSRPKMSLVMPAMAPNETLSGRGAPGDYEEMMQIECEVMDTRVIHIKTSTVPPSLRKQPSPTPGNATGGPLPVSAASQAHQASHQPLYLNHP

SEQ ID NO: 14773 - protein, 494 aa, Homo sapiens
MGDDRPFVCNAPGCGQRFTNEDHLAVHKHKHEMTLKFGPARTDSVIIADQTPTPTRFLKNCEEVGLFNELASSFEHEFKKAADEDEKKARSRTVAKKLVAAAGPLDMSLPSTPDIKIKEEEPVEVDSSPPDSPASSPCSPPLKEKEVTPKPVLISTPTPTIVRPGSLPLHLGYDPLHPTLPSPTSVITQAPPSNRQMGSPTGSLPLVMHLANGQTMPVLPGPPVQMPSVISLARPVSMVPNIPGIPGPPVNSSGSISPSGHPIPSEAKMRLKATLTHQVSSINGGCGMVVGTASTMVTARPEQSQILIQHPDAPSPAQPQVSPAQPTPSTGGRRRRTVDEDPDERRQRFLERNRAAASRCRQKRKLWVSSLEKKAEELTSQNIQLSNEVTLLRNEVAQLKQLLLAHKDCPVTALQKKTQGYLESPKESSEPTGSPAPVIQHSSATAPSNGLSVRSAAEAVATSVLTQMASQRTELSMPIQSHVIMTPQSQSAGR

SEQ ID NO: 14774 - protein, 354 aa, Homo sapiens
MSRLLHAEEWAEVKELGDHHRQPQPHHLPQPPPPPQPPATLQAREHPVYPPELSLLDSTDPRAWLAPTLQGICTARAAQYLLHSPELGASEAAAPRDEVDGRGELVRRSSGGASSSKSPGPVKVREQLCKLKGGVVVDELGCSRQRAPSSKQVNGVQKQRRLAANARERRRMHGLNHAFDQLRNVIPSFNNDKKLSKYETLQMAQIYINALSELLQTPSGGEQPPPPPASCKSDHHHLRTAASYEGGAGNATAAGAQQASGGSQRPTPPGSCRTRFSAPASAGGYSVQLDALHFSTFEDSALTAMMAQKNLSPSLPGSILQPVQEENSKTSPRSHRSDGEFSPHSHYSDSDEAS

SEQ ID NO: 14775 - protein, 152 aa, Homo sapiens
MKSCKPSGPPAGARVAPPCAGGTECAGTCAGAGRLESAARRRLAANARERRRMQGLNTAFDRLRRVVPQWGQDKKLSKYETLQMALSYIMALTRILAEAERFGSERDWVGLHCEHFGRDHYLPFPGAKLPGESELYSQRLFGFQPEPFQMAT

SEQ ID NO: 14776 - protein, 321 aa, Homo sapiens
MKHIPVLEDGPWKTVCVKELNGLKKLKRKGKEPARRANGYKTFRLDLEAPEPRAVATNGLRDRTHRLQPVPVPVPVPVPVAPAVPPRGGTDTAGERGGSRAPEVSDARKRCFALGAVGPGLPTPPPPPPPAPQSQAPGGPEAQPFREPGLRPRILLCAPPARPAPSAPPAPPAPPESTVRPAPPTRPGESSYSSISHVIYNNHQDSSASPRKRPGEATAASSEIKALQQTRRLLANARERTRVHTISAAFEALRKQVPCYSYGQKLSKLAILRIACNYILSLARLADLDYSADHSNLSFSECVQRCTRTLQAEGRAKKRKE

SEQ ID NO: 14777 - protein, 2492 aa, Homo sapiens
MTAEPMSESKLNTLVQKLHDFLAHSSEESEETSSPPRLAMNQNTDKISGSGSNSDMMENSKEEGTSSSEKSKSSGSSRSKRKPSIVTKYVESDDEKPLDDETVNEDASNENSENDITMQSLPKGTVIVQPEPVLNEDKDDFKGPEFRSRSKMKTENLKKRGEDGLHGIVSCTACGQQVNHFQKDSIYRHPSLQVLICKNCFKYYMSDDISRDSDGMDEQCRWCAEGGNLICCDFCHNAFCKKCILRNLGRKELSTIMDENNQWYCYICHPEPLLDLVTACNSVFENLEQLLQQNKKKIKVDSEKSNKVYEHTSRFSPKKTSSNCNGEEKKLDDSCSGSVTYSYSALIVPKEMIKKAKKLIETTANMNSSYVKFLKQATDNSEISSATKLRQLKAFKSVLADIKKAHLALEEDLNSEFRAMDAVNKEKNTKEHKVIDAKFETKARKGEKPCALEKKDISKSEAKLSRKQVDSEHMHQNVPTEEQRTNKSTGGEHKKSDRKEEPQYEPANTSEDLDMDIVSVPSSVPEDIFENLETAMEVQSSVDHQGDGSSGTEQEVESSSVKLNISSKDNRGGIKSKTTAKVTKELYVKLTPVSLSNSPIKGADCQEVPQDKDGYKSCGLNPKLEKCGLGQENSDNEHLVENEVSLLLEESDLRRSPRVKTTPLRRPTETNPVTSNSDEECNETVKEKQKLSVPVRKKDKRNSSDSAIDNPKPNKLPKSKQSETVDQNSDSDEMLAILKEVSRMSHSSSSDTDINEIHTNHKTLYDLKTQAGKDDKGKRKRKSSTSGSDFDTKKGKSAKSSIISKKKRQTQSESSNYDSELEKEIKSMSKIGAARTTKKRIPNTKDFDSSEDEKHSKKGMDNQGHKNLKTSQEGSSDDAERKQERETFSSAEGTVDKDTTIMELRDRLPKKQQASASTDGVDKLSGKEQSFTSLEVRKVAETKEKSKHLKTKTCKKVQDGLSDIAEKFLKKDQSDETSEDDKKQSKKGTEEKKKPSDFKKKVIKMEQQYESSSDGTEKLPEREEICHFPKGIKQIKNGTTDGEKKSKKIRDKTSKKKDELSDYAEKSTGKGDSCDSSEDKKSKNGAYGREKKRCKLLGKSSRKRQDCSSSDTEKYSMKEDGCNSSDKRLKRIELRERRNLSSKRNTKEIQSGSSSSDAEESSEDNKKKKQRTSSKKKAVIVKEKKRNSLRTSTKRKQADITSSSSSDIEDDDQNSIGEGSSDEQKIKPVTENLVLSSHTGFCQSSGDEALSKSVPVTVDDDDDDNDPENRIAKKMLLEEIKANLSSDEDGSSDDEPEEGKKRTGKQNEENPGDEEAKNQVNSESDSDSEESKKPRYRHRLLRHKLTVSDGESGEEKKTKPKEHKEVKGRNRRKVSSEDSEDSDFQESGVSEEVSESEDEQRPRTRSAKKAELEENQRSYKQKKKRRRIKVQEDSSSENKSNSEEEEEEKEEEEEEEEEEEEEEEDENDDSKSPGKGRKKIRKILKDDKLRTETQNALKEEEERRKRIAEREREREKLREVIEIEDASPTKCPITTKLVLDEDEETKEPLVQVHRNMVIKLKPHQVDGVQFMWDCCCESVKKTKKSPGSGCILAHCMGLGKTLQVVSFLHTVLLCDKLDFSTALVVCPLNTALNWMNEFEKWQEGLKDDEKLEVSELATVKRPQERSYMLQRWQEDGGVMIIGYEMYRNLAQGRNVKSRKLKEIFNKALVDPGPDFVVCDEGHILKNEASAVSKAMNSIRSRRRIILTGTPLQNNLIEYHCMVNFIKENLLGSIKEFRNRFINPIQNGQCADSTMVDVRVMKKRAHILYEMLAGCVQRKDYTALTKFLPPKHEYVLAVRMTSIQCKLYQYYLDHLTGVGNNSEGGRGKAGAKLFQDFQMLSRIWTHPWCLQLDYISKENKGYFDEDSMDEFIASDSDETSMSLSSDDYTKKKKKGKKGKKDSSSSGSGSDNDVEVIKVWNSRSRGGGEGNVDETGNNPSVSLKLEESKATSSSNPSSPAPDWYKDFVTDADAEVLEHSGKMVLLFEILRMAEEIGDKVLVFSQSLISLDLIEDFLELASREKTEDKDKPLIYKGEGKWLRNIDYYRLDGSTTAQSRKKWAEEFNDETNVRGRLFIISTKAGSLGINLVAANRVIIFDASWNPSYDIQSIFRVYRFGQTKPVYVYRFLAQGTMEDKIYDRQVTKQSLSFRVVDQQQVERHFTMNELTELYTFEPDLLDDPNSEKKKKRDTPMLPKDTILAELLQIHKEHIVGYHEHDSLLDHKEEEELTEEERKAAWAEYEAEKKGLTMRFNIPTGTNLPPVSFNSQTPYIPFNLGALSAMSNQQLEDLINQGREKVVEATNSVTAVRIQPLEDIISAVWKENMNLSEAQVQALALSRQASQELDVKRREAIYNDVLTKQQMLISCVQRILMNRRLQQQYNQQQQQQMTYQQATLGHLMMPKPPNLIMNPSNYQQIDMRGMYQPVAGGMQPPPLQRAPPPMRSKNPGPSQGKSM

SEQ ID NO: 14778 - protein, 892 aa, Homo sapiens
MSERAADDVRGEPRRAAAAAGGAAAAAARQQQQQQQQQQPPPPQPQRQQHPPPPPRRTRPEDGGPGAASTSAAAMATVGERRPLPSPEVMLGQSWNLWVEASKLPGKDGTELDESFKEFGKNREVMGLCREDMPIFGFCPAHDDFYLVVCNDCNQVVKPQAFQSHYERRHSSSSKPPLAVPPTSVFSFFPSLSKSKGGSASGSNRSSSGGVLSASSSSSKLLKSPKEKLQLRGNTRPMHPIQQSRVPHGRIMTPSVKVEKIHPKMDGTLLKSAVGPTCPATVSSLVKPGLNCPSIPKPTLPSPGQILNGKGLPAPPTLEKKPEDNSNNRKFLNKRLSEREFDPDIHCGVIDLDTKKPCTRSLTCKTHSLTQRRAVQGRRKRFDVLLAEHKNKTREKELIRHPDSQQPPQPLRDPHPAPPRTSQEPHQNPHGVIPSESKPFVASKPKPHTPSLPRPPGCPAQQGGSAPIDPPPVHESPHPPLPATEPASRLSSEEGEGDDKEESVEKLDCHYSGHHPQPASFCTFGSRQIGRGYYVFDSRWNRLRCALNLMVEKHLNAQLWKKIPPVPSTTSPISTRIPHRTNSVPTSQCGVSYLAAATVSTSPVLLSSTCISPNSKSVPAHGTTLNAQPAASGAMDPVCSMQSRQVSSSSSSPSTPSGLSSVPSSPMSRKPQKLKSSKSLRPKESSGNSTNCQNASSSTSGGSGKKRKNSSPLLVHSSSSSSSSSSSSHSMESFRKNCVAHSGPPYPSTVTSSHSIGLNCVTNKANAVNVRHDQSGRGPPTGSPAESIKRMSVMVNSSDSTLSLGPFIHQSNELPVNSHGSFSHSHTPLDKLIGKKRKCSPSSSSINNSSSKPTKVAKVPAVNNVHMKHTGTIPGAQGLMNSSLLHQPKARP

SEQ ID NO: 14779 - protein, 736 aa, Homo sapiens
MSLSENSVFAYESSVHSTNVLLSLNDQRKKDVLCDVTIFVEGQRFRAHRSVLAACSSYFHSRIVGQADGELNITLPEEVTVKGFEPLIQFAYTAKLILSKENVDEVCKCVEFLSVHNIEESCFQFLKFKFLDSTADQQECPRKKCFSSHCQKTDLKLSLLDQRDLETDEVEEFLENKNVQTPQCKLRRYQGNAKASPPLQDSASQTYESMCLEKDAALALPSLCPKYRKFQKAFGTDRVRTGESSVKDIHASVQPNERSENECLGGVPECRDLQVMLKCDESKLAMEPEETKKDPASQCPTEKSEVTPFPHNSSIDPHGLYSLSLLHTYDQYGDLNFAGMQNTTVLTEKPLSGTDVQEKTFGESQDLPLKSDLGTREDSSVASSDRSSVEREVAEHLAKGFWSDICSTDTPCQMQLSPAVAKDGSEQISQKRSECPWLGIRISESPEPGQRTFTTLSSVNCPFISTLSTEGCSSNLEIGNDDYVSEPQQEPCPYACVISLGDDSETDTEGDSESCSAREQECEVKLPFNAQRIISLSRNDFQSLLKMHKLTPEQLDCIHDIRRRSKNRIAAQRCRKRKLDCIQNLESEIEKLQSEKESLLKERDHILSTLGETKQNLTGLCQKVCKEAALSQEQIQILAKYSAADCPLSFLISEKDKSTPDGELALPSIFSLSDRPPAVLPPCARGNSEPGYARGQESQQMSTATSEQAGPAEQCRQSGGISDFCQQMTDKCTTDE

SEQ ID NO: 14780 - protein, 1249 aa, Homo sapiens
MSSMWSEYTIGGVKIYFPYKAYPSQLAMMNSILRGLNSKQHCLLESPTGSGKSLALLCSALAWQQSLSGKPADEGVSEKAEVQLSCCCACHSKDFTNNDMNQGTSRHFNYPSTPPSERNGTSSTCQDSPEKTTLAAKLSAKKQASIYRDENDDFQVEKKRIRPLETTQQIRKRHCFGTEVHNLDAKVDSGKTVKLNSPLEKINSFSPQKPPGHCSRCCCSTKQGNSQESSNTIKKDHTGKSKIPKIYFGTRTHKQIAQITRELRRTAYSGVPMTILSSRDHTCVHPEVVGNFNRNEKCMELLDGKNGKSCYFYHGVHKISDQHTLQTFQGMCKAWDIEELVSLGKKLKACPYYTARELIQDADIIFCPYNYLLDAQIRESMDLNLKEQVVILDEAHNIEDCARESASYSVTEVQLRFARDELDSMVNNNIRKKDHEPLRAVCCSLINWLEANAEYLVERDYESACKIWSGNEMLLTLHKMGITTATFPILQGHFSAVLQKEEKISPIYGKEEAREVPVISASTQIMLKGLFMVLDYLFRQNSRFADDYKIAIQQTYSWTNQIDISDKNGLLVLPKNKKRSRQKTAVHVLNFWCLNPAVAFSDINGKVQTIVLTSGTLSPMKSFSSELGVTFTIQLEANHIIKNSQVWVGTIGSGPKGRNLCATFQNTETFEFQDEVGALLLSVCQTVSQGILCFLPSYKLLEKLKERWLSTGLWHNLELVKTVIVEPQGGEKTNFDELLQVYYDAIKYKGEKDGALLVAVCRGKVSEGLDFSDDNARAVITIGIPFPNVKDLQVELKRQYNDHHSKLRGLLPGRQWYEIQAYRALNQALGRCIRHRNDWGALILVDDRFRNNPSRYISGLSKWVRQQIQHHSTFESALESLAEFSKKHQKVLNVSIKDRTNIQDNESTLEVTSLKYSTPPYLLEAASHLSPENFVEDEAKICVQELQCPKIITKNSPLPSSIISRKEKNDPVFLEEAGKAEKIVISRSTSPTFNKQTKRVSWSSFNSLGQYFTGKIPKATPELGSSENSASSPPRFKTEKMESKTVLPFTDKCESSNLTVNTSFGSCPQSETIISSLKIDATLTRKNHSEHPLCSEEALDPDIELSLVSEEDKQSTSNRDFETEAEDESIYFTPELYDPEDTDEEKNDLAETDRGNRLANNSDCILAKDLFEIRTIKEVDSAREVKAEDCIDTKLNGILHIEESKIDDIDGNVKTTWINELELGKTHEIEIKNFKPSPSKNKGMFPGFK

SEQ ID NO: 14781 - protein, 841 aa, Homo sapiens
MSVDEKPDSPMYVYESTVHCTNILLGLNDQRKKDILCDVTLIVERKEFRAHRAVLAACSEYFWQALVGQTKNDLVVSLPEEVTARGFGPLLQFAYTAKLLLSRENIREVIRCAEFLRMHNLEDSCFSFLQTQLLNSEDGLFVCRKDAACQRPHEDCENSAGEEEDEEEETMDSETAKMACPRDQMLPEPISFEAAAIPVAEKEEALLPEPDVPTDTKESSEKDALTQYPRYKKYQLACTKNVYNASSHSTSGFASTFREDNSSNSLKPGLARGQIKSEPPSEENEEESITLCLSGDEPDAKDRAGDVEMDRKQPSPAPTPTAPAGAACLERSRSVASPSCLRSLFSITKSVELSGLPSTSQQHFARSPACPFDKGITQGDLKTDYTPFTGNYGQPHVGQKEVSNFTMGSPLRGPGLEALCKQEGELDRRSVIFSSSACDQVSTSVHSYSGVSSLDKDLSEPVPKGLWVGAGQSLPSSQAYSHGGLMADHLPGRMRPNTSCPVPIKVCPRSPPLETRTRTSSSCSSYSYAEDGSGGSPCSLPLCEFSSSPCSQGARFLATEHQEPGLMGDGMYNQVRPQIKCEQSYGTNSSDESGSFSEADSESCPVQDRGQEVKLPFPVDQITDLPRNDFQMMIKMHKLTSEQLEFIHDVRRRSKNRIAAQRCRKRKLDCIQNLECEIRKLVCEKEKLLSERNQLKACMGELLDNFSCLSQEVCRDIQSPEQIQALHRYCPVLRPMDLPTASSINPAPLGAEQNIAASQCAVGENVPCCLEPGAAPPGPPWAPSNTSENCTSGRRLEGTDPGTFSERGPPLEPRSQTVTVDFCQEMTDKCTTDEQPRKDYT

SEQ ID NO: 14782 - protein, 327 aa, Homo sapiens
MEGSNGFGIDSILSHRAGSPALPKGDPLLGDCRSPLELSPRSESSSDCSSPASPGRDCLETGTPRPGGASGPGLDSHLQPGQLSAPAQSRTVTSSFLIRDILADCKPLAACAPYSSSGQPAAPEPGGRLAAKAAEDFRDKLDKSGSNASSDSEYKVKEEGDREISSSRDSPPVRLKKPRKARTAFTDHQLAQLERSFERQKYLSVQDRMELAASLNLTDTQVKTWYQNRRTKWKRQTAVGLELLAEAGNYSALQRMFPSPYFYPQSLVSNLDPGAALYLYRGPSAPPPALQRPLVPRILIHGLQGASEPPPPLPPLAGVLPRAAQPR

SEQ ID NO: 14783 - protein, 387 aa, Homo sapiens
MTMEGASGSSFGIDTILSSASSGSPGMMNGDFRPLGEARTADFRSQATPSPCSEIDTVGTAPSSPISVTMEPPEPHLVADATQHHHHLHHSQQPPPPAAAPTQSLQPLPQQQQPLPPQQPPPPPPQQLGSAASAPRTSTSSFLIKDILGDSKPLAACAPYSTSVSSPHHTPKQESNAVHESFRPKLEQEDSKTKLDKREDSQSDIKCHGTKEEGDREITSSRESPPVRAKKPRKARTAFSDHQLNQLERSFERQKYLSVQDRMDLAAALNLTDTQVKTWYQNRRTKWKRQTAVGLELLAEAGNYSALQRMFPSPYFYHPSLLGSMDSTTAAAAAAAMYSSMYRTPPAPHPQLQRPLVPRVLIHGLGPGGQPALNPLSSPIPGTPHPR

SEQ ID NO: 14784 - protein, 254 aa, Homo sapiens
MQRPGEPGAARFGPPEGCADHRPHRYRSFMIEEILTEPPGPKGAAPAAAAAAAGELLKFGVQALLAARPFHSHLAVLKAEQAAVFKFPLAPLGCSGLSSALLAAGPGLPGAAGAPHLPLELQLRGKLEAAGPGEPGTKAKKGRRSRTVFTELQLMGLEKRFEKQKYLSTPDRIDLAESLGLSQLQVKTWYQNRRMKWKKIVLQGGGLESPTKPKGRPKKNSIPTSEQLTEQERAKDAEKPAEVPGEPSDRSRED

SEQ ID NO: 14785 - protein, 279 aa, Homo sapiens
MHCHAELRLSSPGQLKAARRRYKTFMIDEILSKETCDYFEKLSLYSVCPSLVVRPKPLHSCTGSPSLRAYPLLSVITRQPTVISHLVPATPGIAQALSCHQVTEAVSAEAPGGEALASSESETEQPTPRQKKPRRSRTIFTELQLMGLEKKFQKQKYLSTPDRLDLAQSLGLTQLQVKTWYQNRRMKWKKMVLKGGQEAPTKPKGRPKKNSIPTSEEIEAEEKMNSQAQGQEQLEPSQGQEELCEAQEPKARDVPLEMAEPPDPPQELPIPSSEPPPLS

SEQ ID NO: 14786 - protein, 125 aa, Homo sapiens
MPHSSDSSDSSFSRSPPPGKQDSSDDVRRVQRREKNRIAAQKSRQRQTQKADTLHLESEDLEKQNAALRKEIKQLTEELKYFTSVLNSHEPLCSVLAASTPSPPEVVYSAHAFHQPHVSSPRFQP

SEQ ID NO: 14787 - protein, 274 aa, Homo sapiens
MHLCGGNGLLTQTDPKEQQRQLKKQKNRAAAQRSRQKHTDKADALHQQHESLEKDNLALRKEIQSLQAELAWWSRTLHVHERLCPMDCASCSAPGLLGCWDQAEGLLGPGPQGQHGCREQLELFQTPGSCYPAQPLSPGPQPHDSPSLLQCPLPSLSLGPAVVAEPPVQLSPSPLLFASHTGSSLQGSSSKLSALQPSLTAQTAPPQPLELEHPTRGKLGSSPDNPSSALGLARLQSREHKPALSAATWQGLVVDPSPHPLLAFPLLSSAQVHF

SEQ ID NO: 14788 - protein, 127 aa, Homo sapiens
MSQGLPAAGSVLQRSVAAPGNQPQPQPQQQSPEDDDRKVRRREKNRVAAQRSRKKQTQKADKLHEEYESLEQENTMLRREIGKLTEELKHLTEALKEHEKMCPLLLCPMNFVPVPPRPDPVAGCLPR

SEQ ID NO: 14789 - protein, 941 aa, Homo sapiens
MKGSNRNKDHSAEGEGVGKRPKRKCLQWHPLLAKKLLDFSEEEEEEDEEEDIDKVQLLGADGLEQDVGETEDDESPEQRARRPMNAFLLFCKRHRSLVRQEHPRLDNRGATKILADWWAVLDPKEKQKYTDMAKEYKDAFMKANPGYKWCPTTNKPVKSPTPTVNPRKKLWAFPSDSSRDLPSPKKAKTEEMPQLNFGMADPTQMGGLSMLLLAGEHALGTPEVSSGTCRPDVSESPELRQKSPLFQFAEISSSTSHSDASTKQCQTSALFQFAEISSNTSQLGGAEPVKRCGKSALFQLAEMCLASEGMKMEESKLIKAKESDGGRIKELEKGKEEKEIKMEKTDETRLQKEAEFEKSAKENLRDSKELRNFEALQIDDIMAIKMEDPKEIRKEELEEDHKCSHFPDFSYSASSKIIISDVPSRKDHMCHPHGIMIIEDPAALNKPEKLKKKKKKSKMDRHGNDKSTPKKTCKKRQSSESDIESVIYTIEAVAKGDWGIEKLGDTPRKKVRTSSSGKGSILDAKPPKKKVKSREKKMSKEKSSDTTKESRPPDFISISASKNISGETPEGIKAEPLTPMEDALPPSLSGQAKPEDSDCHRKIETCGSRKSERSCKGALYKTLVSEGMLTSLRANVDRGKRSSGKGNSSDHEGCWNEESWTFSQSGTSGSKKFKKTKPKEDCLLGSAKLDEEFEKKFNSLPQYSPVTFDRKCVPVPRKKKKTGNVSSEPTKTSKGPFQSQKKNLFHKIVSKYKHKKEKPNVPEKGSGDKWSNKQLFLDAIHPTEAIFSEDRNTMEPVHKVKNIPSIFNTPEPTTTQEPLVGSQKRKARKTKITHLVRTADGRVSPAGGTLDDKPKEQLQRSLPKATETDCNDKCSHNTEVGETRSSTPEMPAVSAFFSLAALAEVAAMENVHRGQRSTPLTHDGQPKEMPQAPVLISCADQ

SEQ ID NO: 14790 - protein, 835 aa, Homo sapiens
MSRRKQGKPQHLSKREFSPEPLEAILTDDEPDHGPLGAPEGDHDLLTCGQCQMNFPLGDILIFIEHKRKQCNGSLCLEKAVDKPPSPSPIEMKKASNPVEVGIQVTPEDDDCLSTSSRGICPKQEHIADKLLHWRGLSSPRSAHGALIPTPGMSAEYAPQGICKDEPSSYTCTTCKQPFTSAWFLLQHAQNTHGLRIYLESEHGSPLTPRVGIPSGLGAECPSQPPLHGIHIADNNPFNLLRIPGSVSREASGLAEGRFPPTPPLFSPPPRHHLDPHRIERLGAEEMALATHHPSAFDRVLRLNPMAMEPPAMDFSRRLRELAGNTSSPPLSPGRPSPMQRLLQPFQPGSKPPFLATPPLPPLQSAPPPSQPPVKSKSCEFCGKTFKFQSNLVVHRRSHTGEKPYKCNLCDHACTQASKLKRHMKTHMHKSSPMTVKSDDGLSTASSPEPGTSDLVGSASSALKSVVAKFKSENDPNLIPENGDEEEEEDDEEEEEEEEEEEEELTESERVDYGFGLSLEAARHHENSSRGAVVGVGDESRALPDVMQGMVLSSMQHFSEAFHQVLGEKHKRGHLAEAEGHRDTCDEDSVAGESDRIDDGTVNGRGCSPGESASGGLSKKLLLGSPSSLSPFSKRIKLEKEFDLPPAAMPNTENVYSQWLAGYAASRQLKDPFLSFGDSRQSPFASSSEHSSENGSLRFSTPPGELDGGISGRSGTGSGGSTPHISGPGPGRPSSKEGRRSDTCEYCGKVFKNCSNLTVHRRSHTGERPYKCELCNYACAQSSKLTRHMKTHGQVGKDVYKCEICKMPFSVYSTLEKHMKKWHSDRVLNNDIKTE

SEQ ID NO: 14791 - protein, 894 aa, Homo sapiens
MSRRKQGNPQHLSQRELITPEADHVEAAILEEDEGLEIEEPSGLGLMVGGPDPDLLTCGQCQMNFPLGDILVFIEHKRKQCGGSLGACYDKALDKDSPPPSSRSELRKVSEPVEIGIQVTPDEDDHLLSPTKGICPKQENIAGPCRPAQLPAVAPIAASSHPHSSVITSPLRALGALPPCLPLPCCSARPVSGDGTQGEGQTEAPFGCQCQLSGKDEPSSYICTTCKQPFNSAWFLLQHAQNTHGFRIYLEPGPASSSLTPRLTIPPPLGPEAVAQSPLMNFLGDSNPFNLLRMTGPILRDHPGFGEGRLPGTPPLFSPPPRHHLDPHRLSAEEMGLVAQHPSAFDRVMRLNPMAIDSPAMDFSRRLRELAGNSSTPPPVSPGRGNPMHRLLNPFQPSPKSPFLSTPPLPPMPPGGTPPPQPPAKSKSCEFCGKTFKFQSNLIVHRRSHTGEKPYKCQLCDHACSQASKLKRHMKTHMHKAGSLAGRSDDGLSAASSPEPGTSELAGEGLKAADGDFRHHESDPSLGHEPEEEDEEEEEEEEELLLENESRPESSFSMDSELSRNRENGGGGVPGVPGAGGGAAKALADEKALVLGKVMENVGLGALPQYGELLADKQKRGAFLKRAAGGGDAGDDDDAGGCGDAGAGGAVNGRGGGFAPGTEPFPGLFPRKPAPLPSPGLNSAAKRIKVEKDLELPPAALIPSENVYSQWLVGYAASRHFMKDPFLGFTDARQSPFATSSEHSSENGSLRFSTPPGDLLDGGLSGRSGTASGGSTPHLGGPGPGRPSSKEGRRSDTCEYCGKVFKNCSNLTVHRRSHTGERPYKCELCNYACAQSSKLTRHMKTHGQIGKEVYRCDICQMPFSVYSTLEKHMKKWHGEHLLTNDVKIEQAERS

SEQ ID NO: 14792 - protein, 454 aa, Homo sapiens
MPRCPAGAMDEGPVDLRTRPKAAGLPGAALPLRKRPLRAPSPEPAAPRGAAGLVVPLDPLRGGCDLPAVPGPPHGLARPEALYYPGALLPLYPTRAMGSPFPLVNLPTPLYPMMCPMEHPLSADIAMATRADEDGDTPLHIAVVQGNLPAVHRLVNLFQQGGRELDIYNNLRQTPLHLAVITTLPSVVRLLVTAGASPMALDRHGQTAAHLACEHRSPTCLRALLDSAAPGTLDLEARNYDGLTALHVAVNTECQETVQLLLERGADIDAVDIKSGRSPLIHAVENNSLSMVQLLLQHGANVNAQMYSGSSALHSASGRGLLPLVRTLVRSGADSSLKNCHNDTPLMVARSRRVIDILRGKATRPASTSQPDPSPDRSANTSPESSSRLSSNGLLSASPSSSPSQSPPRDPPGFPMAPPNFFLPSPSPPAFLPFAGVLRGPGRPVPPSPAPGGS

SEQ ID NO: 14793 - protein, 706 aa, Homo sapiens
MASPADSCIQFTRHASDVLLNLNRLRSRDILTDVVIVVSREQFRAHKTVLMACSGLFYSIFTDQLKCNLSVINLDPEINPEGFCILLDFMYTSRLNLREGNIMAVMATAMYLQMEHVVDTCRKFIKASEAEMVSAIKPPREEFLNSRMLMPQDIMAYRGREVVENNLPLRSAPGCESRAFAPSLYSGLSTPPASYSMYSHLPVSSLLFSDEEFRDVRMPVANPFPKERALPCDSARPVPGEYSRPTLEVSPNVCHSNIYSPKETIPEEARSDMHYSVAEGLKPAAPSARNAPYFPCDKASKEEERPSSEDEIALHFEPPNAPLNRKGLVSPQSPQKSDCQPNSPTESCSSKNACILQASGSPPAKSPTDPKACNWKKYKFIVLNSLNQNAKPEGPEQAELGRLSPRAYTAPPACQPPMEPENLDLQSPTKLSASGEDSTIPQASRLNNIVNRSMTGSPRSSSESHSPLYMHPPKCTSCGSQSPQHAEMCLHTAGPTFPEEMGETQSEYSDSSCENGAFFCNECDCRFSEEASLKRHTLQTHSDKPYKCDRCQASFRYKGNLASHKTVHTGEKPYRCNICGAQFNRPANLKTHTRIHSGEKPYKCETCGARFVQVAHLRAHVLIHTGEKPYPCEICGTRFRHLQTLKSHLRIHTGEKPYHCEKCNLHFRHKSQLRLHLRQKHGAITNTKVQYRVSATDLPPELPKAC

SEQ ID NO: 14794 - protein, 479 aa, Homo sapiens
MGSPAAPEGALGYVREFTRHSSDVLGNLNELRLRGILTDVTLLVGGQPLRAHKAVLIACSGFFYSIFRGRAGVGVDVLSLPGGPEARGFAPLLDFMYTSRLRLSPATAPAVLAAATYLQMEHVVQACHRFIQASYEPLGISLRPLEAEPPTPPTAPPPGSPRRSEGHPDPPTESRSCSQGPPSPASPDPKACNWKKYKYIVLNSQASQAGSLVGERSSGQPCPQARLPSGDEASSSSSSSSSSSEEGPIPGPQSRLSPTAATVQFKCGAPASTPYLLTSQAQDTSGSPSERARPLPGSEFFSCQNCEAVAGCSSGLDSLVPGDEDKPYKCQLCRSSFRYKGNLASHRTVHTGEKPYHCSICGARFNRPANLKTHSRIHSGEKPYKCETCGSRFVQVAHLRAHVLIHTGEKPYPCPTCGTRFRHLQTLKSHVRIHTGEKPYHCDPCGLHFRHKSQLRLHLRQKHGAATNTKVHYHILGGP

SEQ ID NO: 14795 - protein, 920 aa, Homo sapiens
MGRSNSRSHSSRSKSRSQSSSRSRSRSHSRKKRYSSRSRSRTYSRSRSRDRMYSRDYRRDYRNNRGMRRPYGYRGRGRGYYQGGGGRYHRGGYRPVWNRRHSRSPRRGRSRSRSPKRRSVSSQRSRSRSRRSYRSSRSPRSSSSRSSSPYSKSPVSKRRGSQEKQTKKAEGEPQEESPLKSKSQEEPKDTFEHDPSESIDEFNKSSATSGDIWPGLSAYDNSPRSPHSPSPIATPPSQSSSCSDAPMLSTVHSAKNTPSQHSHSIQHSPERSGSGSVGNGSSRYSPSQNSPIHHIPSRRSPAKTIAPQNAPRDESRGRSSFYPDGGDQETAKTGKFLKRFTDEESRVFLLDRGNTRDKEASKEKGSEKGRAEGEWEDQEALDYFSDKESGKQKFNDSEGDDTEETEDYRQFRKSVLADQGKSFATASHRNTEEEGLKYKSKVSLKGNRESDGFREEKNYKLKETGYVVERPSTTKDKHKEEDKNSERITVKKETQSPEQVKSEKLKDLFDYSPPLHKNLDAREKSTFREESPLRIKMIASDSHRPEVKLKMAPVPLDDSNRPASLTKDRLLASTLVHSVKKEQEFRSIFDHIKLPQASKSTSESFIQHIVSLVHHVKEQYFKSAAMTLNERFTSYQKATEEHSTRQKSPEIHRRIDISPSTLRKHTRLAGEERVFKEENQKGDKKLRCDSADLRHDIDRRRKERSKERGDSKGSRESSGSRKQEKTPKDYKEYKSYKDDSKHKREQDHSRSSSSSASPSSPSSREEKESKKEREEEFKTHHEMKEYSGFAGVSRPRGTFFRIRGRGRARGVFAGTNTGPNNSNTTFQKRPKEEEWDPEYTPKSKKYFLHDDRDDGVDYWAKRGRGRGTFQRGRGRFNFKKSGSSPKWTHDKYQGDGIVEDEEETMENNEEKKDRRKEEKE

SEQ ID NO: 14796 - protein, 189 aa, Homo sapiens
MKTKNRPPRRRAPVQDTEATPGEGTPDGSLPNPGPEPAKGLRSRPARAAARAPGEGRRRRPGPSGPGGRRDSSIQRRLESNERERQRMHKLNNAFQALREVIPHVRADKKLSKIETLTLAKNYIKSLTATILTMSSSRLPGLEGPGPKLYQHYQQQQQVAGGALGATEAQPQGHLQRYSTQIHSFREGT

SEQ ID NO: 14797 - protein, 235 aa, Homo sapiens
MLRGAPGLGLTARKGAEDSAEDLGGPCPEPGGDSGVLGANGASCSRGEAEEPAGRRRARPVRSKARRMAANVRERKRILDYNEAFNALRRALRHDLGGKRLSKIATLRRAIHRIAALSLVLRASPAPRGPCGHLECHGPAARGDTGDTGASPPPPAGPSLARPDAARPSVPSAPRCASCPPHAPLARPSAVAEGPGLAQASGGSWRRCPGASSAGPPPWPRGYLRSAPGMGHPRS

SEQ ID NO: 14798 - protein, 547 aa, Homo sapiens
MAGTKNKTRAQAKTEKKAAIQAKAGAEREATGVVRPVAKTRAKAKAKTGSKTDAVAEMKAVSKNKVVAETKEGALSEPKTLGKAMGDFTPKAGNESTSSTCKNEAGTDAWFWAGEEATINSWFWNGEEAGNSFSTKNDKPEIGAQVCAEELEPAAGADCKPRSGAEEEEEENVIGNWFWEGDDTSFDPNPKPVSRIVKPQPVYEINEKNRPKDWSEVTIWPNAPAVTPAVLGFRSQAPSEASPPSYIVLASAEENACSLPVATACRPSRNTRSCSQPIPECRFDSDPCIQTIDEIRRQIRIREVNGIKPFACPCKMECYMDSEEFEKLVSLLKSTTDPLIHKIARIAMGVHNVHPFAQEFINEVGVVTLIESLLSFPSPEMRKKTVITLNPPSGDERQRKIELHVKHMCKETMSFPLNSPGQQSGLKILGQLTTDFVHHYIVANYFSELFHLLSSGNCKTRNLVLKLLLNMSENPTAARDMINMKALAALKLIFNQKEAKANLVSGVAIFINIKEHIRKGSIVVVDHLSYNTLMAIFREVKEIIETM

SEQ ID NO: 14799 - protein, 381 aa, Homo sapiens
MERGMHLGAAAAGEDDLFLHKSLSASTSKRLEAAFRSTPPGMDLSLAPPPRERPASSSSSPLGCFEPADPEGAGLLLPPPGGGGGGSAGSGGGGGGGVGVPGLLVGSAGVGGDPSLSSLPAGAALCLKYGESASRGSVAESSGGEQSPDDDSDGRCELVLRAGVADPRASPGAGGGGAKAAEGCSNAHLHGGASVPPGGLGGGGGGGSSSGSSGGGGGSGSGSGGSSSSSSSSSKKSKEQKALRLNINARERRRMHDLNDALDELRAVIPYAHSPSVRKLSKIATLLLAKNYILMQAQALEEMRRLVAYLNQGQAISAASLPSSAAAAAAAAALHPALGAYEQAAGYPFSAGLPPAASCPEKCALFNSVSSSLCKQCTEKP

SEQ ID NO: 14800 - protein, 225 aa, Homo sapiens
MAELKSLSGDAYLALSHGYAAAAAGLAYGAAREPEAARGYGTPGPGGDLPAAPAPRAPAQAAESSGEQSGDEDDAFEQRRRRRGPGSAADGRRRPREQRSLRLSINARERRRMHDLNDALDGLRAVIPYAHSPSVRKLSKIATLLLAKNYILMQAQALDEMRRLVAFLNQGQGLAAPVNAAPLTPFGQATVCPFSAGAALGPCPDKCAAFSGTPSALCKHCHEKP

SEQ ID NO: 14801 - protein, 412 aa, Homo sapiens
MERIPSAQPPPACLPKAPGLEHGDLPGMYPAHMYQVYKSRRGIKRSEDSKETYKLPHRLIEKKRRDRINECIAQLKDLLPEHLKLTTLGHLEKAVVLELTLKHVKALTNLIDQQQQKIIALQSGLQAGELSGRNVETGQEMFCSGFQTCAREVLQYLAKHENTRDLKSSQLVTHLHRVVSELLQGGTSRKPSDPAPKVMDFKEKPSSPAKGSEGPGKNCVPVIQRTFAHSSGEQSGSDTDTDSGYGGESEKGDLRSEQPCFKSDHGRRFTMGERIGAIKQESEEPPTKKNRMQLSDDEGHFTSSDLISSPFLGPHPHQPPFCLPFYLIPPSATAYLPMLEKCWYPTSVPVLYPGLNASAAALSSFMNPDKISAPLLMPQRLPSPLPAHPSVDSSVLLQALKPIPPLNLETKD

SEQ ID NO: 14802 - protein, 482 aa, Homo sapiens
MDEGIPHLQERQLLEHRDFIGLDYSSLYMCKPKRSMKRDDTKDTYKLPHRLIEKKRRDRINECIAQLKDLLPEHLKLTTLGHLEKAVVLELTLKHLKALTALTEQQHQKIIALQNGERSLKSPIQSDLDAFHSGFQTCAKEVLQYLSRFESWTPREPRCVQLINHLHAVATQFLPTPQLLTQQVPLSKGTGAPSAAGSAAAPCLERAGQKLEPLAYCVPVIQRTQPSAELAAENDTDTDSGYGGEAEARPDREKGKGAGASRVTIKQEPPGEDSPAPKRMKLDSRGGGSGGGPGGGAAAAAAALLGPDPAAAAALLRPDAALLSSLVAFGGGGGAPFPQPAAAAAPFCLPFCFLSPSAAAAYVQPFLDKSGLEKYLYPAAAAAPFPLLYPGIPAPAAAAAAAAAAAAAAAAFPCLSSVLSPPPEKAGAAAATLLPHEVAPLGAPHPQHPHGRTHLPFAGPREPGNPESSAQEDPSQPGKEAP

SEQ ID NO: 14803 - protein, 825 aa, Homo sapiens
MLDICLEKRVGTTLAAPKCNSSTVRFQGLAEGTKGTMKMDMEDADMTLWTEAEFEEKCTYIVNDHPWDSGADGGTSVQAEASLPRNLLFKYATNSEEVIGVMSKEYIPKGTRFGPLIGEIYTNDTVPKNANRKYFWRIYSRGELHHFIDGFNEEKSNWMRYVNPAHSPREQNLAACQNGMNIYFYTIKPIPANQELLVWYCRDFAERLHYPYPGELTMMNLTQTQSSLKQPSTEKNELCPKNVPKREYSVKEILKLDSNPSKGKDLYRSNISPLTSEKDLDDFRRRGSPEMPFYPRVVYPIRAPLPEDFLKASLAYGIERPTYITRSPIPSSTTPSPSARSSPDQSLKSSSPHSSPGNTVSPVGPGSQEHRDSYAYLNASYGTEGLGSYPGYAPLPHLPPAFIPSYNAHYPKFLLPPYGMNCNGLSAVSSMNGINNFGLFPRLCPVYSNLLGGGSLPHPMLNPTSLPSSLPSDGARRLLQPEHPREVLVPAPHSAFSFTGAAASMKDKACSPTSGSPTAGTAATAEHVVQPKATSAAMAAPSSDEAMNLIKNKRNMTGYKTLPYPLKKQNGKIKYECNVCAKTFGQLSNLKVHLRVHSGERPFKCQTCNKGFTQLAHLQKHYLVHTGEKPHECQVCHKRFSSTSNLKTHLRLHSGEKPYQCKVCPAKFTQFVHLKLHKRLHTRERPHKCSQCHKNYIHLCSLKVHLKGNCAAAPAPGLPLEDLTRINEEIEKFDISDNADRLEDVEDDISVISVVEKEILAVVRKEKEETGLKVSLQRNMGNGLLSSGCSLYESSDLPLMKLPPSNPLPLVPVKVKQETVEPMDP

SEQ ID NO: 14804 - protein, 396 aa, Homo sapiens; identical to SEQ ID NO: 1492

SEQ ID NO: 14805 - protein, 994 aa, Homo sapiens; identical to SEQ ID NO: 1514

SEQ ID NO: 14806 - protein, 1099 aa, Homo sapiens
MAHLGPTPPPHSLNYKSEDRLSEQDWPAYFKVPCCGVDTSQIESEEAEVDVRERETQRDREPKRARDLTLRDSCTDNSMQFGTRTTTAEPGFMGTWQNADTNLLFRMSQQAIRCTLVNCTCECFQPGKINLRTCDQCKHGWVAHALDKLSTQHLYHPTQVEIVQSNVVFDISSLMLYGTQAVPVRLKILLDRLFSVLKQEEVLHILHGLGWTLRDYVRGYILQDAAGKVLDRWAIMSREEEIITLQQFLRFGETKSIVELMAIQEKEGQAVAVPSSKTDSDIRTFIESNNRTRSPSLLAHLENSNPSSIHHFENIPNSLAFLLPFQYINPVSAPLLGLPPNGLLLEQPGLRLREPSLSTQNEYNESSESEVSPTPYKNDQTPNRNALTSITNVEPKTEPACVSPIQNSAPVSDLTKTEHPKSSFRIHRMRRMGSASRKGRVFCNACGKTFYDKGTLKIHYNAVHLKIKHRCTIEGCNMVFSSLRSRNRHSANPNPRLHMPMLRNNRDKDLIRATSGAATPVIASTKSNLALTSPGRPPMGFTTPPLDPVLQNPLPSQLVFSGLKTVQPVPPFYRSLLTPGEMVSPPTSLPTSPIIPTSGTIEQHPPPPSEPVVPAVMMATHEPSADLAPKKKPRKSSMPVKIEKEIIDTADEFDDEDDDPNDGGAVVNDMSHDNHCHSQEEMSPGMSVKDFSKHNRTRCISRTEIRRADSMTSEDQEPERDYENESESSEPKLGEESMEGDEHIHSEVSEKVLMNSERPDENHSEPSHQDVIKVKEEFTDPTYDMFYMSQYGLYNGGGASMAALHESFTSSLNYGSPQKFSPEGDLCSSPDPKICYVCKKSFKSSYSVKLHYRNVHLKEMHVCTVAGCNAAFPSRRSRDRHSANINLHRKLLTKELDDMGLDSSQPSLSKDLRDEFLVKIYGAQHPMGLDVREDASSPAGTEDSHLNGYGRGMAEDYMVLDLSTTSSLQSSSSIHSSRESDAGSDEGILLDDIDGASDSGESAHKAEAPALPGSLGAEVSGSLMFSSLSGSNGGIMCNICHKMYSNKGTLRVHYKTVHLREMHKCKVPGCNMMFSSVRSRNRHSQNPNLHKNIPFTSVD

SEQ ID NO: 14807 - protein, 137 aa, Homo sapiens; identical to SEQ ID NO: 1531

SEQ ID NO: 14808 - protein, 86 aa, Homo sapiens
MELSAEYLREKLQRDLEAEHVEVEDTTLNRCSCSFRVLVVSAKFEGKPLLQRHRLVNACLAEELPHIHAFEQKTLTPDQWARERQK

SEQ ID NO: 14809 - protein, 107 aa, Homo sapiens
MAAWSPAAAAPLLRGIRGLPLHHRMFATQTEGELRVTQILKEKFPRATAIKVTDISGGCGAMYEIKIESEEFKEKRTVQQHQMVNQALKEEIKEMHGLRIFTSVPKR

SEQ ID NO: 14810 - protein, 3046 aa, Homo sapiens
MRGRRGRPPKQPAAPAAERCAPAPPPPPPPPTSGPIGGLRSRHRGSSRGRWAAAQAEVAPKTRLSSPRGGSSSRRKPPPPPPAPPSTSAPGRGGRGGGGGRTGGGGGGGHLARTTAARRAVNKVVYDDHESEEEEEEEDMVSEEEEEEDGDAEETQDSEDDEEDEMEEDDDDSDYPEEMEDDDDDASYCTESSFRSHSTYSSTPGRRKPRVHRPRSPILEEKDIPPLEFPKSSEDLMVPNEHIMNVIAIYEVLRNFGTVLRLSPFRFEDFCAALVSQEQCTLMAEMHVVLLKAVLREEDTSNTTFGPADLKDSVNSTLYFIDGMTWPEVLRVYCESDKEYHHVLPYQEAEDYPYGPVENKIKVLQFLVDQFLTTNIAREELMSEGVIQYDDHCRVCHKLGDLLCCETCSAVYHLECVKPPLEEVPEDEWQCEVCVAHKVPGVTDCVAEIQKNKPYIRHEPIGYDRSRRKYWFLNRRLIIEEDTENENEKKIWYYSTKVQLAELIDCLDKDYWEAELCKILEEMREEIHRHMDITEDLTNKARGSNKSFLAAANEEILESIRAKKGDIDNVKSPEETEKDKNETENDSKDAEKNREEFEDQSLEKDSDDKTPDDDPEQGKSEEPTEVGDKGNSVSANLGDNTTNATSEETSPSEGRSPVGCLSETPDSSNMAEKKVASELPQDVPEEPNKTCESSNTSATTTSIQPNLENSNSSSELNSSQSESAKAADDPENGERESHTPVSIQEEIVGDFKSEKSNGELSESPGAGKGASGSTRIITRLRNPDSKLSQLKSQQVAAAAHEANKLFKEGKEVLVVNSQGEISRLSTKKEVIMKGNINNYFKLGQEGKYRVYHNQYSTNSFALNKHQHREDHDKRRHLAHKFCLTPAGEFKWNGSVHGSKVLTISTLRLTITQLENNIPSSFLHPNWASHRANWIKAVQMCSKPREFALALAILECAVKPVVMLPIWRESLGHTRLHRMTSIEREEKEKVKKKEKKQEEEETMQQATWVKYTFPVKHQVWKQKGEEYRVTGYGGWSWISKTHVYRFVPKLPGNTNVNYRKSLEGTKNNMDENMDESDKRKCSRSPKKIKIEPDSEKDEVKGSDAAKGADQNEMDISKITEKKDQDVKELLDSDSDKPCKEEPMEVDDDMKTESHVNCQESSQVDVVNVSEGFHLRTSYKKKTKSSKLDGLLERRIKQFTLEEKQRLEKIKLEGGIKGIGKTSTNSSKNLSESPVITKAKEGCQSDSMRQEQSPNANNDQPEDLIQGCSESDSSVLRMSDPSHTTNKLYPKDRVLDDVSIRSPETKCPKQNSIENDIEEKVSDLASRGQEPSKSKTKGNDFFIDDSKLASADDIGTLICKNKKPLIQEESDTIVSSSKSALHSSVPKSTNDRDATPLSRAMDFEGKLGCDSESNSTLENSSDTVSIQDSSEEDMIVQNSNESISEQFRTREQDVEVLEPLKCELVSGESTGNCEDRLPVKGTEANGKKPSQQKKLEERPVNKCSDQIKLKNTTDKKNNENRESEKKGQRTSTFQINGKDNKPKIYLKGECLKEISESRVVSGNVEPKVNNINKIIPENDIKSLTVKESAIRPFINGDVIMEDFNERNSSETKSHLLSSSDAEGNYRDSLETLPSTKESDSTQTTTPSASCPESNSVNQVEDMEIETSEVKKVTSSPITSEEESNLSNDFIDENGLPINKNENVNGESKRKTVITEVTTMTSTVATESKTVIKVEKGDKQTVVSSTENCAKSTVTTTTTTVTKLSTPSTGGSVDIISVKEQSKTVVTTTVTDSLTTTGGTLVTSMTVSKEYSTRDKVKLMKFSRPKKTRSGTALPSYRKFVTKSSKKSIFVLPNDDLKKLARKGGIREVPYFNYNAKPALDIWPYPSPRPTFGITWRYRLQTVKSLAGVSLMLRLLWASLRWDDMAAKAPPGGGTTRTETSETEITTTEIIKRRDVGPYGIRSEYCIRKIICPIGVPETPKETPTPQRKGLRSSALRPKRPETPKQTGPVIIETWVAEEELELWEIRAFAERVEKEKAQAVEQQAKKRLEQQKPTVIATSTTSPTSSTTSTISPAQKVMVAPISGSVTTGTKMVLTTKVGSPATVTFQQNKNFHQTFATWVKQGQSNSGVVQVQQKVLGIIPSSTGTSQQTFTSFQPRTATVTIRPNTSGSGGTTSNSQVITGPQIRPGMTVIRTPLQQSTLGKAIIRTPVMVQPGAPQQVMTQIIRGQPVSTAVSAPNTVSSTPGQKSLTSATSTSNIQSSASQPPRPQQGQVKLTMAQLTQLTQGHGGNQGLTVVIQGQGQTTGQLQLIPQGVTVLPGPGQQLMQAAMPNGTVQRFLFTPLATTATTASTTTTTVSTTAAGTGEQRQSKLSPQMQVHQDKTLPPAQSSSVGPAEAQPQTAQPSAQPQPQTQPQSPAQPEVQTQPEVQTQTTVSSHVPSEAQPTHAQSSKPQVAAQSQPQSNVQGQSPVRVQSPSQTRIRPSTPSQLSPGQQSQVQTTTSQPIPIQPHTSLQIPSQGQPQSQPQVQSSTQTLSSGQTLNQVTVSSPSRPQLQIQQPQPQVIAVPQLQQQVQVLSQIQSQVVAQIQAQQSGVPQQIKLQLPIQIQQSSAVQTHQIQNVVTVQAASVQEQLQRVQQLRDQQQKKKQQQIEIKREHTLQASNQSEIIQKQVVMKHNAVIEHLKQKKSMTPAEREENQRMIVCNQVMKYILDKIDKEEKQAAKKRKREESVEQKRSKQNATKLSALLFKHKEQLRAEILKKRALLDKDLQIEVQEELKRDLKIKKEKDLMQLAQATAVAAPCPPVTPAPPAPPAPPPSPPPPPAVQHTGLLSTPTLPAASQKRKREEEKDSSSKSKKKKMISTTSKETKKDTKLYCICKTPYDESKFYIGCDRCQNWYHGRCVGILQSEAELIDEYVCPQCQSTEDAMTVLTPLTEKDYEGLKRVLRSLQAHKMAWPFLEPVDPNDAPDYYGVIKEPMDLATMEERVQRRYYEKLTEFVADMTKIFDNCRYYNPSDSPFYQCAEVLESFFVQKLKGFKASRSHNNKLQSTAS

SEQ ID NO: 14811 - protein, 1863 aa, Homo sapiens
MDLSALRVEEVQNVINAMQKILECPICLELIKEPVSTKCDHIFCKFCMLKLLNQKKGPSQCPLCKNDITKRSLQESTRFSQLVEELLKIICAFQLDTGLEYANSYNFAKKENNSPEHLKDEVSIIQSMGYRNRAKRLLQSEPENPSLQETSLSVQLSNLGTVRTLRTKQRIQPQKTSVYIELGSDSSEDTVNKATYCSVGDQELLQITPQGTRDEISLDSAKKAACEFSETDVTNTEHHQPSNNDLNTTEKRAAERHPEKYQGSSVSNLHVEPCGTNTHASSLQHENSSLLLTKDRMNVEKAEFCNKSKQPGLARSQHNRWAGSKETCNDRRTPSTEKKVDLNADPLCERKEWNKQKLPCSENPRDTEDVPWITLNSSIQKVNEWFSRSDELLGSDDSHDGESESNAKVADVLDVLNEVDEYSGSSEKIDLLASDPHEALICKSERVHSKSVESNIEDKIFGKTYRKKASLPNLSHVTENLIIGAFVTEPQIIQERPLTNKLKRKRRPTSGLHPEDFIKKADLAVQKTPEMINQGTNQTEQNGQVMNITNSGHENKTKGDSIQNEKNPNPIESLEKESAFKTKAEPISSSISNMELELNIHNSKAPKKNRLRRKSSTRHIHALELVVSRNLSPPNCTELQIDSCSSSEEIKKKKYNQMPVRHSRNLQLMEGKEPATGAKKSNKPNEQTSKRHDSDTFPELKLTNAPGSFTKCSNTSELKEFVNPSLPREEKEEKLETVKVSNNAEDPKDLMLSGERVLQTERSVESSSISLVPGTDYGTQESISLLEVSTLGKAKTEPNKCVSQCAAFENPKGLIHGCSKDNRNDTEGFKYPLGHEVNHSRETSIEMEESELDAQYLQNTFKVSKRQSFAPFSNPGNAEEECATFSAHSGSLKKQSPKVTFECEQKEENQGKNESNIKPVQTVNITAGFPVVGQKDKPVDNAKCSIKGGSRFCLSSQFRGNETGLITPNKHGLLQNPYRIPPLFPIKSFVKTKCKKNLLEENFEEHSMSPEREMGNENIPSTVSTISRNNIRENVFKEASSSNINEVGSSTNEVGSSINEIGSSDENIQAELGRNRGPKLNAMLRLGVLQPEVYKQSLPGSNCKHPEIKKQEYEEVVQTVNTDFSPYLISDNLEQPMGSSHASQVCSETPDDLLDDGEIKEDTSFAENDIKESSAVFSKSVQKGELSRSPSPFTHTHLAQGYRRGAKKLESSEENLSSEDEELPCFQHLLFGKVNNIPSQSTRHSTVATECLSKNTEENLLSLKNSLNDCSNQVILAKASQEHHLSEETKCSASLFSSQCSELEDLTANTNTQDPFLIGSSKQMRHQSESQGVGLSDKELVSDDEERGTGLEENNQEEQSMDSNLGEAASGCESETSVSEDCSGLSSQSDILTTQQRDTMQHNLIKLQQEMAELEAVLEQHGSQPSNSYPSIISDSSALEDLRNPEQSTSEKAVLTSQKSSEYPISQNPEGLSADKFEVSADSSTSKNKEPGVERSSPSKCPSLDDRWYMHSCSGSLQNRNYPSQEELIKVVDVEEQQLEESGPHDLTETSYLPRQDLEGTPYLESGISLFSDDPESDPSEDRAPESARVGNIPSSTSALKVPQLKVAESAQSPAAAHTTDTAGYNAMEESVSREKPELTASTERVNKRMSMVVSGLTPEEFMLVYKFARKHHITLTNLITEETTHVVMKTDAEFVCERTLKYFLGIAGGKWVVSYFWVTQSIKERKMLNEHDFEVRGDVVNGRNHQGPKRARESQDRKIFRGLEICCYGPFTNMPTDQLEWMVQLCGASVVKELSSFTLGTGVHPIVVVQPDAWTEDNGFHAIGQMCEAPVVTREWVLDSVALYQCQELDTYLIPQIPHSHY

SEQ ID NO: 14812 - protein, 233 aa, Homo sapiens
MNLNFTSPLHPASSQRPTSFFIEDILLHKPKPLREVAPDHFASSLASRVPLLDYGYPLMPTPTLLAPHAHHPLHKGDHHHPYFLTTSGMPVPALFPHPQHAELPGKHCRRRKARTVFSDSQLSGLEKRFEIQRYLSTPERVELATALSLSETQVKTWFQNRRMKHKKQLRKSQDEPKAPDGPESPEGSPRGSEAATAAEARLSLPAGPFVLTEPEDEVDIGDEGELGSGPHVL

SEQ ID NO: 14813 - protein, 1177 aa, Homo sapiens
MDVYPPRRQGLPRARSPGGSSRGSPSVSCSRLRQVQSILTQSSKSRPDGILCILGIDSRYNEGCRELANYLLFGLYNQNTSDFEKTGFSEEVLDDVIILIKSDSVHLYCNPVNFRYLLPYVAHWRNLHFHCMTENEYEDEEAAEEFKITSFVDMVRDCSRIGIPYSSQGHLQIFDMFVVEKWPIVQAFALEGIGGDGFFTMKYELQDVSLNLWNVYSKMDPMSLESLLSDDLVAFEHQWTSFFANFDTEIPFLLELSESQAGEPFRSYFSHGMISSHITENSPNRQPFVLFGNHSTRENLNAGNFNFPSEGHLVRSTGPGGSFAKHMVAQCVSPKGPLACSRTYFFGATHVPYLGGDSKLPKKTEQIRLLSQIYAAVIEAVLAGIACYAKTSSLTKAKEVAEQTLGSGLDSFELIPFKAALRSKMTFHIHAVNNQGRIVPLDSEDSLSFVKTACMAVYDIPDLLGGNGCLGSVVFSESFLTSQILVKEKDGTVTTETSSVVLTAAVPRFCSWLVEDNEVKLSEKTQQAVRGDESFLGTYLTGGEGAYLYSSNLQSWPEEGNVHFFSSGLLFSHCRHRSIIISKDHMNSISFYDGDSTSTVAALLIDFKSSLLPHLPVHFHGSSNFLMIALFPKSKIYQAFYSEVFSLWKQQDNSGISLKVIQEDGLSVEQKRLHSSAQKLFSALSQPAGEKRSSLKLLSAKLPELDWFLQHFAISSISQEPVMRTHLPVLLQQAEINTTHRIESDKVIISIVTGLPGCHASELCAFLVTLHKECGRWMVYRQIMDSSECFHAAHFQRYLSSALEAQQNRSARQSAYIRKKTRLLVVLQGYTDVIDVVQALQTHPDSNVKASFTIGAITACVEPMSCYMEHRFLFPKCLDQCSQGLVSNVVFTSHTTEQRHPLLVQLQSLIRAANPAAAFILAENGIVTRNEDIELILSENSFSSPEMLRSRYLMYPGWYEGKLNAGSVYPLMVQICVWFGRPLEKTRFVAKCKAIQSSIKPSPFSGNIYHILGKVKFSDSERTMEVCYNTLANSLSIMPVLEGPTPPPDSKSVSQDSSGQQECYLVFIGCSLKEDSIKDWLRQSAKQKPQRKALKTRGMLTQQEIRSIHVKRHLEPLPAGYFYNGTQFVNFFGDKTDFHPLMDQFMNDYVEEANREIEKYNQELEQQEYHDLFELKP

SEQ ID NO: 14814 - protein, 1673 aa, Homo sapiens
MWRAEGKWLPKTSRKSVSQSVFCGTSTYCVLNTVPPIEDDHGNSNSSHVKIFLPKKLLECLPKCSSLPKERHRWNTNEEIAAYLITFEKHEEWLTTSPKTRPQNGSMILYNRKKVKYRKDGYCWKKRKDGKTTREDHMKLKVQGVECLYGCYVHSSIIPTFHRRCYWLLQNPDIVLVHYLNVPAIEDCGKPCGPILCSINTDKKEWAKWTKEELIGQLKPMFHGIKWTCSNGNSSSGFSVEQLVQQILDSHQTKPQPRTHNCLCTGSLGAGGSVHHKCNSAKHRIISPKVEPRTGGYGSHSEVQHNDVSEGKHEHSHSKGSSREKRNGKVAKPVLLHQSSTEVSSTNQVEVPDTTQSSPVSISSGLNSDPDMVDSPVVTGVSGMAVASVMGSLSQSATVFMSEVTNEAVYTMSPTAGPNHHLLSPDASQGLVLAVSSDGHKFAFPTTGSSESLSMLPTNVSEELVLSTTLDGGRKIPETTMNFDPDCFLNNPKQGQTYGGGGLKAEMVSSNIRHSPPGERSFSFTTVLTKEIKTEDTSFEQQMAKEAYSSSAAAVAASSLTLTAGSSLLPSGGGLSPSTTLEQMDFSAIDSNKDYTSSFSQTGHSPHIHQTPSPSFFLQDASKPLPVEQNTHSSLSDSGGTFVMPTVKTEASSQTSSCSGHVETRIESTSSLHLMQFQANFQAMTAEGEVTMETSQAAEGSEVLLKSGELQACSSEHYLQPETNGVIRSAGGVPILPGNVVQGLYPVAQPSLGNASNMELSLDHFDISFSNQFSDLINDFISVEGGSSTIYGHQLVSGDSTALSQSEDGARAPFTQAEMCLPCCSPQQGSLQLSSSEGGASTMAYMHVAEVVSAASAQGTLGMLQQSGRVFMVTDYSPEWSYPEGGVKVLITGPWQEASNNYSCLFDQISVPASLIQPGVLRCYCPAHDTGLVTLQVAFNNQIISNSVVFEYKARALPTLPSSQHDWLSLDDNQFRMSILERLEQMERRMAEMTGSQQHKQASGGGSSGGGSGSGNGGSQAQCASGTGALGSCFESRVVVVCEKMMSRACWAKSKHLIHSKTFRGMTLLHLAAAQGYATLIQTLIKWRTKHADSIDLELEVDPLNVDHFSCTPLMWACALGHLEAAVVLYKWDRRAISIPDSLGRLPLGIARSRGHVKLAECLEHLQRDEQAQLGQNPRIHCPASEEPSTESWMAQWHSEAISSPEIPKGVTVIASTNPELRRPRSEPSNYYSSESHKDYPAPKKHKLNPEYFQTRQEKLLPTALSLEEPNIRKQSPSSKQSVPETLSPSEGVRDFSRELSPPTPETAAFQASGSQPVGKWNSKDLYIGVSTVQVTGNPKGTSVGKEAAPSQVRPREPMSVLMMANREVVNTELGSYRDSAENEECGQPMDDIQVNMMTLAEHIIEATPDRIKQENFVPMESSGLERTDPATISSTMSWLASYLADADCLPSAAQIRSAYNEPLTPSSNTSLSPVGSPVSEIAFEKPNLPSAADWSEFLSASTSEKVENEFAQLTLSDHEQRELYEAARLVQTAFRKYKGRPLREQQEVAAAVIQRCYRKYKQYALYKKMTQAAILIQSKFRSYYEQKKFQQSRRAAVLIQKYYRSYKKCGKRRQARRTAVIVQQKLRSSLLTKKQDQAARKIMRFLRRCRHSPLVDHRLYKRSERIEKGQGT

SEQ ID NO: 14815 - protein, 1202 aa, Homo sapiens
MNTKDTTEVAENSHHLKIFLPKKLLECLPRCPLLPPERLRWNTNEEIASYLITFEKHDEWLSCAPKTRPQNGSIILYNRKKVKYRKDGYLWKKRKDGKTTREDHMKLKVQGMECLYGCYVHSSIVPTFHRRCYWLLQNPDIVLVHYLNVPALEDCGKGCSPIFCSISSDRREWLKWSREELLGQLKPMFHGIKWSCGNGTEEFSVEHLVQQILDTHPTKPAPRTHACLCSGGLGSGSLTHKCSSTKHRIISPKVEPRALTLTSIPHAHPPEPPPLIAPLPPELPKAHTSPSSSSSSSSSGFAEPLEIRPSPPTSRGGSSRGGTAILLLTGLEQRAGGLTPTRHLAPQADPRPSMSLAVVVGTEPSAPPAPPSPAFDPDRFLNSPQRGQTYGGGQGVSPDFPEAEAAHTPCSALEPAAALEPQAAARGPPPQSVAGGRRGNCFFIQDDDSGEELKGHGAAPPIPSPPPSPPPSPAPLEPSSRVGRGEALFGGPVGASELEPFSLSSFPDLMGELISDEAPSIPAPTPQLSPALSTITDFSPEWSYPEGGVKVLITGPWTEAAEHYSCVFDHIAVPASLVQPGVLRCYCPAHEVGLVSLQVAGREGPLSASVLFEYRARRFLSLPSTQLDWLSLDDNQFRMSILERLEQMEKRMAEIAAAGQVPCQGPDAPPVQDEGQGPGFEARVVVLVESMIPRSTWKGPERLAHGSPFRGMSLLHLAAAQGYARLIETLSQWRSVETGSLDLEQEVDPLNVDHFSCTPLMWACALGHLEAAVLLFRWNRQALSIPDSLGRLPLSVAHSRGHVRLARCLEELQRQEPSVEPPFALSPPSSSPDTGLSSVSSPSELSDGTFSVTSAYSSAPDGSPPPAPLPASEMTMEDMAPGQLSSGVPEAPLLLMDYEATNSKGPLSSLPALPPASDDGAAPEDADSPQAVDVIPVDMISLAKQIIEATPERIKREDFVGLPEAGASMRERTGAVGLSETMSWLASYLENVDHFPSSTPPSELPFERGRLAVPSAPSWAEFLSASTSGKMESDFALLTLSDHEQRELYEAARVIQTAFRKYKGRRLKEQQEVAAAVIQRCYRKYKQLTWIALKFALYKKMTQAAILIQSKFRSYYEQKRFQQSRRAAVLIQQHYRSYRRRPGPPHRTSATLPARNKGSFLTKKQDQAARKIMRFLRRCRHRMRELKQNQELEGLPQPGLAT

SEQ ID NO: 14816 - protein, 147 aa, Homo sapiens
MSSEPPPPPQPPTHQASVGLLDTPRSRERSPSPLRGNVVPSPLPTRRTRTFSATVRASQGPVYKGVCKCFCRSKGHGFITPADGGPDIFLHISDVEGEYVPVEGDEVTYKMCSIPPKNEKLQAVEVVITHLAPGTKHETWSGHVISS

SEQ ID NO: 14817 - protein, 1759 aa, Homo sapiens
MDLGTAEGTRCTDPPAGKPAMAPKRKGGLKLNAICAKLSRQVVVEKRADAGSHTEGSPSQPRDQERSGPESGAARAPRSEEDKRRAVIEKWVNGEYSEEPAPTPVLGRIAREGLELPPEGVYMVQPQGCSDEEDHAEEPSKDGGALEEKDSDGAASKEDSGPSTRQASGEASSLRDYAASTMTEFLGMFGYDDQNTRDELARKISFEKLHAGSTPEAATSSMLPTSEDTLSKRARFSKYEEYIRKLKAGEQLSWPAPSTKTEERVGKEVVGTLPGLRLPSSTAHLETKATILPLPSHSSVQMQNLVARASKYDFFIQKLKTGENLRPQNGSTYKKPSKYDLENVKYLHLFKPGEGSPDMGGAIAFKTGKVGRPSKYDVRGIQKPGPAKVPPTPSLAPAPLASVPSAPSAPGPGPEPPASLSFNTPEYLKSTFSKTDSITTGTVSTVKNGLPTDKPAVTEDVNIYQKYIARFSGSQHCGHIHCAYQYREHYHCLDPECNYQRFTSKQDVIRHYNMHKKRDNSLQHGFMRFSPLDDCSVYYHGCHLNGKSTHYHCMQVGCNKVYTSTSDVMTHENFHKKNTQLINDGFQRFRATEDCGTADCQFYGQKTTHFHCRRPGCTFTFKNKCDIEKHKSYHIKDDAYAKDGFKKFYKYEECKYEGCVYSKATNHFHCIRAGCGFTFTSTSQMTSHKRKHERRHIRSSGALGLPPSLLGAKDTEHEESSNDDLVDFSALSSKNSSLSASPTSQQSSASLAAATAATEAGPSATKPPNSKISGLLPQGLPGSIPLALALSNSGLPTPTPYFPILAGRGSTSLPVGTPSLLGAVSSGSAASATPDTPTLVASGAGDSAPVAAASVPAPPASIMERISASKGLISPMMARLAAAALKPSATFDPGSGQQVTPARFPPAQVKPEPGESTGAPGPHEASQDRSLDLTVKEPSNESNGHAVPANSSLLSSLMNKMSQGNPGLGSLLNIKAEAEGSPAAEPSPFLGKAVKALVQEKLAEPWKVYLRRFGTKDFCDGQCDFLHKAHFHCVVEECGALFSTLDGAIKHANFHFRTEGGAAKGNTEAAFPASAAETKPPMAPSSPPVPPVTTATVSSLEGPAPSPASVPSTPTLLAWKQLASTIPQMPQIPASVPHLPASPLATTSLENAKPQVKPGFLQFQENDPCLATDCKYANKFHFHCLFGNCKYVCKTSGKAESHCLDHINPNNNLVNVRDQFAYYSLQCLCPNQHCEFRMRGHYHCLRTGCYFVTNITTKLPWHIKKHEKAERRAANGFKYFTKREECGRLGCKYNQVNSHFHCIREGCQFSFLLKHQMTSHARKHMRRMLGKNFDRVPPSQGPPGLMDAETDECMDYTGCSPGAMSSESSTMDRSCSSTPVGNESTAAGNTISMPTASGAKKRFWIIEDMSPFGKRRKTASSRKMLDEGMMLEGFRRFDLYEDCKDAACQFSLKVTHYHCTRENCGYKFCGRTHMYKHAQHHDRVDNLVLDDFKRFKASLSCHFADCPFSGTSTHFHCLRCRFRCTDSTKVTAHRKHHGKQDVISAAGFCQFSSSADCAVPDCKYKLKCSHFHCTFPGCRHTVVGMSQMDSHKRKHEKQERGEPAAEGPAPGPPISLDGSLSLGAEPGSLLFLQSAAAGLGLALGDAGDPGPPDAAAPGPREGAAAAAAAAGESSQEDEEEELELPEEEAEDDEDEDDDEDDDDEDDDEDDDDEDLRTDSEESLPEAAAEAAGAGARTPALAALAALGAPGPAPTAASSP

SEQ ID NO: 14818 - protein, 182 aa, Homo sapiens
MPRVVPDQRSKFENEEFFRKLSRECEIKYTGFRDRPHEERQARFQNACRDGRSEIAFVATGTNLSLQFFPASWQGEQRQTPSREYVDLEREAGKVYLKAPMILNGVCVIWKGWIDLQRLDGMGCLEFDEERAQQEDALAQQAFEEARRRTREFEDRDRSHREEMEVRVSQLLAVTGKKTTRP

SEQ ID NO: 14819 - protein, 727 aa, Homo sapiens
MESEDTKKTQEMKTDLNLLLECLKYQMDNAFSQKEALVTIHSICQQNSNASVYFREIGGLMFVKNLAKSSEHSMVKEAALYTLGAIAEKNVYCQQTLCTSELFEDLTWFLSNDSNINLKRMSVYVILVLVSNNRTGQTLVRETGCITVLSRLFRTVISKHELDLSDKNVFQSYQLWSSVCSTLCVCVNNPQNDENQMFCCSLFPHANEWLKNCTTPEIIRPICSFIGLTLANNTYVQKYFVSVGGLDVLSQVLMQLESDSHETLSSAKLAVVVTKTVDACIADNPTFGIVLSKYHIVSKLLALLLHESLDSGEKFSIMLTLGHCTEDCEENQYDLFKNNGLPLMIQALTESQNEELNKAATFVLHNCKKITEKLSLSLGEYPFDENETQQLKDISVKENNLEEHWRKAKEILHRIEQLEREGNEEEIQRENYQDNISSMNISIQNTWKHLHADRIGRGSKAEDEDKSHSRQLQSYKSHGVMSKACTNDDQMKTPLKSANPVHACYRESEQNKTLYKAKSSCNQNLHEETTFEKNFVSQSSDHVFKHPVHIAKNIKQQLPVTDPFTLCSDIINKEVVSFLATPSCSEMLTYRCSGCIAVEKSLNSRNFSKLLHSCPYQCDRHKVIVEAEDRYKSELRKSLICNKKILLTPRRRQRLSNESTTPGGIKKRRIRKNFTEEEVNYLFNGVKKMGNHWNSILWSFPFQQGRKAVDLAHKYHKLTKHPTCAAS

SEQ ID NO: 14820 - protein, 802 aa, Homo sapiens
MPRIMIKGGVWRNTEDEILKAAVMKYGKNQWSRIASLLHRKSAKQCKARWYEWLDPSIKKTEWSREEEEKLLHLAKLMPTQWRTIAPIIGRTAAQCLEHYEFLLDKAAQRDNEEETTDDPRKLKPGEIDPNPETKPARPDPIDMDEDELEMLSEARARLANTQGKKAKRKAREKQLEEARRLAALQKRRELRAAGIEIQKKRKRKRGVDYNAEIPFEKKPALGFYDTSEENYQALDADFRKLRQQDLDGELRSEKEGRDRKKDKQHLKRKKESDLPSAILQTSGVSEFTKKRSKLVLPAPQISDAELQEVVKVGQASEIARQTAEESGITNSASSTLLSEYNVTNNSVALRTPRTPASQDRILQEAQNLMALTNVDTPLKGGLNTPLHESDFSGVTPQRQVVQTPNTVLSTPFRTPSNGAEGLTPRSGTTPKPVINSTPGRTPLRDKLNINPEDGMADYSDPSYVKQMERESREHLRLGLLGLPAPKNDFEIVLPENAEKELEEREIDDTYIEDAADVDARKQAIRDAERVKEMKRMHKAVQKDLPRPSEVNETILRPLNVEPPLTDLQKSEELIKKEMITMLHYDLLHHPYEPSGNKKGKTVGFGTNNSEHITYLEHNPYEKFSKEELKKAQDVLVQEMEVVKQGMSHGELSSEAYNQVWEECYSQVLYLPGQSRYTRANLASKKDRIESLEKRLEINRGHMTTEAKRAAKMEKKMKILLGGYQSRAMGLMKQLNDLWDQIEQAHLELRTFEELKKHEDSAIPRRLECLKEDVQRQQEREKELQHRYADLLLEKETLKSKF

SEQ ID NO: 14821 - protein, 265 aa, Homo sapiens
MYVGYVLDKDSPVYPGPARPASLGLGPQAYGPPAPPPAPPQYPDFSSYSHVEPAPAPPTAWGAPFPAPKDDWAAAYGPGPAAPAASPASLAFGPPPDFSPVPAPPGPGPGLLAQPLGGPGTPSSPGAQRPTPYEWMRRSVAAGGGGGSGKTRTKDKYRVVYTDHQRLELEKEFHYSRYITIRRKSELAANLGLTERQVKIWFQNRRAKERKVNKKKQQQQQPPQPPMAHDITATPAGPSLGGLCPSNTSLLATSSPMPVKEEFLP

SEQ ID NO: 14822 - protein, 313 aa, Homo sapiens
MYVSYLLDKDVSMYPSSVRHSGGLNLAPQNFVSPPQYPDYGGYHVAAAAAAAANLDSAQSPGPSWPAAYGAPLREDWNGYAPGGAAAAANAVAHGLNGGSPAAAMGYSSPADYHPHHHPHHHPHHPAAAPSCASGLLQTLNPGPPGPAATAAAEQLSPGGQRRNLCEWMRKPAQQSLGSQVKTRTKDKYRVVYTDHQRLELEKEFHYSRYITIRRKAELAATLGLSERQVKIWFQNRRAKERKINKKKLQQQQQQQPPQPPPPPPQPPQPQPGPLRSVPEPLSPVSSLQASVPGSVPGVLGPTGGVLNPTVTQ

SEQ ID NO: 14823 - protein, 284 aa, Homo sapiens
MYGSCLLEKEAGMYPGTLMSPGGDGTAGTGGTGGGGSPMPASNFAAAPAFSHYMGYPHMPSMDPHWPSLGVWGSPYSPPREDWSVYPGPSSTMGTVPVNDVTSSPAAFCSTDYSNLGPVGGGTSGSSLPGQAGGSLVPTDAGAAKASSPSRSRHSPYAWMRKTVQVTGKTRTKEKYRVVYTDHQRLELEKEFHCNRYITIQRKSELAVNLGLSERQVKIWFQNRRAKERKMIKKKISQFENSGGSVQSDSDSISPGELPNTFFTTPSAVRGFQPIEIQQVIVSE

SEQ ID NO: 14824 - protein, 358 aa, Homo sapiens
MESADFYEAEPRPPMSSHLQSPPHAPSSAAFGFPRGAGPAQPPAPPAAPEPLGGICEHETSIDISAYIDPAAFNDEFLADLFQHSRQQEKAKAAVGPTGGGGGGDFDYPGAPAGPGGAVMPGGAHGPPPGYGCAAAGYLDGRLEPLYERVGAPALRPLVIKQEPREEDEAKQLALAGLFPYQPPPPPPPSHPHPHPPPAHLAAPHLQFQIAHCGQTTMHLQPGHPTPPPTPVPSPHPAPALGAAGLPGPGSALKGLGAAHPDLRASGGSGAGKAKKSVDKNSNEYRVRRERNNIAVRKSRDKAKQRNVETQQKVLELTSDNDRLRKRVEQLSRELDTLRGIFRQLPESSLVKAMGNCA

SEQ ID NO: 14825 - protein, 345 aa, Homo sapiens
MQRLVAWDPACLPLPPPPPAFKSMEVANFYYEADCLAAAYGGKAAPAAPPAARPGPRPPAGELGSIGDHERAIDFSPYLEPLGAPQAPAPATATDTFEAAPPAPAPAPASSGQHHDFLSDLFSDDYGGKNCKKPAEYGYVSLGRLGAAKGALHPGCFAPLHPPPPPPPPPAELKAEPGFEPADCKRKEEAGAPGGGAGMAAGFPYALRAYLGYQAVPSGSSGSLSTSSSSSPPGTPSPADAKAPPTACYAGAAPAPSQVKSKAKKTVDKHSDEYKIRRERNNIAVRKSRDKAKMRNLETQHKVLELTAENERLQKKVEQLSRELSTLRNLFKQLPEPLLASSGHC

SEQ ID NO: 14826 - protein, 269 aa, Homo sapiens
MSAALFSLDGPARGAPWPAEPAPFYEPGRAGKPGRGAEPGALGEPGAAAPAMYDDESAIDFSAYIDSMAAVPTLELCHDELFADLFNSNHKAGGAGPLELLPGGPARPLGPGPAAPRLLKREPDWGDGDAPGSLLPAQVAACAQTVVSLAAAGQPTPPTSPEPPRSSPRQTPAPGPAREKSAGKRGPDRGSPEYRQRRERNNIAVRKSRDKAKRRNQEMQQKLVELSAENEKLHQRVEQLTRDLAGLRQFFKQLPSPPFLPAAGTADCR

SEQ ID NO: 14827 - protein, 281 aa, Homo sapiens
MSHGTYYECEPRGGQQPLEFSGGRAGPGELGDMCEHEASIDLSAYIESGEEQLLSDLFAVKPAPEARGLKGPGTPAFPHYLPPDPRPFAYPPHTFGPDRKALGPGIYSSPGSYDPRAVAVKEEPRGPEGSRAASRGSYNPLQYQVAHCGQTAMHLPPTLAAPGQPLRVLKAPLATAAPPCSPLLKAPSPAGPLHKGKKAVNKDSLEYRLRRERNNIAVRKSRDKAKRRILETQQKVLEYMAENERLRSRVEQLTQELDTLRNLFRQIPEAANLIKGVGGCS

SEQ ID NO: 14828 - protein, 150 aa, Homo sapiens
MSKISQQNSTPGVNGISVIHTQAHASGLQQVPQLVPAGPGGGGKAVAPSKQSKKSSPMDRNSDEYRQRRERNNMAVKKSRLKSKQKAQDTLQRVNQLKEENERLEAKIKLLTKELSVLKDLFLEHAHNLADNVQSISTENTTADGDNAGQ

SEQ ID NO: 14829 - protein, 1054 aa, Homo sapiens
MAAVKEPLEFHAKRPWRPEEAVEDPDEEDEDNTSEAENGFSLEEVLRLGGTKQDYLMLATLDENEEVIDGGKKGAIDDLQQGELEAFIQNLNLAKYTKASLVEEDEPAEKENSSKKEVKIPKINNKNTAESQRTSVNKVKNKNRPEPHSDENGSTTPKVKKDKQNIFEFFERQTLLLRPGGKWYDLEYSNEYSLKPQPQDVVSKYKTLAQKLYQHEINLFKSKTNSQKGASSTWMKAIVSSGTLGDRMAAMILLIQDDAVHTLQFVETLVNLVKKKGSKQQCLMALDTFKELLITDLLPDNRKLRIFSQRPFDKLEQLSSGNKDSRDRRLILWYFEHQLKHLVAEFVQVLETLSHDTLVTTKTRALTVAHELLCNKPEEEKALLVQVVNKLGDPQNRIATKASHLLETLLCKHPNMKGVVSGEVERLLFRSNISSKAQYYAICFLNQMALSHEESELANKLITVYFCFFRTCVKKKDVESKMLSALLTGVNRAYPYSQTGDDKVREQIDTLFKVLHIVNFNTSVQALMLLFQVMNSQQTISDRYYTALYRKMLDPGLMTCSKQAMFLNLVYKSLKADIVLRRVKAFVKRLLQVTCQQMPPFICGALYLVSEILKAKPGLRSQLDDHPESDDEENFIDANDDEDMEKFTDADKETEIVKKLETEETVPETDVETKKPEVASWVHFDNLKGGKQLNKYDPFSRNPLFCGAENTSLWELKKLSVHFHPSVALFAKTILQGNYIQYSGDPLQDFTLMRFLDRFVYRNPKPHKGKENTDSVVMQPKRKHFIKDIRHLPVNSKEFLAKEESQIPVDEVFFHRYYKKVAVKEKQKRDADEESIEDVDDEEFEELIDTFEDDNCFSSGKDDMDFAGNVKKRTKGAKDNTLDEDSEGSDDELGNLDDDEVSLGSMDDEEFAEVDEDGGTFMDVLDDESESVPELEVHSKVSTKKSKRKGTDDFDFAGSFQGPRKKKRNLNDSSLFVSAEEFGHLLDENMGSKFDNIGMNAMANKDNASLKQLRWEAERDDWLHNRDAKSIIKKKKHFKKKRIKTTQKTKKQRK

SEQ ID NO: 14830 - protein, 561 aa, Homo sapiens
MADHNPDSDSTPRTLLRRVLDTADPRTPRRPRSARAGARRALLETASPRKLSGQTRTIARGRSHGARSVGRSAHIQASGHLEEQTPRTLLKNILLTAPESSILMPESVVKPVPAPQAVQPSRQESSCGSLELQLPELEPPTTLAPGLLAPGRRKQRLRLSVFQQGVDQGLSLSQEPQGNADASSLTRSLNLTFATPLQPQSVQRPGLARRPPARRAVDVGAFLRDLRDTSLAPPNIVLEDTQPFSQPMVGSPNVYHSLPCTPHTGAEDAEQAAGRKTQSSGPGLQKNSPGKPAQFLAGEAEEVNAFALGFLSTSSGVSGEDEVEPLHDGVEEAEKKMEEEGVSVSEMEATGAQGPSRVEEAEGHTEVTEAEGSQGTAEADGPGASSGDEDASGRAASPESASSTPESLQARRHHQFLEPAPAPGAAVLSSEPAEPLLVRHPPRPRTTGPRPRQDPHKAGLSHYVKLFSFYAKMPMERKALEMVEKCLDKYFQHLCDDLEVFAAHAGRKTVKPEDLELLMRRQGLVTDQVSLHVLVERHLPLEYRQLLIPCAYSGNSVFPAQ

SEQ ID NO: 14831 - protein, 383 aa, Homo sapiens
MFWTFKEWFWLERFWLPPTIKWSDLEDHDGLVFVKPSHLYVTIPYAFLLLIIRRVFEKFVASPLAKSFGIKETVRKVTPNTVLENFFKHSTRQPLQTDIYGLAKKCNLTERQVERWFRSRRNQERPSRLKKFQEACWRFAFYLMITVAGIAFLYDKPWLYDLWEVWNGYPKQPLLPSQYWYYILEMSFYWSLLFRLGFDVKRKDFLAHIIHHLAAISLMSFSWCANYIRSGTLVMIVHDVADIWLESAKMFSYAGWTQTCNTLFFIFSTIFFISRLIVFPFWILYCTLILPMYHLEPFFSYIFLNLQLMILQVLHLYWGYYILKMLNRCIFMKSIQDVRSDDEDYEEEEEEEEEEATKGKEMDCLKNGLRAERHLIPNGQHGH

SEQ ID NO: 14832 - protein, 384 aa, Homo sapiens
MAGILAWFWNERFWLPHNVTWADLKNTEEATFPQAEDLYLAFPLAFCIFMVRLIFERFVAKPCAIALNIQANGPQIAPPNAILEKVFTAITKHPDEKRLEGLSKQLDWDVRSIQRWFRQRRNQEKPSTLTRFCESMWRFSFYLYVFTYGVRFLKKTPWLWNTRHCWYNYPYQPLTTDLHYYYILELSFYWSLMFSQFTDIKRKDFGIMFLHHLVSIFLITFSYVNNMARVGTLVLCLHDSADALLEAAKMANYAKFQKMCDLLFVMFAVVFITTRLGIFPLWVLNTTLFESWEIVGPYPSWWVFNLLLLLVQGLNCFWSYLIVKIACKAVSRGKVSKDDRSDIESSSDEEDSEPPGKNPHTATTTNGTSGTNGYLLTGSCSMDD

SEQ ID NO: 14833 - protein, 812 aa, Homo sapiens
MEAFQELRKPSARLECDHCSFRGTDYENVQIHMGTIHPEFCDEMDAGGLGKMIFYQKSAKLFHCHKCFFTSKMYSNVYYHITSKHASPDKWNDKPKNQLNKETDPVKSPPLPEHQKIPCNSAEPKSIPALSMETQKLGSVLSPESPKPTPLTPLEPQKPGSVVSPELQTPLPSPEPSKPASVSSPEPPKSVPVCESQKLAPVPSPEPQKPAPVSPESVKATLSNPKPQKQSHFPETLGPPSASSPESPVLAASPEPWGPSPAASPESRKSARTTSPEPRKPSPSESPEPWKPFPAVSPEPRRPAPAVSPGSWKPGPPGSPRPWKSNPSASSGPWKPAKPAPSVSPGPWKPIPSVSPGPWKPTPSVSSASWKSSSVSPSSWKSPPASPESWKSGPPELRKTAPTLSPEHWKAVPPVSPELRKPGPPLSPEIRSPAGSPELRKPSGSPDLWKLSPDQRKTSPASLDFPESQKSSRGGSPDLWKSSFFIEPQKPVFPETRKPGPSGPSESPKAASDIWKPVLSIDTEPRKPALFPEPAKTAPPASPEARKRALFPEPRKHALFPELPKSALFSESQKAVELGDELQIDAIDDQKCDILVQEELLASPKKLLEDTLFPSSKKLKKDNQESSDAELSSSEYIKTDLDAMDIKGQESSSDQEQVDVESIDFSKENKMDMTSPEQSRNVLQFTEEKEAFISEEEIAKYMKRGKGKYYCKICCCRAMKKGAVLHHLVNKHNVHSPYKCTICGKAFLLESLLKNHVAAHGQSLLKCPRCNFESNFPRGFKKHLTHCQSRHNEEANKKLMEALEPPLEEQQI

SEQ ID NO: 14834 - protein, 1608 aa, Homo sapiens
MYSAHRPLMPASSAASRGLGMFVWTNVEPRSVAVFPWHSLVPFLAPSQPDPSVQPSEAQQPASHPVASNQSKEPAESAAVAHERPPGGTGSADPERPPGATCPESPGPGPPHPLGVVESGKGPPPTTEEEASGPPGEPRLDSETESDHDDAFLSIMSPEIQLPLPPGKRRTQSLSALPKERDSSSEKDGRSPNKREKDHIRRPMNAFMIFSKRHRALVHQRHPNQDNRTVSKILGEWWYALGPKEKQKYHDLAFQVKEAHFKAHPDWKWCNKDRKKSSSEAKPTSLGLAGGHKETRERSMSETGTAAAPGVSSELLSVAAQTLLSSDTKAPGSSSCGAERLHTVGGPGSARPRAFSHSGVHSLDGGEVDSQALQELTQMVSGPASYSGPKPSTQYGAPGPFAAPGEGGALAATGRPPLLPTRASRSQRAASEDMTSDEERMVICEEEGDDDVIADDGFGTTDIDLKCKERVTDSESGDSSGEDPEGNKGFGRKVFSPVIRSSFTHCRPPLDPEPPGPPDPPVAFGKGYGSAPSSSASSPASSSASAATSFSLGSGTFKAQESGQGSTAGPLRPPPPGAGGPATPSKATRFLPMDPATFRRKRPESVGGLEPPGPSVIAAPPSGGGNILQTLVLPPNKEEQEGGGARVPSAPAPSLAYGAPAAPLSRPAATMVTNVVRPVSSTPVPIASKPFPTSGRAEASPNDTAGARTEMGTGSRVPGGSPLGVSLVYSDKKSAAATSPAPHLVAGPLLGTVGKAPATVTNLLVGTPGYGAPAPPAVQFIAQGAPGGGTTAGSGAGAGSGPNGPVPLGILQPGALGKAGGITQVQYILPTLPQQLQVAPAPAPAPGTKAAAPSGPAPTTSIRFTLPPGTSTNGKVLAATAPTPGIPILQSVPSAPPPKAQSVSPVQAPPPGGSAQLLPGKVLVPLAAPSMSVRGGGAGQPLPLVSPPFSVPVQNGAQPPSKIIQLTPVPVSTPSGLVPPLSPATLPGPTSQPQKVLLPSSTRITYVQSAGGHALPLGTSPASSQAGTVTSYGPTSSVALGFTSLGPSGPAFVQPLLSAGQAPLLAPGQVGVSPVPSPQLPPACAAPGGPVITAFYSGSPAPTSSAPLAQPSQAPPSLVYTVATSTTPPAATILPKGPPAPATATPAPTSPFPSATAGSMTYSLVAPKAQRPSPKAPQKVKAAIASIPVGSFEAGASGRPGPAPRQPLEPGPVREPTAPESELEGQPTPPAPPPLPETWTPTARSSPPLPPPAEERTSAKGPETMASKFPSSSSDWRVPGQGLENRGEPPTPPSPAPAPAVAPGGSSESSSGRAAGDTPERKEAAGTGKKVKVRPPPLKKTFDSVDNRVLSEVDFEERFAELPEFRPEEVLPSPTLQSLATSPRAILGSYRKKRKNSTDLDSAPEDPTSPKRKMRRRSSCSSEPNTPKSAKCEGDIFTFDRTGTEAEDVLGELEYDKVPYSSLRRTLDQRRALVMQLFQDHGFFPSAQATAAFQARYADIFPSKVCLQLKIREVRQKIMQAATPTEQPPGAEAPLPVPPPTGTAAAPAPTPSPAGGPDPTSPSSDSGTAQAAPPLPPPPESGPGQPGWEGAPQPSPPPPGPSTAATGR

SEQ ID NO: 14835 - protein, 898 aa, Homo sapiens
MFSQQQQQQLQQQQQQLQQLQQQQLQQQQLQQQQLLQLQQLLQQSPPQAPLPMAVSRGLPPQQPQQPLLNLQGTNSASLLNGSMLQRALLLQQLQGLDQFAMPPATYDTAGLTMPTATLGNLRGYGMASPGLAAPSLTPPQLATPNLQQFFPQATRQSLLGPPPVGVPMNPSQFNLSGRNPQKQARTSSSTTPNRKDSSSQTMPVEDKSDPPEGSEEAAEPRMDTPEDQDLPPCPEDIAKEKRTPAPEPEPCEASELPAKRLRSSEEPTEKEPPGQLQVKAQPQARMTVPKQTQTPDLLPEALEAQVLPRFQPRVLQVQAQVQSQTQPRIPSTDTQVQPKLQKQAQTQTSPEHLVLQQKQVQPQLQQEAEPQKQVQPQVQPQAHSQGPRQVQLQQEAEPLKQVQPQVQPQAHSQPPRQVQLQLQKQVQTQTYPQVHTQAQPSVQPQEHPPAQVSVQPPEQTHEQPHTQPQVSLLAPEQTPVVVHVCGLEMPPDAVEAGGGMEKTLPEPVGTQVSMEEIQNESACGLDVGECENRAREMPGVWGAGGSLKVTILQSSDSRAFSTVPLTPVPRPSDSVSSTPAATSTPSKQALQFFCYICKASCSSQQEFQDHMSEPQHQQRLGEIQHMSQACLLSLLPVPRDVLETEDEEPPPRRWCNTCQLYYMGDLIQHRRTQDHKIAKQSLRPFCTVCNRYFKTPRKFVEHVKSQGHKDKAKELKSLEKEIAGQDEDHFITVDAVGCFEGDEEEEEDDEDEEEIEVEEELCKQVRSRDISREEWKGSETYSPNTAYGVDFLVPVMGYICRICHKFYHSNSGAQLSHCKSLGHFENLQKYKAAKNPSPTTRPVSRRCAINARNALTALFTSSGRPPSQPNTQDKTPSKVTARPSQPPLPRRSTRLKT

SEQ ID NO: 14836 - protein, 846 aa, Homo sapiens
MLFTVSCSKMSSIVDRDDSSIFDGLVEEDDKDKAKRVSRNKSEKKRRDQFNVLIKELGSMLPGNARKMDKSTVLQKSIDFLRKHKEITAQSDASEIRQDWKPTFLSNEEFTQLMLEALDGFFLAIMTDGSIIYVSESVTSLLEHLPSDLVDQSIFNFIPEGEHSEVYKILSTHLLESDSLTPEYLKSKNQLEFCCHMLRGTIDPKEPSTYEYVKFIGNFKSLNSVSSSAHNGFEGTIQRTHRPSYEDRVCFVATVRLATPQFIKEMCTVEEPNEEFTSRHSLEWKFLFLDHRAPPIIGYLPFEVLGTSGYDYYHVDDLENLAKCHEHLMQYGKGKSCYYRFLTKGQQWIWLQTHYYITYHQWNSRPEFIVCTHTVVSYAEVRAERRRELGIEESLPETAADKSQDSGSDNRINTVSLKEALERFDHSPTPSASSRSSRKSSHTAVSDPSSTPTKIPTDTSTPPRQHLPAHEKMVQRRSSFSSQSINSQSVGSSLTQPVMSQATNLPIPQGMSQFQFSAQLGAMQHLKDQLEQRTRMIEANIHRQQEELRKIQEQLQMVHGQGLQMFLQQSNPGLNFGSVQLSSGNSSNIQQLAPINMQGQVVPTNQIQSGMNTGHIGTTQHMIQQQTLQSTSTQSQQNVLSGHSQQTSLPSQTQSTLTAPLYNTMVISQPAAGSMVQIPSSMPQNSTQSAAVTTFTQDRQIRFSQGQQLVTKLVTAPVACGAVMVPSTMLMGQVVTAYPTFATQQQQSQTLSVTQQQQQQSSQEQQLTSVQQPSQAQLTQPPQQFLQTSRLLHGNPSTQLILSAAFPLQQSTFPQSHHQQHQSQQQQQLSRHRTDSLPDPSKVQPQ

SEQ ID NO: 14837 - protein, 575 aa, Homo sapiens
MSRSPDAKEDPVECPLCMEPLEIDDINFFPCTCGYQICRFCWHRIRTDENGLCPACRKPYPEDPAVYKPLSQEELQRIKNEKKQKQNERKQKISENRKHLASVRVVQKNLVFVVGLSQRLADPEVLKRPEYFGKFGKIHKVVINNSTSYAGSQGPSASAYVTYIRSEDALRAIQCVNNVVVDGRTLKASLGTTKYCSYFLKNMQCPKPDCMYLHELGDEAASFTKEEMQAGKHQEYEQKLLQELYKLNPNFLQLSTGSVDKNKNKVTPLQRYDTPIDKPSDSLSIGNGDNSQQISNSDTPSPPPGLSKSNPVIPISSSNHSARSPFEGAVTESQSLFSDNFRHPNPIPSGLPPFPSSPQTSSDWPTAPEPQSLFTSETIPVSSSTDWQAAFGFGSSKQPEDDLGFDPFDVTRKALADLIEKELSVQDQPSLSPTSLQNSSSHTTTAKGPGSGFLHPAAATNANSLNSTFSVLPQRFPQFQQHRAVYNSFSFPGQAARYPWMAFPRNSIMHLNHTANPTSNSNFLDLNLPPQHNTGLGGIPVAGEEEVKVSTMPLSTSSHSLQQGQQPTSLHTTVA

SEQ ID NO: 14838 - protein, 301 aa, Homo sapiens
MSYPTKEGSDTAGNAHKNSENEPPNDCSTDIESPSADPNMIYQVETNPINREPGTATSQEDVVPQAAENSELETEIQKDQREEDLKEELLLLQTPIPRKLVSHKPLNDRSRSHSGKVEMKANNFPINHKTRFRLSTSWRVPFINSHEIRSMILHLLCDRYFSQAAGCQNTMWVKRKYIACLYHPNSFTHHERAITFRRPSRVHYYRPLTERMTSGKFCKSTDTKGKCRFRAIVRSVLFVSQIQIESIFNIKGFVDILTYIHTMNVMITNTNNGWKYFCPICGRLFNTYSELRQHSCSSSGN

SEQ ID NO: 14839 - protein, 1269 aa, Homo sapiens
MTVKLGDGGSGEDGLKKLGKRAADEESLEGEGAGGADAAEESSGTKRDEKTPRAGADGPPAPPGAPQAPSPPQGSPQDQHHFLRSSVRPQSKRPRKDPPSAVGSGNAGGSGPRGKGAEGGGSSSGNVSGVAPAAPAGGSRSSSRNLGSSGGEKEEGKKVRRQWESWSTEDKNTFFEGLYEHGKDFEAIQNNIALKYKKKGKPASMVKNKEQVRHFYYRTWHKITKYIDFDHVFSRGLKKSSQELYGLICYGELRKKIGGCMDDKNATKLNELIQVGATTVRYKGRNLRIKAPMCRALKKLCDPDGLSDEEDQKPVRLPLKVPIELQPRNNHAWARVQSLAQNPRLRMIVELHRKVSSLIEFLKQKWALHEVRVRKTLEERQLQDSCSAPMQEKVTLHLFPGENCTLTPLPGVARVVHSKAFCTVHWQEGGRCKQSAKDAHVLPPAQILGIQSGQGTARGQVKCPRSGAEGKGVGRPPPAADALQSSGESSPESAPGEGAALSLSSPDAPDRPPPRHQDTGPCLEKTPAEGRDSPTREPGALPCACGQLPDLEDELSLLDPLPRYLKSCQDLIVPEQCRCADTRPGSEQPPLGGAASPEVLAPVSKEAADLAPTGPSPRPGPGLLLDVCTKDLADAPAEELQEKGSPAGPPPSQGQPAARPPKEVPASRLAQQLREEGWNLQTSESLTLAEVYLMMGKPSKLQLEYDWLGPGRQDPRPGSLPTALHKQRLLSCLLKLISTEVNPKLALEANTISTASVRPAQEEQSMTPPGKVVTVSSRSPRCPRNQASLRSSKTFPPSSAPCSSGLRNPPRPLLVPGPSSTGSNDSDGGLFAVPTTLPPNSRHGKLFSPSKEAELTFRQHLNSISMQSDFFLPKPRKLRNRHLRKPLVVQRTLLPRPSENQSHNVCSFSILSNSSVTGRGSFRPIQSSLTKAALSRPIVPKVLPPQATSHLASAIDLAATSAGILSGNPLPALDTEGLSGISPLSSDEVTGAISGQDSTGTHQDGDTLPTVGGSDPFVSIPSRPEQEPVADSFQGSSVLSLSELPKAPLQNGLSIPLSSSESSSTRLSPPDVSALLDISLPGPPEDALSQGEPATHISDSIIEIAISSGQYGEGVPLSPAKLNGSDSSKSLPSPSSSPQPHWIASPTHDPQWYPSDSTDSSLSSLFASFISPEKSRKMLPTPIGTNSGTSLLGPSLLDGNSRDSFVSRSLADVAEVVDSQLVCMMNENSIDYISRFNDLAQELSIAEPGRREALFDGGGGGPAVSDLSQ

SEQ ID NO: 14840 - protein, 341 aa, Homo sapiens
MTMESGAENQQSGDAAVTEAENQQMTVQAQPQIATLAQVSMPAAHATSSAPTVTLVQLPNGQTVQVHGVIQAAQPSVIQSPQVQTVQSSCKDLKRLFSGTQISTIAESEDSQESVDSVTDSQKRREILSRRPSYRKILNDLSSDAPGVPRIEEEKSEEETSAPAITTVTVPTPIYQTSSGQYIAITQGGAIQLANNGTDGVQGLQTLTMTNAAATQPGTTILQYAQTTDGQQILVPSNQVVVQAASGDVQTYQIRTAPTSTIAPGVVMASSPALPTQPAEEAARKREVRLMKNREAARECRRKKKEYVKCLENRVAVLENQNKTLIEELKALKDLYCHKSD

SEQ ID NO: 14841 - protein, 371 aa, Homo sapiens
MELELDAGDQDLLAFLLEESGDLGTAPDEAVRAPLDWALPLSEVPSDWEVDDLLCSLLSPPASLNILSSSNPCLVHHDHTYSLPRETVSMDLESESCRKEGTQMTPQHMEELAEQEIARLVLTDEEKSLLEKEGLILPETLPLTKTEEQILKRVRRKIRNKRSAQESRRKKKVYVGGLESRVLKYTAQNMELQNKVQLLEEQNLSLLDQLRKLQAMVIEISNKTSSSSTCILVLLVSFCLLLVPAMYSSDTRGSLPAEHGVLSRQLRALPSEDPYQLELPALQSEVPKDSTHQWLDGSDCVLQAPGNTSCLLHYMPQAPSAEPPLEWPFPDLFSEPLCRGPILPLQANLTRKGGWLPTGSPSVILQDRYSG

SEQ ID NO: 14842 - protein, 519 aa, Homo sapiens
MDAVLEPFPADRLFPGSSFLDLGDLNESDFLNNAHFPEHLDHFTENMEDFSNDLFSSFFDDPVLDEKSPLLDMELDSPTPGIQAEHSYSLSGDSAPQSPLVPIKMEDTTQDAEHGAWALGHKLCSIMVKQEQSPELPVDPLAAPSAMAAAAAMATTPLLGLSPLSRLPIPHQAPGEMTQLPVIKAEPLEVNQFLKVTPEDLVQMPPTPPSSHGSDSDGSQSPRSLPPSSPVRPMARSSTAISTSPLLTAPHKLQGTSGPLLLTEEEKRTLIAEGYPIPTKLPLTKAEEKALKRVRRKIKNKISAQESRRKKKEYVECLEKKVETFTSENNELWKKVETLENANRTLLQQLQKLQTLVTNKISRPYKMAATQTGTCLMVAALCFVLVLGSLVPCLPEFSSGSQTVKEDPLAADGVYTASQMPSRSLLFYDDGAGLWEDGRSTLLPMEPPDGWEINPGGPAEQRPRDHLQHDHLDSTHETTKYLSEAWPKDGGNGTSPDFSHSKEWFHDRDLGPNTTIKLS

SEQ ID NO: 14843 - protein, 520 aa, Homo sapiens
MEVLESGEQGVLQWDRKLSELSEPGDGEALMYHTHFSELLDEFSQNVLGQLLNDPFLSEKSVSMEVEPSPTSPAPLIQAEHSYSLCEEPRAQSPFTHITTSDSFNDDEVESEKWYLSTDFPSTSIKTEPVTDEPPPGLVPSVTLTITAISTPLEKEEPPLEMNTGVDSSCQTIIPKIKLEPHEVDQFLNFSPKEAPVDHLHLPPTPPSSHGSDSEGSLSPNPRLHPFSLPQTHSPSRAAPRAPSALSSSPLLTAPHKLQGSGPLVLTEEEKRTLIAEGYPIPTKLPLSKSEEKALKKIRRKIKNKISAQESRRKKKEYMDSLEKKVESCSTENLELRKKVEVLENTNRTLLQQLQKLQTLVMGKVSRTCKLAGTQTGTCLMVVVLCFAVAFGSFFQGYGPYPSATKMALPSQHSLQEPYTASVVRSRNLLIYEEHSPPEESSSPGSAGELGGWDRGSSLLRVSGLESRPDVDLPHFIISNETSLEKSVLLELQQHLVSAKLEGNETLKVVELDRRVNTTF

SEQ ID NO: 14844 - protein, 461 aa, Homo sapiens
MNTDLAAGKMASAACSMDPIDSFELLDLLFDRQDGILRHVELGEGWGHVKDQQVLPNPDSDDFLSSILGSGDSLPSSPLWSPEGSDSGISEDLPSDPQDTPPRSGPATSPAGCHPAQPGKGPCLSYHPGNSCSTTTPGPVIQVPEASVTIDLEMWSPGGRICAEKPADPVDLSPRCNLTVKDLLLSGSSGDLQQHHLGASYLLRPGAGHCQELVLTEDEKKLLAKEGITLPTQLPLTKYEERVLKKIRRKIRNKQSAQESRKKKKEYIDGLETRMSACTAQNQELQRKVLHLEKQNLSLLEQLKKLQAIVVQSTSKSAQTGTCVAVLLLSFALIILPSISPFGPNKTESPGDFAPVRVFSRTLHNDAASRVAADAVPGSEAPGPRPEADTTREESPGSPGADWGFQDTANLTNSTEELDNATLVLRNATEGLGQVALLDWVAPGPSTGSGRAGLEAAGDEL

SEQ ID NO: 14845 - protein, 395 aa, Homo sapiens
MDLGIPDLLDAWLEPPEDIFSTGSVLELGLHCPPPEVPVTRLQEQGLQGWKSGGDRGCGLQESEPEDFLKLFIDPNEVYCSEASPGSDSGISEDPCHPDSPPAPRATSSPMLYEVVYEAGALERMQGETGPNVGLISIQLDQWSPAFMVPDSCMVSELPFDAHAHILPRAGTVAPVPCTTLLPCQTLFLTDEEKRLLGQEGVSLPSHLPLTKAEERVLKKVRRKIRNKQSAQDSRRRKKEYIDGLESRVAACSAQNQELQKKVQELERHNISLVAQLRQLQTLIAQTSNKAAQTSTCVLILLFSLALIILPSFSPFQSRPEAGSEDYQPHGVTSRNILTHKDVTENLETQVVESRLREPPGAKDANGSTRTLLEKMGGKPRPSGRIRSVLHADEM

SEQ ID NO: 14846 - protein, 508 aa, Homo sapiens
MIYEESKMNLEQERPFVCSAPGCSQRFPTEDHLMIHRHKHEMTLKFPSIKTDNMLSDQTPTPTRFLKNCEEVGLFSELDCSLEHEFRKAQEEESSKRNISMHNAVGGAMTGPGTHQLSSARLPNHDTNVVIQQAMPSPQSSSVITQAPSTNRQIGPVPGSLSSLLHLHNRQRQPMPASMPGTLPNPTMPGSSAVLMPMERQMSVNSSIMGMQGPNLSNPCASPQVQPMHSEAKMRLKAALTHHPAAMSNGNMNTMGHMMEMMGSRQDQTPHHHMHSHPHQHQTLPPHHPYPHQHQHPAHHPHPQPHHQQNHPHHHSHSHLHAHPAHHQTSPHPPLHTGNQAQVSPATQQMQPTQTIQPPQPTGGRRRRVVDEDPDERRRKFLERNRAAATRCRQKRKVWVMSLEKKAEELTQTNMQLQNEVSMLKNEVAQLKQLLLTHKDCPITAMQKESQGYLSPESSPPASPVPACSQQQVIQHNTITTSSSVSEVVGSSTLSQLTTHRTDLNPIL

SEQ ID NO: 14847 - protein, 2442 aa, Homo sapiens
MAENLLDGPPNPKRAKLSSPGFSANDSTDFGSLFDLENDLPDELIPNGGELGLLNSGNLVPDAASKHKQLSELLRGGSGSSINPGIGNVSASSPVQQGLGGQAQGQPNSANMASLSAMGKSPLSQGDSSAPSLPKQAASTSGPTPAASQALNPQAQKQVGLATSSPATSQTGPGICMNANFNQTHPGLLNSNSGHSLINQASQGQAQVMNGSLGAAGRGRGAGMPYPTPAMQGASSSVLAETLTQVSPQMTGHAGLNTAQAGGMAKMGITGNTSPFGQPFSQAGGQPMGATGVNPQLASKQSMVNSLPTFPTDIKNTSVTNVPNMSQMQTSVGIVPTQAIATGPTADPEKRKLIQQQLVLLLHAHKCQRREQANGEVRACSLPHCRTMKNVLNHMTHCQAGKACQVAHCASSRQIISHWKNCTRHDCPVCLPLKNASDKRNQQTILGSPASGIQNTIGSVGTGQQNATSLSNPNPIDPSSMQRAYAALGLPYMNQPQTQLQPQVPGQQPAQPQTHQQMRTLNPLGNNPMNIPAGGITTDQQPPNLISESALPTSLGATNPLMNDGSNSGNIGTLSTIPTAAPPSSTGVRKGWHEHVTQDLRSHLVHKLVQAIFPTPDPAALKDRRMENLVAYAKKVEGDMYESANSRDEYYHLLAEKIYKIQKELEEKRRSRLHKQGILGNQPALPAPGAQPPVIPQAQPVRPPNGPLSLPVNRMQVSQGMNSFNPMSLGNVQLPQAPMGPRAASPMNHSVQMNSMGSVPGMAISPSRMPQPPNMMGAHTNNMMAQAPAQSQFLPQNQFPSSSGAMSVGMGQPPAQTGVSQGQVPGAALPNPLNMLGPQASQLPCPPVTQSPLHPTPPPASTAAGMPSLQHTTPPGMTPPQPAAPTQPSTPVSSSGQTPTPTPGSVPSATQTQSTPTVQAAAQAQVTPQPQTPVQPPSVATPQSSQQQPTPVHAQPPGTPLSQAAASIDNRVPTPSSVASAETNSQQPGPDVPVLEMKTETQAEDTEPDPGESKGEPRSEMMEEDLQGASQVKEETDIAEQKSEPMEVDEKKPEVKVEVKEEEESSSNGTASQSTSPSQPRKKIFKPEELRQALMPTLEALYRQDPESLPFRQPVDPQLLGIPDYFDIVKNPMDLSTIKRKLDTGQYQEPWQYVDDVWLMFNNAWLYNRKTSRVYKFCSKLAEVFEQEIDPVMQSLGYCCGRKYEFSPQTLCCYGKQLCTIPRDAAYYSYQNRYHFCEKCFTEIQGENVTLGDDPSQPQTTISKDQFEKKKNDTLDPEPFVDCKECGRKMHQICVLHYDIIWPSGFVCDNCLKKTGRPRKENKFSAKRLQTTRLGNHLEDRVNKFLRRQNHPEAGEVFVRVVASSDKTVEVKPGMKSRFVDSGEMSESFPYRTKALFAFEEIDGVDVCFFGMHVQEYGSDCPPPNTRRVYISYLDSIHFFRPRCLRTAVYHEILIGYLEYVKKLGYVTGHIWACPPSEGDDYIFHCHPPDQKIPKPKRLQEWYKKMLDKAFAERIIHDYKDIFKQATEDRLTSAKELPYFEGDFWPNVLEESIKELEQEEEERKKEESTAASETTEGSQGDSKNAKKKNNKKTNKNKSSISRANKKKPSMPNVSNDLSQKLYATMEKHKEVFFVIHLHAGPVINTLPPIVDPDPLLSCDLMDGRDAFLTLARDKHWEFSSLRRSKWSTLCMLVELHTQGQDRFVYTCNECKHHVETRWHCTVCEDYDLCINCYNTKSHAHKMVKWGLGLDDEGSSQGEPQSKSPQESRRLSIQRCIQSLVHACQCRNANCSLPSCQKMKRVVQHTKGCKRKTNGGCPVCKQLIALCCYHAKHCQENKCPVPFCLNIKHKLRQQQIQHRLQQAQLMRRRMATMNTRNVPQQSLPSPTSAPPGTPTQQPSTPQTPQPPAQPQPSPVSMSPAGFPSVARTQPPTTVSTGKPTSQVPAPPPPAQPPPAAVEAARQIEREAQQQQHLYRVNINNSMPPGRTGMGTPGSQMAPVSLNVPRPNQVSGPVMPSMPPGQWQQAPLPQQQPMPGLPRPVISMQAQAAVAGPRMPSVQPPRSISPSALQDLLRTLKSPSSPQQQQQVLNILKSNPQLMAAFIKQRTAKYVANQPGMQPQPGLQSQPGMQPQPGMHQQPSLQNLNAMQAGVPRPGVPPQQQAMGGLNPQGQALNIMNPGHNPNMASMNPQYREMLRRQLLQQQQQQQQQQQQQQQQQQGSAGMAGGMAGHGQFQQPQGPGGYPPAMQQQQRMQQHLPLQGSSMGQMAAQMGQLGQMGQPGLGADSTPNIQQALQQRILQQQQMKQQIGSPGQPNPMSPQQHMLSGQPQASHLPGQQIATSLSNQVRSPAPVQSPRPQSQPPHSSPSPRIQPQPSPHHVSPQTGSPHPGLAVTMASSIDQGHLGNPEQSAMLPQLNTPSRSALSSELSLVGDTTGDTLEKFVEGL

SEQ ID NO: 14848 - protein, 120 aa, Homo sapiens
MDDSKVVGGKVKKPGKRGRKPAKIDLKAKLERSRQSARECRARKKLRYQYLEELVSSRERAICALREELEMYKQWCMAMDQGKIPSEIKALLTGEEQNKSQQNSSRHTKAGKTDANSNSW

SEQ ID NO: 14849 - protein, 639 aa, Homo sapiens
MPQPSVSGMDPPFGDAFRSHTFSEQTLMSTDLLANSSDPDFMYELDREMNYQQNPRDNFLSLEDCKDIENLESFTDVLDNEGALTSNWEQWDTYCEDLTKYTKLTSCDIWGTKEVDYLGLDDFSSPYQDEEVISKTPTLAQLNSEDSQSVSDSLYYPDSLFSVKQNPLPSSFPGKKITSRAAAPVCSSKTLQAEVPLSDCVQKASKPTSSTQIMVKTNMYHNEKVNFHVECKDYVKKAKVKINPVQQSRPLLSQIHTDAAKENTCYCGAVAKRQEKKGMEPLQGHATPALPFKETQELLLSPLPQEGPGSLAAGESSSLSASTSVSDSSQKKEEHNYSLFVSDNLGEQPTKCSPEEDEEDEEDVDDEDHDEGFGSEHELSENEEEEEEEEDYEDDKDDDISDTFSEPGYENDSVEDLKEVTSISSRKRGKRRYFWEYSEQLTPSQQERMLRPSEWNRDTLPSNMYQKNGLHHGKYAVKKSRRTDVEDLTPNPKKLLQIGNELRKLNKVISDLTPVSELPLTARPRSRKEKNKLASRACRLKKKAQYEANKVKLWGLNTEYDNLLFVINSIKQEIVNRVQNPRDERGPNMGQKLEILIKDTLGLPVAGQTSEFVNQVLEKTAEGNPTGGLVGLRIPTSKV

SEQ ID NO: 14850 - protein, 354 aa, Homo sapiens
MRHSLTKLLAASGSNSPTRSESPEPAATCSLPSDLTRAAAGEEETAAAGSPGRKQQFGDEGELEAGRGSRGGVAVRAPSPEEMEEEAIASLPGEETEDMDFLSGLELADLLDPRQPDWHLDPGLSSPGPLSSSGGGSDSGGLWRGDDDDEAAAAEMQRFSDLLQRLLNGIGGCSSSSDSGSAEKRRRKSPGGGGGGGSGNDNNQAATKSPRKAAAAAARLNRLKKKEYVMGLESRVRGLAAENQELRAENRELGKRVQALQEESRYLRAVLANETGLARLLSRLSGVGLRLTTSLFRDSPAGDHDYALPVGKQKQDLLEEDDSAGGVCLHVDKDKVSVEFCSACARKASSSLKM

SEQ ID NO: 14851 - protein, 361 aa, Homo sapiens
MSKCARKKYIKTNPRQMTMETVESQHDGSITASLTESKSAHVQTQTGQNSIPALAQVSVAGSGTRRGSPAVTLVQLPSGQTIHVQGVIQTPQPWVIQSSEIHTVQVAAIAETDESAESEGVIDSHKRREILSRRPSYRKILNELSSDVPGVPKIEEERSEEEGTPPSIATMAVPTSIYQTSTGQYIAIAQGGTIQISNPGSDGVQGLQALTMTNSGAPPPGATIVQYAAQSADGTQQFFVPGSQVVVQDEETELAPSHMAAATGDMPTYQIRAPTAALPQGVVMAASPGSLHSPQQLAEEATRKRELRLMKNREAAKECRRRKKEYVKCLESRVAVLEVQNKKLIEELETLKDICSPKTDY

SEQ ID NO: 14852 - protein, 299 aa, Homo sapiens [sequence omitted]

SEQ ID NO: 14853 - protein, 589 aa, Homo sapiens
MTGLLKRKFDQLDEDNSSVSSSSSSSGCQSRSCSPSSSVSRAWDSEEEGPWDQMPLPDRDFCGPRSFTPLSILKRARRERPGRVAFDGITVFYFPRCQGFTSVPSRGGCTLGMALRHSACRRFSLAEFAQEQARARHEKLRQRLKEEKLEMLQWKLSAAGVPQAEAGLPPVVDAIDDASVEEDLAVAVAGGRLEEVSFLQPYPARRRRALLRASGVRRIDREEKRELQALRQSREDCGCHCDRICDPETCSCSLAGIKCQMDHTAFPCGCCREGCENPMGRVEFNQARVQTHFIHTLTRLQLEQEAESFRELEAPAQGSPPSPGEEALVPTFPLAKPPMNNELGDNSCSSDMTDSSTASSSASGTSEAPDCPTHPGLPGPGFQPGVDDDSLARILSFSDSDFGGEEEEEEEGSVGNLDNLSCFHPADIFGTSDPGGLASWTHSYSGCSFTSGVLDENANLDASCFLNGGLEGSREGSLPGTSVPPSMDAGRSSSVDLSLSSCDSFELLQALPDYSLGPHYTSQKVSDSLDNIEAPHFPLPGLSPPGDASSCFLESLMGFSEPAAEALDPFIDSQFEDTVPASLMEPVPV

SEQ ID NO: 14854 - protein, 543 aa, Homo sapiens
MDAFTGSGLKRKFDDVDVGSSVSNSDDEISSSDSADSCDSLNPPTTASFTPTSILKRQKQLRRKNVRFDQVTVYYFARRQGFTSVPSQGGSSLGMAQRHNSVRSYTLCEFAQEQEVNHREILREHLKEEKLHAKKMKLTKNGTVESVEADGLTLDDVSDEDIDVENVEVDDYFFLQPLPTKRRRALLRASGVHRIDAEEKQELRAIRLSREECGCDCRLYCDPEACACSQAGIKCQVDRMSFPCGCSRDGCGNMAGRIEFNPIRVRTHYLHTIMKLELESKRQVSRPAAPDEEPSPTASCSLTGAQGSETQDFQEFIAENETAVMHLQSAEELERLKAEEDSSGSSASLDSSIESLGVCILEEPLAVPEELCPGLTAPILIQAQLPPGSSVLCFTENSDHPTASTVNSPSYLNSGPLVYYQVEQRPVLGVKGEPGTEEGSASFPKEKDLNVFSLPVTSLVACSSTDPAALCKSEVGKTPTLEALLPEDCNPEEPENEDFHPSWSPSSLPFRTDNEEGCGMVKTSQQNEDRPPEDSSLELPLAV

SEQ ID NO: 14855 - protein, 585 aa, Homo sapiens
MSGILKRKFEEVDGSSPCSSVRESDDEVSSSESADSGDSVNPSTSSHFTPSSILKREKRLRTKNVHFSCVTVYYFTRRQGFTSVPSQGGSTLGMSSRHNSVRQYTLGEFAREQERLHREMLREHLREEKLNSLKLKMTKNGTVESEEASTLTLDDISDDDIDLDNTEVDEYFFLQPLPTKKRRALLRASGVKKIDVEEKHELRAIRLSREDCGCDCRVFCDPDTCTCSLAGIKCQVDRMSFPCGCTKEGCSNTAGRIEFNPIRVRTHFLHTIMKLELEKNREQQIPTLNGCHSEISAHSSSMGPVAHSVEYSIADSFEIETEPQAAVLHLQSAEELDCQGEEEEEEEDGSSFCSGVTDSSTQSLAPSESDEEEEEEEEEEEEEDDDDDKGDGFVEGLGTHAEVVPLPSVLCYSDGTAVHESHAKNASFYANSSTLYYQIDSHIPGTPNQISENYSERDTVKNGTLSLVPYTMTPEQFVDYARQAEEAYGASHYPAANPSVIVCCSSSENDSGVPCNSLYPEHRSNHPQVEFHSYLKGPSQEGFVSALNGDSHISEHPAENSLSLAEKSILHEECIKSPVVETVPV

SEQ ID NO: 14856 - protein, 727 aa, Homo sapiens
MEGDAVEAIVEESETFIKGKERKTYQRRREGGQEEDACHLPQNQTDGGEVVQDVNSSVQMVMMEQLDPTLLQMKTEVMEGTVAPEAEAAVDDTQIITLQVVNMEEQPINIGELQLVQVPVPVTVPVATTSVEELQGAYENEVSKEGLAESEPMICHTLPLPEGFQVVKVGANGEVETLEQGELPPQEDPSWQKDPDYQPPAKKTKKTKKSKLRYTEEGKDVDVSVYDFEEEQQEGLLSEVNAEKVVGNMKPPKPTKIKKKGVKKTFQCELCSYTCPRRSNLDRHMKSHTDERPHKCHLCGRAFRTVTLLRNHLNTHTGTRPHKCPDCDMAFVTSGELVRHRRYKHTHEKPFKCSMCDYASVEVSKLKRHIRSHTGERPFQCSLCSYASRDTYKLKRHMRTHSGEKPYECYICHARFTQSGTMKMHILQKHTENVAKFHCPHCDTVIARKSDLGVHLRKQHSYIEQGKKCRYCDAVFHERYALIQHQKSHKNEKRFKCDQCDYACRQERHMIMHKRTHTGEKPYACSHCDKTFRQKQLLDMHFKRYHDPNFVPAAFVCSKCGKTFTRRNTMARHADNCAGPDGVEGENGGETKKSKRGRKRKMRSKKEDSSDSENAEPDLDDNEDEEEPAVEIEPEPEPQPVTPAPPPAKKRRGRPPGRTNQPKQNQPTAIIQVEDQNTGAIENIIVEVKKEPDAEPAEGEEEEAQPAATDAPNGDLTPEMILSMMDR

SEQ ID NO: 14857 - protein, 663 aa, Homo sapiens
MAATEISVLSEQFTKIKELELMPEKGLKEEEKDGVCREKDHRSPSELEAERTSGAFQDSVLEEEVELVLAPSEESEKYILTLQTVHFTSEAVELQDMSLLSIQQQEGVQVVVQQPGPGLLWLEEGPRQSLQQCVAISIQQELYSPQEMEVLQFHALEENVMVASEDSKLAVSLAETTGLIKLEEEQEKNQLLAERTKEQLFFVETMSGDERSDEIVLTVSNSNVEEQEDQPTAGQADAEKAKSTKNQRKTKGAKGTFHCDVCMFTSSRMSSFNRHMKTHTSEKPHLCHLCLKTFRTVTLLRNHVNTHTGTRPYKCNDCNMAFVTSGELVRHRRYKHTHEKPFKCSMCKYASVEASKLKRHVRSHTGERPFQCCQCSYASRDTYKLKRHMRTHSGEKPYECHICHTRFTQSGTMKIHILQKHGENVPKYQCPHCATIIARKSDLRVHMRNLHAYSAAELKCRYCSAVFHERYALIQHQKTHKNEKRFKCKHCSYACKQERHMTAHIRTHTGEKPFTCLSCNKCFRQKQLLNAHFRKYHDANFIPTVYKCSKCGKGFSRWINLHRHSEKCGSGEAKSAASGKGRRTRKRKQTILKEATKGQKEAAKGWKEAANGDEAAAEEASTTKGEQFPGEMFPVACRETTARVKEEVDEGVTCEMLLNTMDK

SEQ ID NO: 14858 - protein, 1505 aa, Homo sapiens
MLCVAGARLKRELDATATVLANRQDESEQSRKRLIEQSREFKKNTPEDLRKQVAPLLKSFQGEIDALSKRSKEAEAAFLNVYKRLIDVPDPVPALDLGQQLQLKVQRLHDIETENQKLRETLEEYNKEFAEVKNQEVTIKALKEKIREYEQTLKNQAETIALEKEQKLQNDFAEKERKLQETQMSTTSKLEEAEHKVQSLQTALEKTRTELFDLKTKYDEETTAKADEIEMIMTDLERANQRAEVAQREAETLREQLSSANHSLQLASQIQKAPDVEQAIEVLTRSSLEVELAAKEREIAQLVEDVQRLQASLTKLRENSASQISQLEQQLSAKNSTLKQLEEKLKGQADYEEVKKELNILKSMEFAPSEGAGTQDAAKPLEVLLLEKNRSLQSENAALRISNSDLSGSARRKGKDQPESRRPGSLPAPPPSQLPRNPGEQASNTNGTHQFSPAGLSQDFFSSSLASPSLPLASTGKFALNSLLQRQLMQSFYSKAMQEAGSTSMIFSTGPYSTNSISSQSPLQQSPDVNGMAPSPSQSESAGSVSEGEEMDTAEIARQVKEQLIKHNIGQRIFGHYVLGLSQGSVSEILARPKPWNKLTVRGKEPFHKMKQFLSDEQNILALRSIQGRQRENPGQSLNRLFQEVPKRRNGSEGNITTRIRASETGSDEAIKSILEQAKRELQVQKTAEPAQPSSASGSGNSDDAIRSILQQARREMEAQQAALDPALKQAPLSQSDITILTPKLLSTSPMPTVSSYPPLAISLKKPSAAPEAGASALPNPPALKKEAQDAPGLDPQGAADCAQGVLRQVKNEVGRSGAWKDHWWSAVQPERRNAASSEEAKAEETGGGKEKGSGGSGGGSQPRAERSQLQGPSSSEYWKEWPSAESPYSQSSELSLTGASRSETPQNSPLPSSPIVPMSKPTKPSVPPLTPEQYEVYMYQEVDTIELTRQVKEKLAKNGICQRIFGEKVLGLSQGSVSDMLSRPKPWSKLTQKGREPFIRMQLWLNGELGQGVLPVQGQQQGPVLHSVTSLQDPLQQGCVSSESTPKTSASCSPAPESPMSSSESVKSLTELVQQPCPPIEASKDSKPPEPSDPPASDSQPTTPLPLSGHSALSIQELVAMSPELDTYGITKRVKEVLTDNNLGQRLFGETILGLTQGSVSDLLARPKPWHKLSLKGREPFVRMQLWLNDPNNVEKLMDMKRMEKKAYMKRRHSSVSDSQPCEPPSVGTEYSQGASPQPQHQLKKPRVVLAPEEKEALKRAYQQKPYPSPKTIEDLATQLNLKTSTVINWFHNYRSRIRRELFIEEIQAGSQGQAGASDSPSARSGRAAPSSEGDSCDGVEATEGPGSADTEEPKSQGEAEREEVPRPAEQTEPPPSGTPGPDDARDDDHEGGPVEGPGPLPSPASATATAAPAAPEDAATSAAAAPGEGPAAPSSAPPPSNSSSSSAPRRPSSLQSLFGLPEAAGARDSRDNPLRKKKAANLNSIIHRLEKAASREEPIEWEF

SEQ ID NO: 14859 - protein, 678 aa, Homo sapiens
MAANVGSMFQYWKRFDLQQLQRELDATATVLANRQDESEQSRKRLIEQSREFKKNTPEDLRKQVAPLLKSFQGEIDALSKRSKEAEAAFLNVYKRLIDVPDPVPALDLGQQLQLKVQRLHDIETENQKLRETLEEYNKEFAEVKNQEVTIKALKEKIREYEQTLKNQAETIALEKEQKLQNDFAEKERKLQETQMSTTSKLEEAEHKVQSLQTALEKTRTELFDLKTKYDEETTAKADEIEMIMTDLERANQRAEVAQREAETLREQLSSANHSLQLASQIQKAPDVEQAIEVLTRSSLEVELAAKEREIAQLVEDVQRLQASLTKLRENSASQISQLEQQLSAKNSTLKQLEEKLKGQADYEEVKKELNILKSMEFAPSEGAGTQDAAKPLEVLLLEKNRSLQSENAALRISNSDLSGRCAELQVRITEAVATATEQRELIARLEQDLSIIQSIQRPDAEGAAEHRLEKIPEPIKEATALFYGPAAPASGALPEGQVDSLLSIISSQRERFRARNQELEAENRLAQHTLQALQSELDSLRADNIKLFEKIKFLQSYPGRGSGSDDTELRYSSQYEERLDPFSSFSKRERQRKYLSLSPWDKATLSMGRLVLSNKMARTIGFFYTLFLHCLVFLVLYKLAWSESMERDCATFCAKKFADHLHKFHENDNGAAAGDLWQ

SEQ ID NO: 14860 - protein, 1486 aa, Homo sapiens
MAANVGSMFQYWKRFDLRRLQKELNSVASELSARQEESEHSHKHLIELRREFKKNVPEEIREMVAPVLKSFQAEVVALSKRSQEAEAAFLSVYKQLIEAPDPVPVFEAARSLDDRLQPPSFDPSGQPRRDLHTSWKRNPELLSPKEQREGTSPAGPTLTEGSRLPGIPGKALLTETLLQRNEAEKQKGLQEVQITLAARLGEAEEKIKVLHSALKATQAELLELRRKYDEEAASKADEVGLIMTNLEKANQRAEAAQREVESLREQLASVNSSIRLACCSPQGPSGDKVNFTLCSGPRLEAALASKDREILRLLKDVQHLQSSLQELEEASANQIADLERQLTAKSEAIEKLEEKLQAQSDYEEIKTELSILKAMKLASSTCSLPQGMAKPEDSLLIAKEAFFPTQKFLLEKPSLLASPEEDPSEDDSIKDSLGTEQSYPSPQQLPPPPGPEDPLSPSPGQPLLGPSLGPDGTRTFSLSPFPSLASGERLMMPPAAFKGEAGGLLVFPPAFYGAKPPTAPATPAPGPEPLGGPEPADGGGGGAAGPGAEEEQLDTAEIAFQVKEQLLKHNIGQRVFGHYVLGLSQGSVSEILARPKPWRKLTVKGKEPFIKMKQFLSDEQNVLALRTIQVRQRGSITPRIRTPETGSDDAIKSILEQAKKEIESQKGGEPKTSVAPLSIANGTTPASTSEDAIKSILEQARREMQAQQQALLEMEVAPRGRSVPPSPPERPSLATASQNGAPALVKQEEGSGGPAQAPLPVLSPAAFVQSIIRKVKSEIGDAGYFDHHWASDRGLLSRPYASVSPSLSSSSSSGYSGQPNGRAWPRGDEAPVPPEDEAAAGAEDEPPRTGELKAEGATAEAGARLPYYPAYVPRTLKPTVPPLTPEQYELYMYREVDTLELTRQVKEKLAKNGICQRIFGEKVLGLSQGSVSDMLSRPKPWSKLTQKGREPFIRMQLWLSDQLGQAVGQQPGASQASPTEPRSSPSPPPSPTEPEKSSQEPLSLSLESSKENQQPEGRSSSSLSGKMYSGSQAPGGIQEIVAMSPELDTYSITKRVKEVLTDNNLGQRLFGESILGLTQGSVSDLLSRPKPWHKLSLKGREPFVRMQLWLNDPHNVEKLRDMKKLEKKAYLKRRYGLISTGSDSESPATRSECPSPCLQPQDLSLLQIKKPRVVLAPEEKEALRKAYQLEPYPSQQTIELLSFQLNLKTNTVINWFHNYRSRMRREMLVEGTQDEPDLDPSGGPGILPPGHSHPDPTPQSPDSETEDQKPTVKELELQEGPEENSTPLTTQDKAQVRIKQEQMEEDAEEEAGSQPQDSGELDKGQGPPKEEHPDPPGNDGLPKVAPGPLLPGGSTPDCPSLHPQQESEAGERLHPDPLSFKSASESSRCSLEVSLNSPSAASSPGLMMSVSPVPSSSAPISPSPPGAPPAKVPSASPTADMAGALHPSAKVNPNLQRRHEKMANLNNIIYRVERAANREEALEWEF

SEQ ID NO: 14861 - protein, 656 aa, Homo sapiens
MEGDGSDPEPPDAGEDSKSENGENAPIYCICRKPDINCFMIGCDNCNEWFHGDCIRITEKMAKAIREWYCRECREKDPKLEIRYRHKKSRERDGNERDSSEPRDEGGGRKRPVPDPDLQRRAGSGTGVGAMLARGSASPHKSSPQPLVATPSQHHQQQQQQIKRSARMCGECEACRRTEDCGHCDFCRDMKKFGGPNKIRQKCRLRQCQLRARESYKYFPSSLSPVTPSESLPRPRRPLPTQQQPQPSQKLGRIREDEGAVASSTVKEPPEATATPEPLSDEDLPLDPDLYQDFCAGAFDDHGLPWMSDTEESPFLDPALRKRAVKVKHVKRREKKSEKKKEERYKRHRQKQKHKDKWKHPERADAKDPASLPQCLGPGCVRPAQPSSKYCSDDCGMKLAANRIYEILPQRIQQWQQSPCIAEEHGKKLLERIRREQQSARTRLQEMERRFHELEAIILRAKQQAVREDEESNEGDSDDTDLQIFCVSCGHPINPRVALRHMERCYAKYESQTSFGSMYPTRIEGATRLFCDVYNPQSKTYCKRLQVLCPEHSRDPKVPADEVCGCPLVRDVFELTGDFCRLPKRQCNRHYCWEKLRRAEVDLERVRVWYKLDELFEQERNVRTAMTNRAGLLALMLHQTIQHDPLTTDLRSSADR

SEQ ID NO: 14862 - protein, 760 aa, Homo sapiens
MAVPAALIPPTQLVPPQPPISTSASSSGTTTSTSSATSSPAPSIGPPASSGPTLFRPEPIASAAAAAATVTSTGGGGGGGGGGSGGGGGSSGNGGGGGGGGGGSNCNPNLAAASNGSGGGGGGISAGGGVASSTPINASTGSSSSSSSSSSSSSSSSSSSSSSSSCGPLPGKPVYSTPSPVENTPQNNECKMVDLRGAKVASFTVEGCELICLPQAFDLFLKHLVGGLHTVYTKLKRLEITPVVCNVEQVRILRGLGAIQPGVNRCKLISRKDFETLYNDCTNASSRPGRPPKRTQSVTSPENSHIMPHSVPGLMSPGIIPPTGLTAAAAAAAAATNAAIAEAMKVKKIKLEAMSNYHASNNQHGADSENGDMNSSVGSSDGSWDKETLPSSPSQGPQASITHPRMPGARSLPLSHPLNHLQQSHLLPNGLELPFMMMPHPLIPVSLPPASVTMAMSQMNHLSTIANMAAAAQVQSPPSRVETSVIKERVPDSPSPAPSLEEGRRPGSHPSSHRSSSVSSSPARTESSSDRIPVHQNGLSMNQMLMGLSPNVLPGPKEGDLAGHDMGHESKRMHIEKDETPLSTPTARDSLDKLSLTGHGQPLPPGFPSPFLFPDGLSSIETLLTNIQGLLKVAIDNARAQEKQVQLEKTELKMDFLRERELRETLEKQLAMEQKNRAIVQKRLKKEKKAKRKLQEALEFETKRREQAEQTLKQAASTDSLRVLNDSLTPEIEADRSGGRTDAERTIQDGRLYLKTTVMY

SEQ ID NO: 14863 - protein, 599 aa, Homo sapiens
MAVSASPVISATSSGAGVPGGLFRAEPLYSTPREPPRLTPNMINSFVVNNHSNSAGGGGRGNTNTNECRMVDMHGMKVASFLMDGQELICLPQVFDLFLKHLVGGLHTVYTKLKRLDISPVVCTVEQVRILRGLGAIQPGVNRCKLITRKDFETLFTDCTNARRKRQMTRKQAVNSSRPGRPPKRSLGVLQENARLLTHAVPGLLSPGLITPTGITAAAMAEAMKLQKMKLMAMNTLQGNGSQNGTESEPDDLNSNTGGSESSWDKDKMQSPFAAPGPQHGIAHAALAGQPGIGGAPTLNPLQQNHLLTNRLDLPFMMMPHPLLPVSLPPASVAMAMNQMNHLNTIANMAAAAQIHSPLSRAGTSVIKERIPESPSPAPSLEENHRPGSQTSSHTSSSVSSSPSQMDHHLERMEEVPVQIPIMKSPLDKIQLTPGQALPAGFPGPFIFADSLSSVETLLTNIQGLLKVALDNARIQEKQIQQEKKELRLELYREREIRENLERQLAVELQSRTTMQKRLKKEKKTKRKLQEALEFESKRREQVEQALKQATTSDSGLRMLKDTGIPDIEIENNGTPHDSAAMQGGNYYCLEMAQQLYSA

SEQ ID NO: 14864 - protein, 325 aa, Homo sapiens
MARPVSDRTPAPLLLGGPAGTPPGGGALLGLRSLLQGTSKPKEPASCLLKEKERKAALPAATTPGPGLETAGPADAPAGAVVGGGSPRGRPGPVPAPGLLAPLLWERTLPFGDVEYVDLDAFLLEHGLPPSPPPPGGPSPEPSPARTPAPSPGPGSCGSASPRSSPGHAPARAALGTASGHRAGLTSRDTPSPVDPDTVEVLMTFEPDPADLALSSIPGHETFDPRRHRFSEEELKPQPIMKKARKIQVPEEQKDEKYWSRRYKNNEAAKRSRDARRLKENQISVRAAFLEKENALLRQEVVAVRQELSHYRAVLSRYQAQHGAL

SEQ ID NO: 14865 - protein, 343 aa, Homo sapiens
MMFPGLLAPPAGYPSLLRPTPTLTLPQSLQSAFSGHSSFLVEDLIRISRPPAYLPRSVPTASMSPPRQGAPTALTDTGASDLGSPGPGSRRGGSPPTAFSPASETTFLKFGVNAILSSGPRTETSPALLQSVPPKTFAFPYFEGSFQPFIRSSYFPASSSVVPIPGTFSWPLAARGKPRRGMLRRAVFSDVQRKALEKMFQKQKYISKPDRKKLAAKLGLKDSQVKIWFQNRRMKWRNSKERELLSSGGCREQTLPTKLNPHPDLSDVGQKGPGNEEEEEGPGSPSHRLAYHASSDPQHLRDPRLPGPLPPSPAHSSSPGKPSDFSDSEEEEEGEEQEEITVS

SEQ ID NO: 14866 - protein, 339 aa, Homo sapiens
MLPSAVAAHAGAYWDVVASSALLNLPAAPGFGNLGKSFLIENLLRVGGAPTPRLQPPAPHDPATALATAGAQLRPLPASPVPLKLCPAAEQVSPAGAPYGTRWAFQVLSPSADSARLPGRAPGDRDCTFQPSAPAPSKPFLLSTPPFYSACCGGSCRRPASSTAFPREESMLPLLTQDSNSKARRGILRRAVFSEDQRKALEKMFQKQKYISKTDRKKLAINLGLKESQVKIWFQNRRMKWRNSKEKEVLSNRCIQEVGLQEDPLSRSALGFPSPCPSIWDVPQQHSSPRWRENSPEPSERLIQESSGAPPPEANSLQGALYLCSEEEAGSKGVLTGAV

SEQ ID NO: 14867 - protein, 427 aa, Homo sapiens
MAPKKRPETQKTSEIVLRPRNKRSRSPLELEPEAKKLCAKGSGPSRRCDSDCLWVGLAGPQILPPCRSIVRTLHQHKLGRASWPSVQQGLQQSFLHTLDSYRILQKAAPFDRRATSLAWHPTHPSTVAVGSKGGDIMLWNFGIKDKPTFIKGIGAGGSITGLKFNPLNTNQFYASSMEGTTRLQDFKGNILRVFASSDTINIWFCSLDVSASSRMVVTGDNVGNVILLNMDGKELWNLRMHKKKVTHVALNPCCDWFLATASVDQTVKIWDLRQVRGKASFLYSLPHRHPVNAACFSPDGARLLTTDQKSEIRVYSASQWDCPLGLIPHPHRHFQHLTPIKAAWHPRYNLIVVGRYPDPNFKSCTPYELRTIDVFDGNSGKMMCQLYDPESSGISSLNEFNPMGDTLASAMGYHILIWSQEEARTRK

SEQ ID NO: 14868 - protein, 169 aa, Homo sapiens
MAAESLPFSFGTLSSWELEAWYEDLQEVLSSDENGGTYVSPPGNEEEESKIFTTLDPASLAWLTEEEPEPAEVTSTSQSPHSPDSSQSSLAQEEEEEDQGRTRKRKQSGHSPARAGKQRMKEKEQENERKVAQLAEENERLKQEIERLTREVEATRRALIDRMVNLHQA

SEQ ID NO: 14869 - protein, 565 aa, Homo sapiens; identical to SEQ ID NO: 4097

SEQ ID NO: 14870 - protein, 255 aa, Homo sapiens
MTMTTMPESLNSPVSGKAVFMEFGPPNQQMSPSPMSHGHYSMHCLHSAGHSQPDGAYSSASSFSRPLGYPYVNSVSSHASSPYISSVQSYPGSASLAQSRLEDPGADSEKSTVVEGGEVRFNGKGKKIRKPRTIYSSLQLQALNRRFQQTQYLALPERAELAASLGLTQTQVKIWFQNKRSKFKKLMKQGGAALEGSALANGRALSAGSPPVPPGWNPNSSSGKGSGGNAGSYIPSYTSWYPSAHQEAMQQPQLM

SEQ ID NO: 14871 - protein, 328 aa, Homo sapiens
MTGVFDSLVADMHSTQIAASSTYHQHQQPPSGGGAGPGGNSSSSSSLHKPQESPTLPVSTATDSSYYTNQQHPAGGGGGGGSPYAHMGSYQYQASGLNNVPYSAKSSYDLGYTAAYTSYAPYGTSSSPANNEPEKEDLEPEIRIVNGKPKKVRKPRTIYSSFQLAALQRRFQKTQYLALPERAELAASLGLTQTQVKIWFQNRRSKFKKMWKSGEIPSEQHPGASASPPCASPPVSAPASWDFGVPQRMAGGGGPGSGGSGAGSSGSSPSSAASAFLGNYPWYHQTSGSASHLQATAPLLHPTQTPQPHHHHHHHGGGGAPVSAGTIF

SEQ ID NO: 14872 - protein, 287 aa, Homo sapiens
MSGSFDRKLSSILTDISSSLSCHAGSKDSPTLPESSVTDLGYYSAPQHDYYSGQPYGQTVNPYTYHHQFNLNGLAGTGAYSPKSEYTYGASYRQYGAYREQPLPAQDPVSVKEEPEAEVRMVNGKPKKVRKPRTIYSSYQLAALQRRFQKAQYLALPERAELAAQLGLTQTQVKIWFQNRRSKFKKLYKNGEVPLEHSPNNSDSMACNSPPSPALWDTSSHSTPAPARSQLPPPLPYSASPSYLDDPTNSWYHAQNLSGPHLQQQPPQPATLHHASPGPPPNPGAVY

SEQ ID NO: 14873 - protein, 240 aa, Homo sapiens
MTSLPCPLPGRDASKAVFPDLAPVPSVAAAYPLGLSPTTAASPNLSYSRPYGHLLSYPYTEPANPGDSYLSCQQPAALSQPLCGPAEHPQELEADSEKPRLSPEPSERRPQAPAKKLRKPRTIYSSLQLQHLNQRFQHTQYLALPERAQLAAQLGLTQTQVKIWFQNKRSKYKKLLKQNSGGQEGDFPGRTFSVSPCSPPLPSLWDLPKAGTLPTSGYGNSFGAWYQHHSSDVLASPQMM

SEQ ID NO: 14874 - protein, 289 aa, Homo sapiens
MTGVFDRRVPSIRSGDFQAPFQTSAAMHHPSQESPTLPESSATDSDYYSPTGGAPHGYCSPTSASYGKALNPYQYQYHGVNGSAGSYPAKAYADYSYASSYHQYGGAYNRVPSATNQPEKEVTEPEVRMVNGKPKKVRKPRTIYSSFQLAALQRRFQKTQYLALPERAELAASLGLTQTQVKIWFQNKRSKIKKIMKNGEMPPEHSPSSSDPMACNSPQSPAVWEPQGSSRSLSHHPHAHPPTSNQSPASSYLENSASWYTSAASSINSHLPPPGSLQHPLALASGTLY

SEQ ID NO: 14875 - protein, 175 aa, Homo sapiens
MSHSQHSPYLQSYHNSSAAAQTRGDDTDQQKTTVIENGEIRFNGKGKKIRKPRTIYSSLQLQALNHRFQQTQYLALPERAELAASLGLTQTQVKIWFQNKRSKFKKLLKQGSNPHESDPLQGSAALSPRSPALPPVWDVSASAKGVSMPPNSYMPGYSHWYSSPHQDTMQRPQMM

SEQ ID NO: 14876 - protein, 467 aa, Homo sapiens
MATGADVRDILELGGPEGDAASGTISKKDIINPDKKKSKKSSETLTFKRPEGMHREVYALLYSDKKDAPPLLPSDTGQGYRTVKAKLGSKKVRPWKWMPFTNPARKDGAMFFHWRRAAEEGKDYPFARFNKTVQVPVYSEQEYQLYLHDDAWTKAETDHLFDLSRRFDLRFVVIHDRYDHQQFKKRSVEDLKERYYHICAKLANVRAVPGTDLKIPVFDAGHERRRKEQLERLYNRTPEQVAEEEYLLQELRKIEARKKEREKRSQDLQKLITAADTTAEQRRTERKAPKKKLPQKKEAEKPAVPETAGIKFPDFKSAGVTLRSQRMKLPSSVGQKKIKALEQMLLELGVELSPTPTEELVHMFNELRSDLVLLYELKQACANCEYELQMLRHRHEALARAGVLGGPATPASGPGPASAEPAVTEPGLGPDPKDTIIDVVGAPLTPNSRKRRESASSSSSVKKAKKP

SEQ ID NO: 14877 - protein, 382 aa, Homo sapiens
MQHYGVNGYSLHAMNSLSAMYNLHQQAAQQAQHAPDYRPSVHALTLAERLAGCTFQDIILEARYGSQHRKQRRSRTAFTAQQLEALEKTFQKTHYPDVVMRERLAMCTNLPEARVQVWFKNRRAKFRKKQRSLQKEQLQKQKEAEGSHGEGKAEAPTPDTQLDTEQPPRLPGSDPPAELHLSLSEQSASESAPEDQPDREEDPRAGAEDPKAEKSPGADSKGLGCKRGSPKADSPGSLTITPVAPGGGLLGPSHSYSSSPLSLFRLQEQFRQHMAATNNLVHYSSFEVGGPAPAAAAAAAAVPYLGVNMAPLGSLHCQSYYQSLSAAAAAHQGVWGSPLLPAPPAGLAPASATLNSKTTSIENLRLRAKQHAASLGLDTLPN

SEQ ID NO: 14878 - protein, 373 aa, Homo sapiens
MPNDEAFSKPSTPSEAPHAPGVPPQGRAGGFGKASGALVGAASGSSAGGSSRGGGSGSGASDLGAGSKKSPRLPKCARCRNHGYASPLKGHKRFCMWRDCQCKKCNLIAERQRVMAAQVALRRQQAQEEELGISHPIPLPSAAELLVKRENNGSNPCLMTECSGTSQPPPASVPTTAASEGRMVIQDIPAVTSRGHVENTPDLVSDSTYYSSFYQPSLFPYYNNLYNCPQYSMALAADSASGEVGNPLGGSPVKNSLRGLPGPYVPGQTGNQWQMKNMENRHAMSSQYRMHSYYPPPSYLGQSVPQFFTFEDAPSYPEARASVFSPPSSQDSGLVSLSSSSPISNKSTKAVLECEPASEPSSFTVTPVIEEDE

SEQ ID NO: 14879 - protein, 561 aa, Homo sapiens
MADPQAGSAAGDWEIDVESLELEEDVCGAPRSTPPGPSPPPADGDCEDDEDDDGVDEDAEEEGDGEEAGASPGMPGQPEQRGGPQPRPPLAPQASPAGTGPRERCTPAGGGAEPRKLSRTPKCARCRNHGVVSCLKGHKRFCRWRDCQCANCLLVVERQRVMAAQVALRRQQATEDKKGLSGKQNNFERKAVYQRQVRAPSLLAKSILEGYRPIPAETYVGGTFPLPPPVSDRMRKRRAFADKELENIMLEREYKEREMLETSQAAALFLPNRMVPGPDYNSYKSAYSPSPVEPPSKDFCNFLPTCLDLTMQYSGSGNMELISSNVSVATTYRQYPLSSRFLVWPKCGPISDTLLYQQCLLNATTSVQALKPGASWDLKGARVQDGLSAEQDMMPSKLEGSLVLPHTPEIQTTRSDLQGHQAVPERSAFSPPRRNFSPIVDTDSLAAQGHVLTKISKENTRHPLPLRHNPFHSLFQQTLTDKSGPELKTPFVKEAFEETPKKHRECLVKDNQKYTFTIDRCAKDLFVAKQVGTKLSVNEPLSFSVESILKRPSSAITRVSQ

SEQ ID NO: 14880 - protein, 472 aa, Homo sapiens
MNGYGSPYLYMGGPVSQPPRAPLQRTPKCARCRNHGVLSWLKGHKRYCRFKDCTCEKCILIIERQRVMAAQVALRRQQANESLESLIPDSLRALPGPPPPGDAVAAPQPPPASQPSQPQPPRPAAELAAAAALRWTAEPQPGALQAQLAKPDLTEERLGDGKSADNTEVFSDKDTDQRSSPDVAKSKGCFTPESPEIVSVEEGGYAVQKNGGNPESRPDSPKCHAEQNHLLIEGPSGTVSLPFSLKANRPPLEVLKKIFPNQKPTVLELILKGCGGDLVSAVEVLLSSRSSVTGAERTSAEPESLALPSNGHIFEHTLSSYPISSSKWSVGSAFRVPDTLRFSADSSNVVPSPLAGPLQPPFPQPPRYPLMLRNTLARSQSSPFLPNDVTLWNTMTLQQQYQLRSQYVSPFPSNSTSVFRSSPVLPARATEDPRISIPDDGCPFVSKQSIYTEDDYDERSDSSDSRTLNTSS

SEQ ID NO: 14881 - protein, 504 aa, Homo sapiens
MERSQCGSRDRGVSGRPHLAPGLVVAAPPPPSPALPVPSGMQVPPAFLRPPSLFLRAAAAAAAAAAATSGSGGCPPAPGLESGVGAVGCGYPRTPKCARCRNHGVVSALKGHKRFCRWRDCACAKCTLIAERQRVMAAQVALRRQQAQEESEARGLQRLLCSGLSWPPGGRASGGGGRAENPQSTGGPAAGAALGLGALRQASGSATPAFEVFQQDYPEEKQEQKESKCESCQNGQEELISKSHQLYLGSSSRSNGVIGKQSIGSSISEYSNKPDSILSPHPGEQSGGEESPRSLSSSDLESGNESEWVKDLTATKASLPTVSSRPRDPLDILTKIFPNYRRSRLEGILRFCKGDVVQAIEQVLNGKEHKPDNRNLANSEELENTAFQRASSFSLAGIGFGTLGNKSAFSPLQTTSASYGGDSSLYGVNPRVGISPLRLAYSSAGRGLSGFMSPYLTPGLVPTLPFRPALDYAFSGMIRDSSYLSSKDSITCGRLYFRPNQDNP

SEQ ID NO: 14882 - protein, 542 aa, Homo sapiens; identical to SEQ ID NO: 4339

SEQ ID NO: 14883 - protein, 342 aa, Homo sapiens
MADKMVRTPKCSRCRNHGFLVPVKGHAGKCRWKQCLCEKCYLISERQKIMAAQKVLKTQAAEEEQEAALCAQGPKQASGAAAAAPAPVPVPAASLRPLSPGTPSGDADPGPEGRAAACFFEQPPRGRNPGPRALQPVLGGRSHVEPSERAAVAMPSLAGPPFGAEAAGSGYPGPLDLRRPMRTVPGPLFTDFVRPLNINPDRALGPEYPGGSSMHPYCPFPLGYLDAPPGVPLQQGFRHVSRSQYQGGGLVSEPGGDFQPSYYLPPPPPPLPPLPPLPPQPQFLPPGYLSALHFLPPPPPPPPPSSFSLTVLFDTDKENTDDQDAEVLSGEPSQPSSQEQSD

SEQ ID NO: 14884 - protein, 192 aa, Homo sapiens
MAAPPKAPIRVRNLTIRAGALTGKENNMLQPETHIFTAPEEGSSQGALLLGQAPEPLSLPCTPVTLEQQLVSPSGDPHRAPALPSICSTLILQPCATLDPLLLQPQVPKVSDQALVSAHSEWQRKLEAAEALLTLRNSAQAPPDSISLHQPCNPPAPAGDKGFQPPSPSLRPRPASSISLPIGHLGCISLLS

SEQ ID NO: 14885 - protein, 367 aa, Homo sapiens
MEPSDMPAGYHCPLDSAPWDETRDPQSTELIPRRAISRSPTCARCRNHGVTAHLKGHKRLCLFQACECHKCVLILERRRVMAAQVALRRQQEAQLKKHLMRRGEASPKAPNHFRKGTTQPQVPSGKENIAPQPQTPHGAVLLAPTPPGKNSCGPLLLSHPPEASPLSWTPVPPGPWVPGHWLPPGFSMPPPVVCRLLYQEPAVSLPPFPGFDPGTSLQLPTHGPFTTCPGSHPVLTAPLSGEPQGPPSQPRTHSTLILQPCGTPDPLQLQPQASGASCLARTSGPSEWQLQQEAAEALVGLKDSSQAPRVTPSVPPNPAWISLLHPCGPPAPAGGRGFQPVGPCLRPSPAPSVALHIGRLGSISLLS

SEQ ID NO: 14886 - protein, 760 aa, Homo sapiens
MSTVEEDSDTVTVETVNSVTLTQDTEGNLILHCPQNEADEIDSEDSIEPPHKRLCLSSEDDQSIDDSTPCISVVALPLSENDQSFEVTMTATTEVADDEVTEGTVTQIQILQNEQLDEISPLGNEEVSAVSQAWFTTKEDKDSLTNKGHKWKQGMWSKEEIDILMNNIERYLKARGIKDATEIIFEMSKDERKDFYRTIAWGLNRPLFAVYRRVLRMYDDRNHVGKYTPEEIEKLKELRIKHGNDWATIGAALGRSASSVKDRCRLMKDTCNTGKWTEEEEKRLAEVVHELTSTEPGDIVTQGVSWAAVAERVGTRSEKQCRSKWLNYLNWKQSGGTEWTKEDEINLILRIAELDVADENDINWDLLAEGWSSVRSPQWLRSKWWTIKRQIANHKDVSFPVLIKGLKQLHENQKNNPTLLENKSGSGVPNSNTNSSVQHVQIRVARLEDNTAISSSPMAALQIPVQITHVSSADSPATVDSETITLNSGTLQTFEILPSFHLQPTGTPGTYLLQTSSSQGLPLTLTASPTVTLTAAAPASPEQIIVHALSPEHLLNTSDNVTVQCHTPRVIIQTVATEDITSSISQAELTVDSDIQSSDFPEPPDALEADTFPDEIHHPKMTVEPSFNDAHVSKFSDQNSTELMNSVMVRTEEEISDTDLKQEESPSDLASAYVTEGLESPTIEEQVDQTIDDETILIVPSPHGFIQASDVIDTESVLPLTTLTDPILQHHQEESNIIGSSLGSPVSEDSKDVEDLVNCH

SEQ ID NO: 14887 - protein, 554 aa, Homo sapiens
MTAPCSQPAQLPGRRQLGLVPFPPPPPRTPLLWLLLLLLAAVAPARGWESGDLELFDLVEEVQLNFYQFLGVQQDASSADIRKAYRKLSLTLHPDKNKDENAETQFRQLVAIYEVLKDDERRQRYDDILINGLPDWRQPVFYYRRVRKMSNAELALLLFIILTVGHYAVVWSIYLEKQLDELLSRKKREKKKKTGSKSVDVSKLGASEKNERLLMKPQWHDLLPCKLGIWFCLTLKALPHLIQDAGQFYAKYKETRLKEKEDALTRTELETLQKQKKVKKPKPEFPVYTPLETTYIQSYDHGTSIEEIEEQMDDWLENRNRTQKKQAPEWTEEDLSQLTRSMVKFPGGTPGRWEKIAHELGRSVTDVTTKAKQLKDSVTCSPGMVRLSELKSTVQNSRPIKTATTLPDDMITQREDAEGVAAEEEQEGDSGEQETGATDARPRRRKPARLLEATAKPEPEEKSRAKRQKDFDIAEQNESSDEESLRKERARSAEEPWTQNQQKLLELALQQYPRGSSDRWDKIARCVPSKSKEDCIARYKLLVELVQKKKQAKS

SEQ ID NO: 14888 - protein, 621 aa, Homo sapiens
MLLLPSAADGRGTAITHALTSASTLCQVEPVGRWFEAFVKRRNRNASASFQELEDKKELSEESEDEELQLEEFPMLKTLDPKDWKNQDHYAVLGLGHVRYKATQRQIKAAHKAMVLKHHPDKRKAAGEPIKEGDNDYFTCITKAYEMLSDPVKRRAFNSVDPTFDNSVPSKSEAKDNFFEVFTPVFERNSRWSNKKNVPKLGDMNSSFEDVDIFYSFWYNFDSWREFSYLDEEEKEKAECRDERRWIEKQNRATRAQRKKEEMNRIRTLVDNAYSCDPRIKKFKEEEKAKKEAEKKAKAEAKRKEQEAKEKQRQAELEAARLAKEKEEEEVRQQALLAKKEKDIQKKAIKKERQKLRNSCKTWNHFSDNEAERVKMMEEVEKLCDRLELASLQCLNETLTSCTKEVGKAALEKQIEEINEQIRKEKEEAEARMRQASKNTEKSTGGGGNGSKNWSEDDLQLLIKAVNLFPAGTNSRWEVIANYMNIHSSSGVKRTAKDVIGKAKSLQKLDPHQKDDINKKAFDKFKKEHGVVPQADNATPSERFEGPYTDFTPWTTEEQKLLEQALKTYPVNTPERWEKIAEAVPGRTKKDCMKRYKELVEMVKAKKAAQEQVLNASRAKK

SEQ ID NO: 14889 - protein, 531 aa, Homo sapiens
MKCHYEALGVRRDASEEELKKAYRKLALKWHPDKNLDNAAEAAEQFKLIQAAYDVLSDPQERAWYDNHREALLKGGFDGEYQDDSLDLLRYFTVTCYSGYGDDEKGFYTVYRNVFEMIAKEELESVLEEEVDDFPTFGDSQSDYDTVVHPFYAYWQSFCTQKNFAWKEEYDTRQASNRWEKRAMEKENKKIRDKARKEKNELVRQLVAFIRKRDKRVQAHRKLVEEQNAEKARKAEEMRRQQKLKQAKLVEQYREQSWMTMANLEKELQEMEARYEKEFGDGSDENEMEEHELKDEEDGKDSDEAEDAELYDDLYCPACDKSFKTEKAMKNHEKSKKHREMVALLKQQLEEEEENFSRPQIDENPLDDNSEEEMEDAPKQKLSKKQKKKKQKPAQNYDDNFNVNGPGEGVKVDPEDTNLNQDSAKELEDSPQENVSVTEIIKPCDDPKSEAKSVPKPKGKKTKDMKKPVRVPAEPQTMSVLISCTTCHSEFPSRNKLFDHLKATGHARAPSSSSLNSATSSQSKKEKRKNR

SEQ ID NO: 14890 - protein, 1616 aa, Homo sapiens
MPARTAPARVPTLAVPAISLPDDVRRRLKDLERDSLTEKECVKEKLNLLHEFLQTEIKNQLCDLETKLRKEELSEEGYLAKVKSLLNKDLSLENGAHAYNREVNGRLENGNQARSEARRVGMADANSPPKPLSKPRTPRRSKSDGEAKPEPSPSPRITRKSTRQTTITSHFAKGPAKRKPQEESERAKSDESIKEEDKDQDEKRRRVTSRERVARPLPAEEPERAKSGTRTEKEEERDEKEEKRLRSQTKEPTPKQKLKEEPDREARAGVQADEDEDGDEKDEKKHRSQPKDLAAKRRPEEKEPEKVNPQISDEKDEDEKEEKRRKTTPKEPTEKKMARAKTVMNSKTHPPKCIQCGQYLDDPDLKYGQHPPDAVDEPQMLTNEKLSIFDANESGFESYEALPQHKLTCFSVYCKHGHLCPIDTGLIEKNIELFFSGSAKPIYDDDPSLEGGVNGKNLGPINEWWITGFDGGEKALIGFSTSFAEYILMDPSPEYAPIFGLMQEKIYISKIVVEFLQSNSDSTYEDLINKIETTVPPSGLNLNRFTEDSLLRHAQFVVEQVESYDEAGDSDEQPIFLTPCMRDLIKLAGVTLGQRRAQARRQTIRHSTREKDRGPTKATTTKLVYQIFDTFFAEQIEKDDREDKENAFKRRRCGVCEVCQQPECGKCKACKDMVKFGGSGRSKQACQERRCPNMAMKEADDDEEVDDNIPEMPSPKKMHQGKKKKQNKNRISWVGEAVKTDGKKSYYKKVCIDAETLEVGDCVSVIPDDSSKPLYLARVTALWEDSSNGQMFHAHWFCAGTDTVLGATSDPLELFLVDECEDMQLSYIHSKVKVIYKAPSENWAMEGGMDPESLLEGDDGKTYFYQLWYDQDYARFESPPKTQPTEDNKFKFCVSCARLAEMRQKEIPRVLEQLEDLDSRVLYYSATKNGILYRVGDGVYLPPEAFTFNIKLSSPVKRPRKEPVDEDLYPEHYRKYSDYIKGSNLDAPEPYRIGRIKEIFCPKKSNGRPNETDIKIRVNKFYRPENTHKSTPASYHADINLLYWSDEEAVVDFKAVQGRCTVEYGEDLPECVQVYSMGGPNRFYFLEAYNAKSKSFEDPPNHARSPGNKGKGKGKGKGKPKSQACEPSEPEIEIKLPKLRTLDVFSGCGGLSEGFHQAGISDTLWAIEMWDPAAQAFRLNNPGSTVFTEDCNILLKLVMAGETTNSRGQRLPQKGDVEMLCGGPPCQGFSGMNRFNSRTYSKFKNSLVVSFLSYCDYYRPRFFLLENVRNFVSFKRSMVLKLTLRCLVRMGYQCTFGVLQAGQYGVAQTRRRAIILAAAPGEKLPLFPEPLHVFAPRACQLSVVVDDKKFVSNITRLSSGPFRTITVRDTMSDLPEVRNGASALEISYNGEPQSWFQRQLRGAQYQPILRDHICKDMSALVAARMRHIPLAPGSDWRDLPNIEVRLSDGTMARKLRYTHHDRKNGRSSSGALRGVCSCVEAGKACDPAARQFNTLIPWCLPHTGNRHNHWAGLYGRLEWDGFFSTTVTNPEPMGKQGRVLHPEQHRVVSVRECARSQGFPDTYRLFGNILDKHRQVGNAVPPPLAKAIGLEIKLCMLAKARESASAKIKEEEAAKD

SEQ ID NO: 14891 - protein, 912 aa, Homo sapiens
MPAMPSSGPGDTSSSAAEREEDRKDGEEQEEPRGKEERQEPSTTARKVGRPGRKRKHPPVESGDTPKDPAVISKSPSMAQDSGASELLPNGDLEKRSEPQPEEGSPAGGQKGGAPAEGEGAAETLPEASRAVENGCCTPKEGRGAPAEAGKEQKETNIESMKMEGSRGRLRGGLGWESSLRQRPMPRLTFQAGDPYYISKRKRDEWLARWKREAEKKAKVIAGMNAVEENQGPGESQKVEEASPPAVQQPTDPASPTVATTPEPVGSDAGDKNATKAGDDEPEYEDGRGFGIGELVWGKLRGFSWWPGRIVSWWMTGRSRAAEGTRWVMWFGDGKFSVVCVEKLMPLSSFCSAFHQATYNKQPMYRKAIYEVLQVASSRAGKLFPVCHDSDESDTAKAVEVQNKPMIEWALGGFQPSGPKGLEPPEEEKNPYKEVYTDMWVEPEAAAYAPPPPAKKPRKSTAEKPKVKEIIDERTRERLVYEVRQKCRNIEDICISCGSLNVTLEHPLFVGGMCQNCKNCFLECAYQYDDDGYQSYCTICCGGREVLMCGNNNCCRCFCVECVDLLVGPGAAQAAIKEDPWNCYMCGHKGTYGLLRRREDWPSRLQMFFANNHDQEFDPPKVYPPVPAEKRKPIRVLSLFDGIATGLLVLKDLGIQVDRYIASEVCEDSITVGMVRHQGKIMYVGDVRSVTQKHIQEWGPFDLVIGGSPCNDLSIVNPARKGLYEGTGRLFFEFYRLLHDARPKEGDDRPFFWLFENVVAMGVSDKRDISRFLESNPVMIDAKEVSAAHRARYFWGNLPGMNRPLASTVNDKLELQECLEHGRIAKFSKVRTITTRSNSIKQGKDQHFPVFMNEKEDILWCTEMERVFGFPVHYTDVSNMSRLARQRLLGRSWSVPVIRHLFAPLKEYFACV

SEQ ID NO: 14892 - protein, 853 aa, Homo sapiens
MKGDTRHLNGEEDAGGREDSILVNGACSDQSSDSPPILEAIRTPEIRGRRSSSRLSKREVSSLLSYTQDLTGDGDGEDGDGSDTPVMPKLFRETRTRSESPAVRTRNNNSVSSRERHRPSPRSTRGRQGRNHVDESPVEFPATRSLRRRATASAGTPWPSPPSSYLTIDLTDDTEDTHGTPQSSSTPYARLAQDSQQGGMESPQVEADSGDGDSSEYQDGKEFGIGDLVWGKIKGFSWWPAMVVSWKATSKRQAMSGMRWVQWFGDGKFSEVSADKLVALGLFSQHFNLATFNKLVSYRKAMYHALEKARVRAGKTFPSSPGDSLEDQLKPMLEWAHGGFKPTGIEGLKPNNTQPVVNKSKVRRAGSRKLESRKYENKTRRRTADDSATSDYCPAPKRLKTNCYNNGKDRGDEDQSREQMASDVANNKSSLEDGCLSCGRKNPVSFHPLFEGGLCQTCRDRFLELFYMYDDDGYQSYCTVCCEGRELLLCSNTSCCRCFCVECLEVLVGTGTAAEAKLQEPWSCYMCLPQRCHGVLRRRKDWNVRLQAFFTSDTGLEYEAPKLYPAIPAARRRPIRVLSLFDGIATGYLVLKELGIKVGKYVASEVCEESIAVGTVKHEGNIKYVNDVRNITKKNIEEWGPFDLVIGGSPCNDLSNVNPARKGLYEGTGRLFFEFYHLLNYSRPKEGDDRPFFWMFENVVAMKVGDKRDISRFLECNPVMIDAIKVSAAHRARYFWGNLPGMNRPVIASKNDKLELQDCLEYNRIAKLKKVQTITTKSNSIKQGKNQLFPVVMNGKEDVLWCTELERIFGFPVHYTDVSNMGRGARQKLLGRSWSVPVIRHLFAPLKDYFACE

SEQ ID NO: 14893 - protein, 386 aa, Homo sapiens
MAAIPALDPEAEPSMDVILVGSSELSSSVSPGTGRDLIAYEVKANQRNIEDICICCGSLQVHTQHPLFEGGICAPCKDKFLDALFLYDDDGYQSYCSICCSGETLLICGNPDCTRCYCFECVDSLVGPGTSGKVHAMSNWVCYLCLPSSRSGLLQRRRKWRSQLKAFYDRESENPLEMFETVPVWRRQPVRVLSLFEDIKKELTSLGFLESGSDPGQLKHVVDVTDTVRKDVEEWGPFDLVYGATPPLGHTCDRPPSWYLFQFHRLLQYARPKPGSPRPFFWMFVDNLVLNKEDLDVASRFLEMEPVTIPDVHGGSLQNAVRVWSNIPAIRSRHWALVSEEELSLLAQNKQSSKLAAKWPTKLVKNCFLPLREYFKYFSTELTSSL

SEQ ID NO: 14894 - protein, 380 aa, Homo sapiens
MGGLSARPTAGRTDPAGTCWGQDPGSKMATVIPGPLSLGEDFYREAIEHCRSYNARLCAERSLRLPFLDSQTGVAQNNCYIWMEKTHRGPGLAPGQIYTYPARCWRKKRRLNILEDPRLRPCEYKIDCEAPLKKEGGLPEGPVLEALLCAETGEKKIELKEEETIMDCQKQQLLEFPHDLEVEDLEDDIPRRKNRAKGKAYGIGGLRKRQDTASLEDRDKPYVCDKFYKELAWVPEAQRKHTAKKAPDGTVIPNGYCDFCLGGSKKTGCPEDLISCADCGRSGHPSCLQFTVNMTAAVRTYRWQCIECKSCSLCGTSENDGASWAGLTPQDQLLFCDDCDRGYHMYCLSPPMAEPPEGSWSCHLCLRHLKEKASAYITLT

SEQ ID NO: 14895 - protein, 391 aa, Homo sapiens
MAAVVENVVKLLGEQYYKDAMEQCHNYNARLCAERSVRLPFLDSQTGVAQSNCYIWMEKRHRGPGLASGQLYSYPARRWRKKRRAHPPEDPRLSFPSIKPDTDQTLKKEGLISQDGSSLEALLRTDPLEKRGAPDPRVDDDSLGEFPVTNSRARKRILEPDDFLDDLDDEDYEEDTPKRRGKGKSKGKGVGSARKKLDASILEDRDKPYACDICGKRYKNRPGLSYHYAHSHLAEEEGEDKEDSQPPTPVSQRSEEQKSKKGPDGLALPNNYCDFCLGDSKINKKTGQPEELVSCSDCGRSGHPSCLQFTPVMMAAVKTYRWQCIECKCCNICGTSENDDQLLFCDDCDRGYHMYCLTPSMSEPPEGSWSCHLCLDLLKEKASIYQNQNSS

SEQ ID NO: 14896 - protein, 378 aa, Homo sapiens; identical to SEQ ID NO: 4419

SEQ ID NO: 14897 - protein, 191 aa, Homo sapiens
MPGSEDLRKGKDQMHSHRKRTMFTKKQLEDLNILFNENPYPNPSLQKEMASKIDIHPTVLQVWFKNHRAKLKKAKCKHIHQKQETPQPPIPEGGVSTSVGLRNADTLPRLPNAAHPIGLVYTGHRVPSFQLILYPNLKVPANDFIGHRIVHFGCCRDPNIYCLYPILESQVCAPSFHSGSPACSSNQSRER

SEQ ID NO: 14898 - protein, 176 aa, Homo sapiens
MASSSGNDDDLTIPRAAINKMIKETLPNVRVANDARELVVNCCTEFIHLISSEANEICNKSEKKTISPEHVIQALESLGFGSYISEVKEVLQECKTVALKRRKASSRLENLGIPEEELLRQQQELFAKARQQQAELAQQEWLQMQQAAQQAQLAAASASASNQAGSSQDEEDDDDI

SEQ ID NO: 14899 - protein, 205 aa, Homo sapiens
MPSKKKKYNARFPPARIKKIMQTDEEIGKVAAAVPVIISRALELFLESLLKKACQVTQSRNAKTMTTSHLKQCIELEQQFDFLKDLVASVPDMQGDGEDNHMDGDKGARRGRKPGSGGRKNGGMGTKSKDKKLSGTDSEQEDESEDTDTDGEEETSQPPPQASHPSAHFQSPPTPFLPFASTLPLPPAPPGPSAPDEEDEEDYDS

SEQ ID NO: 14900 - protein, 263 aa, Homo sapiens
MFYFHCPPQLEGTATFGNHSSGDFDDGFLRRKQRRNRTTFTLQQLEALEAVFAQTHYPDVFTREELAMKINLTEARVQVWFQNRRAKWRKTERGASDQEPGAKEPMAEVTPPPVRNINSPPPGDQARSKKEALEAQQSLGRTVGPAGPFFPSCLPGTLLNTATYAQALSHVASLKGGPLCSCCVPDPMGLSFLPTYGCQSNRTASVATLRMKAREHSEAVLQSANLLPSTSSSPGPVAKPAPPDGSQEKTSPTKEQSEAEKSV

SEQ ID NO: 14901 - protein, 424 aa, Homo sapiens
MALPTPSDSTLPAEARGRGRRRRLVWTPSQSEALRACFERNPYPGIATRERLAQAIGIPEPRVQIWFQNERSRQLRQHRRESRPWPGRRGPPEGRRKRTAVTGSQTALLLRAFEKDRFPGIAAREELARETGLPESRIQIWFQNRRARHPGQGGRAPAQAGGLCSAAPGGGHPAPSWVAFAHTGAWGTGLPAPHVPCAPGALPQGAFVSQAARAAPALQPSQAAPAEGISQPAPARGDFAYAAPAPPDGALSHPQAPRWPPHPGKSREDRDPQRDGLPGPCAVAQPGPAQAGPQGQGVLAPPTSQGSPWWGWGRGPQVAGAAWEPQAGAAPPPQPAPPDASASARQGQMQGIPAPSQALQEPAPWSALPCGLLLDELLASPEFLQQAQPLLETEAPGELEASEEAASLEAPLSEEEYRALLEEL

SEQ ID NO: 14902 - protein, 374 aa, Homo sapiens
MALPTPSDSTLPAEARGRGRRRRLVWTPSQSEALRACFERNPYPGIATRERLAQAIGIPEPRVQIWFQNERSRQLRQHRRESRPWPGRRGPPEGRRKRTAVTGSQTALLLRAFEKDRFPGIAAREELARETGLPESRIQIWFQNRRARHPGQGGRAPAQAGGLCSAAPGGGHPAPSWVAFAHTGAWGTGLPAPHVPCAPGALPQGAFVSQAARAAPALQPSQAAPAEGISQPAPARGDFAYAAPAPPDGALSHPQAPRWPPHPGKSREDRDPQRDGLPGPCAVAQPGPAQAGPQGQGVLAPPTSQGSPWWGWGRGPQVAGAAWEPQAGAAPPPQPAPPDASAASTDASHPGASQPLQEPGRSSTVTSSLLYELL

SEQ ID NO: 14903 - protein, 204 aa, Homo sapiens
MAEDTYSHKMVKTNHRRCRTKFTEEQLKILINTFNQKPYPGYATKQKLALEINTEESRIQIWFQNRRARHGFQKRPEAETLESSQSQGQDQPGVEFQSREARRCRTTYSASQLHTLIKAFMKNPYPGIDSREELAKEIGVPESRVQIWFQNRRSRLLLQRKREPVASLEQEEQGKIPEGLQGAEDTQNGTNFTSDSHFSGARTW

SEQ ID NO: 14904 - protein, 437 aa, Homo sapiens
MALAGAPAGGPCAPALEALLGAGALRLLDSSQIVIISAAQDASAPPAPTGPAAPAAGPCDPDLLLFATPQAPRPTPSAPRPALGRPPVKRRLDLETDHQYLAESSGPARGRGRHPGKGVKSPGEKSRYETSLNLTTKRFLELLSHSADGVVDLNWAAEVLKVQKRRIYDITNVLEGIQLIAKKSKNHIQWLGSHTTVGVGGRLEGLTQDLRQLQESEQQLDHLMNICTTQLRLLSEDTDSQRLAYVTCQDLRSIADPAEQMVMVIKAPPETQLQAVDSSENFQISLKSKQGPIDVFLCPEETVGGISPGKTPSQEVTSEEENRATDSATIVSPPPSSPPSSLTTDPSQSLLSLEQEPLLSRMGSLRAPVDEDRLSPLVAADSLLEHVREDFSGLLPEEFISLSPPHEALDYHFGLEEGEGIRDLFDCDFGDLTPLDF

SEQ ID NO: 14905 - protein, 437 aa, Homo sapiens
MLQGPRALASAAGQTPKVVPAMSPTELWPSGLSSPQLCPATATYYTPLYPQTAPPAAAPGTCLDATPHGPEGQVVRCLPAGRLPAKRKLDLEGIGRPVVPEFPTPKGKCIRVDGLPSPKTPKSPGEKTRYDTSLGLLTKKFIYLLSESEDGVLDLNWAAEVLDVQKRRIYDITNVLEGIQLIRKKAKNNIQWVGRGMFEDPTRPGKQQQLGQELKELMNTEQALDQLIQSCSLSFKHLTEDKANKRLAYVTYQDIRAVGNFKEQTVIAVKAPPQTRLEVPDRTEDNLQIYLKSTQGPIEVYLCPEEVQEPDSPSEEPLPSTSTLCPSPDSAQPSSSTDPSIMEPTASSVPAPAPTPQQAPPPPSLVPLEATDSLLELPHPLLQQTEDQFLSPTLACSSPLISFSPSLDQDDYLWGLEAGEGISDLFDSYDLGDLLIN

SEQ ID NO: 14906 - protein, 465 aa, Homo sapiens
MRKGIQPALEQYLVTAGGGEGAAVVAAAAAASMDKRALLASPGFAAAAAAAAAPGAYIQILTTNTSTTSCSSSLQSGAVAAGPLLPSAPGAEQTAGSLLYTTPHGPSSRAGLLQQPPALGRGGSGGGGGPPAKRRLELGESGHQYLSDGLKTPKGKGRAALRSPDSPKTPKSPSEKTRYDTSLGLLTKKFIQLLSQSPDGVLDLNKAAEVLKVQKRRIYDITNVLEGIHLIKKKSKNNVQWMGCSLSEDGGMLAQCQGLSKEVTELSQEEKKLDELIQSCTLDLKLLTEDSENQRLAYVTYQDIRKISGLKDQTVIVVKAPPETRLEVPDSIESLQIHLASTQGPIEVYLCPEETETHSPMKTNNQDHNGNIPKPASKDLASTNSGHSDCSVSMGNLSPLASPANLLQQTEDQIPSNLEGPFVNLLPPLLQEDYLLSLGEEEGISDLFDAYDLEKLPLVEDFMCS

SEQ ID NO: 14907 - protein, 413 aa, Homo sapiens
MAEAGPQAPPPPGTPSRHEKSLGLLTTKFVSLLQEAKDGVLDLKLAADTLAVRQKRRIYDITNVLEGIGLIEKKSKNSIQWKGVGPGCNTREIADKLIELKAEIEELQQREQELDQHKVWVQQSIRNVTEDVQNSCLAYVTHEDICRCFAGDTLLAIRAPSGTSLEVPIPEGLNGQKKYQIHLKSVSGPIEVLLVNKEAWSSPPVAVPVPPPEDLLQSPSAVSTPPPLPKPALAQSQEASRPNSPQLTPTAVPGSAEVQGMAGPAAEITVSGGPGTDSKDSGELSSLPLGPTTLDTRPLQSSALLDSSSSSSSSSSSSSNSNSSSSSGPNPSTSFEPIKADPTGVLELPKELSEIFDPTRECMSSELLEELMSSEVFAPLLRLSPPPGDHDYIYNLDESEGVCDLFDVPVLNL

SEQ ID NO: 14908 - protein, 346 aa, Homo sapiens; identical to SEQ ID NO: 4477

SEQ ID NO: 14909 - protein, 281 aa, Homo sapiens
MSQQRPARKLPSLLLDPTEETVRRRCRDPINVEGLLPSKIRINLEDNVQYVSMRKALKVKRPRFDVSLVYLTRKFMDLVRSAPGGILDLNKVATKLGVRKRRVYDITNVLDGIDLVEKKSKNHIRWIGSDLSNFGAVPQQKKLQEELSDLSAMEDALDELIKDCAQQLFELTDDKENERLAYVTYQDIHSIQAFHEQIVIAVKAPAETRLDVPAPREDSITVHIRSTNGPIDVYLCEVEQGQTSNKRSEGVGTSSSESTHPEGPEEEENPQQSEELLEVSN

SEQ ID NO: 14910 - protein, 911 aa, Homo sapiens
MEVNCLTLKDLISPRQPRLDFAVEDGENAQKENIFVDRSRMAPKTPIKNEPIDLSKQKKFTPERNPITPVKFVDRQQAEPWTPTANLKMLISAASPDIRDREKKKGLFRPIENKDDAFTDSLQLDVVGDSAVDEFEKQRPSRKQKSLGLLCQKFLARYPSYPLSTEKTTISLDEVAVSLGVERRRIYDIVNVLESLHLVSRVAKNQYGWHGRHSLPKTLRNLQRLGEEQKYEEQMAYLQQKELDLIDYKFGERKKDGDPDSQEQQLLDFSEPDCPSSSANSRKDKSLRIMSQKFVMLFLVSKTKIVTLDVAAKILIEESQDAPDHSKFKTKVRRLYDIANVLTSLALIKKVHVTEERGRKPAFKWIGPVDFSSSDEELVDVSASVLPELKRETYGQIQVCAKQKLARHGSFNTVQASERIQRKVNSEPSSPYREEQGSGGYSLEIGSLAAVYRQKIEDNSQGKAFASKRVVPPSSSLDPVAPFPVLSVDPEYCVNPLAHPVFSVAQTDLQAFSMQNGLNGQVDVSLASAASAVESLKPALLAGQPLVYVPSASLFMLYGSLQEGPASGSGSERDDRSSEAPATVELSSAPSAQKRLCEERKPQEEDEPATKRQSREYEDGPLSLVMPKKPSDSTDLASPKTMGNRASIPLKDIHVNGQLPAAEEISGKATANSLVSSEWGNPSRNTDVEKPSKENESTKEPSLLQYLCVQSPAGLNGFNVLLSGSQTPPTVGPSSGQLPSFSVPCMVLPSPPLGPFPVLYSPAMPGPVSSTLGALPNTGPVNFSLPGLGSIAQLLVGPTAVVNPKSSTLPSADPQLQSQPSLNLSPVMSRSHSVVQQPESPVYVGHPVSVVKLHQSPVPVTPKSIQRTHRETFFKTPGSLGDPVLKRRERNQSRNTSSAQRRLEIPSGGAD

SEQ ID NO: 14911 - protein, 867 aa, Homo sapiens
MENEKENLFCEPHKRGLMKTPLKESTTANIVLAEIQPDFGPLTTPTKPKEGSQGEPWTPTANLKMLISAVSPEIRNRDQKRGLFDNRSGLPEAKDCIHEHLSGDEFEKSQPSRKEKSLGLLCHKFLARYPNYPNPAVNNDICLDEVAEELNVERRRIYDIVNVLESLHMVSRLAKNRYTWHGRHNLNKTLGTLKSIGEENKYAEQIMMIKKKEYEQEFDFIKSYSIEDHIIKSNTGPNGHPDMCFVELPGVEFRAASVNSRKDKSLRVMSQKFVMLFLVSTPQIVSLEVAAKILIGEDHVEDLDKSKFKTKIRRLYDIANVLSSLDLIKKVHVTEERGRKPAFKWTGPEISPNTSGSSPVIHFTPSDLEVRRSSKENCAKNLFSTRGKPNFTRHPSLIKLVKSIESDRRKINSAPSSPIKTNKAESSQNSAPFPSKMAQLAAICKMQLEEQSSESRQKVKVQLARSGPCKPVAPLDPPVNAEMELTAPSLIQPLGMVPLIPSPLSSAVPLILPQAPSGPSYAIYLQPTQAHQSVTPPQGLSPTVCTTHSSKATGSKDSTDATTEKAANDTSKASASTRPGSLLPAPERQGAKSRTREPAGERGSKRASMLEDSGSKKKFKEDLKGLENVSATLFPSGYLIPLTQCSSLGAESILSGKENSSALSPNHRIYSSPIAGVIPVTSSELTAVNFPSFHVTPLKLMVSPTSVAAVPVGNSPALASSHPVPIQNPSSAIVNFTLQHLGLISPNVQLSASPGSGIVPVSPRIESVNVAPENAGTQQGRATNYDSPVPGQSQPNGQSVAVTGAQQPVPVTPKGSQLVAESFFRTPGGPTKPTSSSCMDFEGANKTSLGTLFVPQRKLEVSTEDVH

SEQ ID NO: 14912 - protein, 784 aa, Homo sapiens
MEGAMAVRVTAAHTAEAQAEAGREAGEGAVAAVAAALAPSGFLGLPAPFSEEDEDDVHRCGRCQAEFTALEDFVQHKIQKACQRAPPEALPATPATTALLGQEVVPAAPGPEEPITVAHIVVEAASLAADISHASDLVGGGHIKEVIVAAEAELGDGEMAEAPGSPRQQGLGLAGEGEQAQVKLLVNKDGRYVCALCHKTFKTGSILKAHMVTHSSRKDHECKLCGASFRTKGSLIRHHRRHTDERPYKCSKCGKSFRESGALTRHLKSLTPCTEKIRFSVSKDVVVSKEDARAGSGAGAAGLGTATSSVTGEPIETSPVIHLVTDAKGTVIHEVHVQMQELSLGMKALAPEPPVSQELPCSSEGSRENLLHQAMQNSGIVLERAAGEEGALEPAPAAGSSPQPLAVAAPQLPVLEVQPLETQVASEASAVPRTHPCPQCSETFPTAATLEAHKRGHTGPRPFACAQCGKAFPKAYLLKKHQEVHVRERRFRCGDCGKLYKTIAHVRGHRRVHSDERPYPCPKCGKRYKTKNAQQVHFRTHLEEKPHVCQFCSRGFREKGSLVRHVRHHTGEKPFKCYKCGRGFAEHGTLNRHLRTKGGCLLEVEELLVSEDSPAAATTVLTEDPHTVLVEFSSVVADTQEYIIEATADDAETSEATEIIEGTQTEVDSHIMKVVQQIVHQASAGHQIIVQNVTMDEETALGPEAAAADTITIATPESLTEQVAMTLASAISEGTVLAARAGTSGTEQATVTMVSSEDIEILEHAGELVIASPEGQLEVQTVIV

SEQ ID NO: 14913 - protein, 591 aa, Homo sapiens
MFGIQESIQRSGSSMKEEPLGSGMNAVRTWMQGAGVLDANTAAQSGVGLARAHFEKQPPSNLRKSNFFHFVLALYDRQGQPVEIERTAFVGFVEKEKEANSEKTNNGIHYRLQLLYSNGIRTEQDFYVRLIDSMTKQAIVYEGQDKNPEMCRVLLTHEIMCSRCCDKKSCGNRNETPSDPVIIDRFFLKFFLKCNQNCLKNAGNPRDMRRFQVVVSTTVNVDGHVLAVSDNMFVHNNSKHGRRARRLDPSEGTPSYLEHATPCIKAISPSEGWTTGGATVIIIGDNFFDGLQVIFGTMLVWSELITPHAIRVQTPPRHIPGVVEVTLSYKSKQFCKGTPGRFIYTALNEPTIDYGFQRLQKVIPRHPGDPERLPKEVILKRAADLVEALYGMPHNNQEIILKRAADIAEALYSVPRNHNQLPALANTSVHAGMMGVNSFSGQLAVNVSEASQATNQGFTRNSSSVSPHGYVPSTTPQQTNYNSVTTSMNGYGSAAMSNLGGSPTFLNGSAANSPYAIVPSSPTMASSTSLPSNCSSSSGIFSFSPANMVSAVKQKSAFAPVVRPQTSPPPTCTSTNGNSLQAISGMIVPPM

SEQ ID NO: 14914 - protein, 575 aa, Homo sapiens
MFGIQDTLGRGPTLKEKSLGAEMDSVRSWVRNVGVVDANVAAQSGVALSRAHFEKQPPSNLRKSNFFHFVLALYDRQGQPVEIERTAFVDFVENDKEQGNEKTNNGTHYKLQLLYSNGVRTEQDLYVRLIDSVTKQPIAYEGQNKNPEMCRVLLTHEVMCSRCCEKKSCGNRNETPSDPVIIDRFFLKFFLKCNQNCLKTAGNPRDMRRFQVVLSTTVNVDGHVLAVSDNMFVHNNSKHGRRARRLDPSEATPCIKAISPSEGWTTGGAMVIIIGDNFFDGLQVVFGTMLVWSELITPHAIRVQTPPRHIPGVVEVTLSYKSKQFCKGAPGRFIYTALNEPTIDYGFQRLQKVIPRHPGDPERLAKEMLLKRAADLVEALYGTPHNNQDIILKRAADIAEALYSVPRNPSQLPALSSSPAHSGMMGINSYGSQLGVSISESTQGNNQGYIRNTSSISPRGYSSSSTPQQSNYSTSSNSMNGYSNVPMANLGVPGSPGFLNGSPTGSPYGIMSSSPTVGSSSTSSILPFSSSVFPAVKQKSAFAPVIRPQGSPSPACSSGNGNGFRAMTGLVVPPM

SEQ ID NO: 14915 - protein, 596 aa, Homo sapiens
MFGIQENIPRGGTTMKEEPLGSGMNPVRSWMHTAGVVDANTAAQSGVGLARAHFEKQPPSNLRKSNFFHFVLALYDRQGQPVEIERTAFVDFVEKEKEPNNEKTNNGIHYKLQLLYSNGVRTEQDLYVRLIDSMTKQAIVYEGQDKNPEMCRVLLTHEIMCSRCCDKKSCGNRNETPSDPVIIDRFFLKFFLKCNQNCLKNAGNPRDMRRFQVVVSTTVNVDGHVLAVSDNMFVHNNSKHGRRARRLDPSEGTAPSYLENATPCIKAISPSEGWTTGGATVIIIGDNFFDGLQVVFGTMLVWSELITPHAIRVQTPPRHIPGVVEVTLSYKSKQFCKGAPGRFVYTALNEPTIDYGFQRLQKVIPRHPGDPERLPKEVLLKRAADLVEALYGMPHNNQEIILKRAADIAEALYSVPRNHNQIPTLGNNPAHTGMMGVNSFSSQLAVNVSETSQANDQVGYSRNTSSVSPRGYVPSSTPQQSNYNTVSTSMNGYGSGAMASLGVPGSPGFLNGSSANSPYGIVPSSPTMAASSVTLPSNCSSTHGIFSFSPANVISAVKQKSAFAPVVRPQASPPPSCTSANGNGLQAMSGLVVPPM

SEQ ID NO: 14916 - protein, 602 aa, Homo sapiens
MFPAQDALPRSGLNLKEEPLLPAGLGSVRSWMQGAGILDASTAAQSGVGLARAHFEKQPPSNLRKSNFFHFVLAMYDRQGQPVEVERTAFIDFVEKDREPGAEKTNNGIHYRLRLVYNNGLRTEQDLYVRLIDSMSKQAIIYEGQDKNPEMCRVLLTHEIMCSRCCDRKSCGNRNETPSDPVIIDRFFLKFFLKCNQNCLKNAGNPRDMRRFQVVVSTTVSVDGHVLAVSDNMFVHNNSKHGRRARRLDPSEAATPCIKAISPGEGWTTGGATVIVIGDNFFDGLQVVFGNVLVWSELITPHAIRVQTPPRHIPGVVEVTLSYKSKQFCKGCPGRFVYTALNEPTIDYGFQRLQKVIPRHPGDPERLPKEVLLKRAADLAEALYGVPGSNQELLLKRAADVAEALYSTPRAPGPLAPLAPSHPHPAVVGINAFSSPLAIAVGDATPGPEPGYARSCSSASPRGFAPSPGSQQSGYGGGLGAGLGGYGAPGVAGLGVPGSPSFLNGSTATSPFAIMPSSPPLAAASSMSLPAAAPTTSVFSFSPVNMISAVKQRSAFAPVLRPPSSPPQACPRAHGEGLPDQSFEDSDKFHSPARGLQGLAYS

SEQ ID NO: 14917 - protein, 706 aa, Homo sapiens
MTTLKEAVTFKDVAVVFTEEELRLLDLAQRKLYREVMLENFRNLLSVGHQSLHRDTFHFLKEEKFWMMETATQREGNLGGKIQMEMETVSESGTHEGLFSHQTWEQISSDLTRFQDSMVNSFQFSKQDDMPCQVDAGLSIIHVRQKPSEGRTCKKSFSDVSVLDLHQQLQSREKSHTCDECGKSFCYSSALRIHQRVHMGEKLYNCDVCGKEFNQSSHLQIHQRIHTGEKPFKCEQCGKGFSRRSGLYVHRKLHTGVKPHICEKCGKAFIHDSQLQEHQRIHTGEKPFKCDICCKSFRSRANLNRHSMVHMREKPFRCDTCGKSFGLKSALNSHRMVHTGEKRYKCEECGKRFIYRQDLYKHQIDHTGEKPYNCKECGKSFRWASGLSRHVRVHSGETTFKCEECGKGFYTNSQRYSHQRAHSGEKPYRCEECGKGYKRRLDLDFHQRVHRGEKPYNCKECGKSFGWASCLLNHQRIHSGEKPFKCEECGKRFTQNSQLYTHRRVHSGEKPFKCEECGKRFTQNSQLYSHRRVHTGVKPYKCEECGKGFNSKFNLDMHQRVHTGERPYNCKECGKSFSRASSILNHKRLHGDEKPFKCEECGKRFTENSQLHSHQRVHTGEKPYKCEKCGKSFRWASTHLTHQRLHSREKLLQCEDCGKSIVHSSCLKDQQRDQSGEKTSKCEDCGKRYKRRLNLDTLLSLFLNDT

SEQ ID NO: 14918 - protein, 476 aa, Homo sapiens
MMTAKAVDKIPVTLSGFVHQLSDNIYPVEDLAATSVTIFPNAELGGPFDQMNGVAGDGMINIDMTGEKRSLDLPYPSSFAPVSAPRNQTFTYMGKFSIDPQYPGASCYPEGIINIVSAGILQGVTSPASTTASSSVTSASPNPLATGPLGVCTMSQTQPDLDHLYSPPPPPPPYSGCAGDLYQDPSAFLSAATTSTSSSLAYPPPPSYPSPKPATDPGLFPMIPDYPGFFPSQCQRDLHGTAGPDRKPFPCPLDTLRVPPPLTPLSTIRNFTLGGPSAGVTGPGASGGSEGPRLPGSSSAAAAAAAAAAYNPHHLPLRPILRPRKYPNRPSKTPVHERPYPCPAEGCDRRFSRSDELTRHIRIHTGHKPFQCRICMRNFSRSDHLTTHIRTHTGEKPFACDYCGRKFARSDERKRHTKIHLRQKERKSSAPSASVPAPSTASCSGGVQPGGTLCSSNSSSLGGGPLAPCSSRTRTP

SEQ ID NO: 14919 - protein, 387 aa, Homo sapiens
MTGKLAEKLPVTMSSLLNQLPDNLYPEEIPSALNLFSGSSDSVVHYNQMATENVMDIGLTNEKPNPELSYSGSFQPAPGNKTVTYLGKFAFDSPSNWCQDNIISLMSAGILGVPPASGALSTQTSTASMVQPPQGDVEAMYPALPPYSNCGDLYSEPVSFHDPQGNPGLAYSPQDYQSAKPALDSNLFPMIPDYNLYHHPNDMGSIPEHKPFQGMDPIRVNPPPITPLETIKAFKDKQIHPGFGSLPQPPLTLKPIRPRKYPNRPSKTPLHERPHACPAEGCDRRFSRSDELTRHLRIHTGHKPFQCRICMRSFSRSDHLTTHIRTHTGEKPFACEFCGRKFARSDERKRHAKIHLKQKEKKAEKGGAPSASSAPPVSLAPVVTTCA

SEQ ID NO: 14920 - protein, 589 aa, Homo sapiens
MAVARGVGSPEPAPPQLYKWGGCGLGEPGSALERRGAAARGRCGRARAPRLPDSFPRGECPKPGARAPRSVRCGEPLPPASPPPARPQAQRARPRAPHSRRRAMLHLSEFSEPDALLVKSTEGCCAEPSAELPRLPARDAPAATGYPGAGDFLSWALNSCGASGDLADSCFLEGPAPTPPPGLSYSGSFFIQAVPEHPHDPEALFNLMSGILGLAPFPGPEAAASRSPLDAPFPAGSDALLPGPPDLYSPDLGAAPFPEAFWEASPCAGAPSQCLYEPQLSPPDVKPGLRAPPASPALDAVSAFKGPYAPWELLSVGAPGNCGSQGDYQAAPEARFPVIGTKIEDLLSISCPAELPAVPANRLYPSGAYDAFPLAPGDLGEGAEGLPGLLTPPSGEGGSSGDGGEFLASTQPQLSPLGLRSAAAADFPKPLVADIPGSSGVAAPPVPPPPPTPFPQAKARRKGRRGGKCSTRCFCPRPHAKAFACPVESCVRSFARSDELNRHLRIHTGHKPFQCRICLRNFSRSDHLTTHVRTHTGEKPFACDVCGRRFARSDEKKRHSKVHLKQKARAEERLKGLGFYSLGLSFASL

SEQ ID NO: 14921 - protein, 300 aa, Homo sapiens; identical to SEQ ID NO: 4633

SEQ ID NO: 14922 - protein, 619 aa, Homo sapiens
MAAVVQQNDLVFEFASNVMEDERQLGDPAIFPAVIVEHVPGADILNSYAGLACVEEPNDMITESSLDVAEEEIIDDDDDDITLTVEASCHDGDETIETIEAAEALLNMDSPGPMLDEKRINNNIFSSPEDDMVVAPVTHVSVTLDGIPEVMETQQVQEKYADSPGASSPEQPKRKKGRKTKPPRPDSPATTPNISVKKKNKDGKGNTIYLWEFLLALLQDKATCPKYIKWTQREKGIFKLVDSKAVSRLWGKHKNKPDMNYETMGRALRYYYQRGILAKVEGQRLVYQFKEMPKDLIYINDEDPSSSIESSDPSLSSSATSNRNQTSRSRVSSSPGVKGGATTVLKPGNSKAAKPKDPVEVAQPSEVLRTVQPTQSPYPTQLFRTVHVVQPVQAVPEGEAARTSTMQDETLNSSVQSIRTIQAPTQVPVVVSPRNQQLHTVTLQTVPLTTVIASTDPSAGTGSQKFILQAIPSSQPMTVLKENVMLQSQKAGSPPSIVLGPAQVQQVLTSNVQTICNGTVSVASSPSFSATAPVVTFSPRSSQLVAHPPGTVITSVIKTQETKTLTQEVEKKESEDHLKENTEKTEQQPQPYVMVVSSSNGFTSQVAMKQNELLEPNSF

SEQ ID NO: 14923 - protein, 593 aa, Homo sapiens
MTSAVVDSGGTILELSSNGVENQEESEKVSEYPAVIVEPVPSARLEQGYAAQVLVYDDETYMMQDVAEEQEVETENVETVEASVHSSNAHCTDKTIEAAEALLHMESPTCLRDSRSPVEVFVPPCVSTPEFIHAAMRPDVITETVVEVSTEESEPMDTSPIPTSPDSHEPMKKKKVGRKPKTQQSPISNGSPELGIKKKPREGKGNTTYLWEFLLDLLQDKNTCPRYIKWTQREKGIFKLVDSKAVSKLWGKHKNKPDMNYETMGRALRYYYQRGILAKVEGQRLVYQFKDMPKNIVVIDDDKSETCNEDLAGTTDEKSLERVSLSAESLLKAASSVRSGKNSSPINCSRAEKGVARVVNITSPGHDASSRSPTTTASVSATAAPRTVRVAMQVPVVMTSLGQKISTVAVQSVNAGAPLITSTSPTTATSPKVVIQTIPTVMPASTENGDKITMQPAKIITIPATQLAQCQLQTKSNLTGSGSINIVGTPLAVRALTPVSIAHGTPVMRLSMPTQQASGQTPPRVISAVIKGPEVKSEAVAKKQEHDVKTLQLVEEKPADGNKTVTHVVVVSAPSAIALPVTMKTEGLVTCEK

SEQ ID NO: 14924 - protein, 371 aa, Homo sapiens
MAATCEISNIFSNYFSAMYSSEDSTLASVPPAATFGADDLVLTLSNPQMSLEGTEKASWLGEQPQFWSKTQVLDWISYQVEKNKYDASAIDFSRCDMDGATLCNCALEELRLVFGPLGDQLHAQLRDLTSSSSDELSWIIELLEKDGMAFQEALDPGPFDQGSPFAQELLDDGQQASPYHPGSCGAGAPSPGSSDVSTAGTGASRSSHSSDSGGSDVDLDPTDGKLFPSDGFRDCKKGDPKHGKRKRGRPRKLSKEYWDCLEGKKSKHAPRGTHLWEFIRDILIHPELNEGLMKWENRHEGVFKFLRSEAVAQLWGQKKKNSNMTYEKLSRAMRYYYKREILERVDGRRLVYKFGKNSSGWKEEEVLQSRN

SEQ ID NO: 14925 - protein, 663 aa, Homo sapiens
MAITLQPSDLIFEFASNGMDDDIHQLEDPSVFPAVIVEQVPYPDLLHLYSGLELDDVHNGIITDGTLCMTQDQILEGSFLLTDDNEATSHTMSTAEVLLNMESPSDILDEKQIFSTSEMLPDSDPAPAVTLPNYLFPASEPDALNRAGDTSDQEGHSLEEKASREESAKKTGKSKKRIRKTKGNRSTSPVTDPSIPIRKKSKDGKGSTIYLWEFLLALLQDRNTCPKYIKWTQREKGIFKLVDSKAVSKLWGKQKNKPDMNYETMGRALRYYYQRGILAKVEGQRLVYQFKEMPKDLVVIEDEDESSEATAAPPQASTASVASASTTRRTSSRVSSRSAPQGKGSSSWEKPKIQHVGLQPSASLELGPSLDEEIPTTSTMLVSPAEGQVKLTKAVSASSVPSNIHLGVAPVGSGSALTLQTIPLTTVLTNGPPASTTAPTQLVLQSVPAASTFKDTFTLQASFPLNASFQDSQVAAPGAPLILSGLPQLLAGANRPTNPAPPTVTGAGPAGPSSQPPGTVIAAFIRTSGTTAAPRVKEGPLRSSSYVQGMVTGAPMEGLLVPEETLRELLRDQAHLQPLPTQVVSRGSHNPSLLGNQTLSPPSRPTVGLTPVAELELSSGSGSLLMAEPSVTTSGSLLTRSPTPAPFSPFNPTSLIKMEPHDI

SEQ ID NO: 14926 - protein, 265 aa, Homo sapiens
MPSLPHSHRVMLDSVTHSTFLPNASFCDPLMSWTDLFSNEEYYPAFEHQTACDSYWTSVHPEYWTKRHVWEWLQFCCDQYKLDTNCISFCNFNISGLQLCSMTQEEFVEAAGLCGEYLYFILQNIRTQGYSFFNDAEESKATIKDYADSNCLKTSGIKSQDCHSHSRTSLQSSHLWEFVRDLLLSPEENCGILEWEDREQGIFRVVKSEALAKMWGQRKKNDRMTYEKLSRALRYYYKTGILERVDRRLVYKFGKNAHGWQEDKL

SEQ ID NO: 14927 - protein, 428 aa, Homo sapiens
MDPSVTLWQFLLQLLREQGNGHIISWTSRDGGEFKLVDAEEVARLWGLRKNKTNMNYDKLSRALRYYYDKNIIRKVSGQKFVYKFVSYPEVAGCSTEDCPPQPEVSVTSTMPNVAPAAIHAAPGDTVSGKPGTPKGAGMAGPGGLARSSRNEYMRSGLYSTFTIQSLQPQPPPHPRPAVVLPSAAPAGAAAPPSGSRSTSPSPLEACLEAEEAGLPLQVILTPPEAPNLKSEELNVEPGLGRALPPEVKVEGPKEELEVAGERGFVPETTKAEPEVPPQEGVPARLPAVVMDTAGQAGGHAASSPEISQPQKGRKPRDLELPLSPSLLGGPGPERTPGSGSGSGLQAPGPALTPSLLPTHTLTPVLLTPSSLPPSIHFWSTLSPIAPRSPAKLSFQFPSSGSAQVHIPSISVDGLSTPVVLSPGPQKP

SEQ ID NO: 14928 - protein, 407 aa, Homo sapiens
MESAITLWQFLLQLLLDQKHEHLICWTSNDGEFKLLKAEEVAKLWGLRKNKTNMNYDKLSRALRYYYDKNIIKKVIGQKFVYKFVSFPEILKMDPHAVEISRESLLLQDSDCKASPEGREAHKHGLAALRSTSRNEYIHSGLYSSFTINSLQNPPDAFKAIKTEKLEEPPEDSPPVEEVRTVIRFVTNKTDKHVTRPVVSLPSTSEAAAASAFLASSVSAKISSLMLPNAASISSASPFSSRSPSLSPNSPLPSEHRSLFLEAACHDSDSLEPLNLSSGSKTKSPSLPPKAKKPKGLEISAPPLVLSGTDIGSIALNSPALPSGSLTPAFFTAQTPNGLLLTPSPLLSSIHFWSSLSPVAPLSPARLQGPSTLFQFPTLLNGHMPVPIPSLDRAASPVLLSSNSQKS

SEQ ID NO: 14929 - protein, 431 aa, Homo sapiens
MDSAITLWQFLLQLLQKPQNKHMICWTSNDGQFKLLQAEEVARLWGIRKNKPNMNYDKLSRALRYYYVKNIIKKVNGQKFVYKFVSYPEILNMDPMTVGRIEGDCESLNFSEVSSSSKDVENGGKDKPPQPGAKTSSRNDYIHSGLYSSFTLNSLNSSNVKLFKLIKTENPAEKLAEKKSPQEPTPSVIKFVTTPSKKPPVEPVAATISIGPSISPSSEETIQALETLVSPKLPSLEAPTSASNVMTAFATTPPISSIPPLQEPPRTPSPPLSSHPDIDTDIDSVASQPMELPENLSLEPKDQDSVLLEKDKVNNSSRSKKPKGLELAPTLVITSSDPSPLGILSPSLPTASLTPAFFSQTPIILTPSPLLSSIHFWSTLSPVAPLSPARLQGANTLFQFPSVLNSHGPFTLSGLDGPSTPGPFSPDLQKT

SEQ ID NO: 14930 - protein, 1045 aa, Homo sapiens
MNLQAQPKAQNKRKRCLFGGQEPAPKEQPPPLQPPQQSIRVKEEQYLGHEGPGGAVSTSQPVELPPPSSLALLNSVVYGPERTSAAMLSQQVASVKWPNSVMAPGRGPERGGGGGVSDSSWQQQPGQPPPHSTWNCHSLSLYSATKGSPHPGVGVPTYYNHPEALKREKAGGPQLDRYVRPMMPQKVQLEVGRPQAPLNSFHAAKKPPNQSLPLQPFQLAFGHQVNRQVFRQGPPPPNPVAAFPPQKQQQQQQPQQQQQQQQAALPQMPLFENFYSMPQQPSQQPQDFGLQPAGPLGQSHLAHHSMAPYPFPPNPDMNPELRKALLQDSAPQPALPQVQIPFPRRSRRLSKEGILPPSALDGAGTQPGQEATGNLFLHHWPLQQPPPGSLGQPHPEALGFPLELRESQLLPDGERLAPNGREREAPAMGSEEGMRAVSTGDCGQVLRGGVIQSTRRRRRASQEANLLTLAQKAVELASLQNAKDGSGSEEKRKSVLASTTKCGVEFSEPSLATKRAREDSGMVPLIIPVSVPVRTVDPTEAAQAGGLDEDGKGPEQNPAEHKPSVIVTRRRSTRIPGTDAQAQAEDMNVKLEGEPSVRKPKQRPRPEPLIIPTKAGTFIAPPVYSNITPYQSHLRSPVRLADHPSERSFELPPYTPPPILSPVREGSGLYFNAIISTSTIPAPPPITPKSAHRTLLRTNSAEVTPPVLSVMGEATPVSIEPRINVGSRFQAEIPLMRDRALAAADPHKADLVWQPWEDLESSREKQRQVEDLLTAACSSIFPGAGTNQELALHCLHESRGDILETLNKLLLKKPLRPHNHPLATYHYTGSDQWKMAERKLFNKGIAIYKKDFFLVQKLIQTKTVAQCVEFYYTYKKQVKIGRNGTLTFGDVDTSDEKSAQEEVEVDIKTSQKFPRVPLPRRESPSEERLEPKREVKEPRKEGEEEVPEIQEKEEQEEGRERSRRAAAVKATQTLQANESASDILILRSHESNAPGSAGGQASEKPREGTGKSRRALPFSEKKKKTETFSKTQNQENTFPCKKCGR

SEQ ID NO: 14931 - protein, 257 aa, Homo sapiens
MFQPAAKRGFTIESLVAKDGGTGGGTGGGGAGSHLLAAAASEEPLRPTALNYPHPSAAEAAFVSGFPAAAAAGAGRSLYGGPELVFPEAMNHPALTVHPAHQLGASPLQPPHSFFGAQHRDPLHFYPWVLRNRFFGHRFQASDVPQDGLLLHGPFARKPKRIRTAFSPSQLLRLERAFEKNHYVVGAERKQLAGSLSLSETQVKVWFQNRRTKYKRQKLEEEGPESEQKKKGSHHINRWRIATKQANGEDIDVTSND

SEQ ID NO: 14932 - protein, 252 aa, Homo sapiens
MFQPAPKRCFTIESLVAKDSPLPASRSEDPIRPAALSYANSSPINPFLNGFHSAAAAAAGRGVYSNPDLVFAEAVSHPPNPAVPVHPVPPPHALAAHPLPSSHSPHPLFASQQRDPSTFYPWLIHRYRYLGHRFQGNDTSPESFLLHNALARKPKRIRTAFSPSQLLRLEHAFEKNHYVVGAERKQLAHSLSLTETQVKVWFQNRRTKFKRQKLEEEGSDSQQKKKGTHHINRWRIATKQASPEEIDVTSDD

SEQ ID NO: 14933 - protein, 392 aa, Homo sapiens
MEEQQPEPKSQRDSALGAAAAATPGGLSLSLSPGASGSSGSGSDGDSVPVSPQPAPPSPPAAPCLPPLAHHPHLPPHPPPPPPQHLAAPAHQPQPAAQLHRTTNFFIDNILRPDFGCKKEQPPPQLLVAAAARGGAGGGGRVERDRGQTAAGRDPVHPLGTRAPGAASLLCAPDANCGPPDGSQPAAAGAGASKAGNPAAAAAAAAAAVAAAAAAAAAKPSDTGGGGSGGGAGSPGAQGTKYPEHGNPAILLMGSANGGPVVKTDSQQPLVWPAWVYCTRYSDRPSSGPRTRKLKKKKNEKEDKRPRTAFTAEQLQRLKAEFQANRYITEQRRQTLAQELSLNESQIKIWFQNKRAKIKKATGIKNGLALHLMAQGLYNHSTTTVQDKDESE

SEQ ID NO: 14934 - protein, 333 aa, Homo sapiens
MEENDPKPGEAAAAVEGQRQPESSPGGGSGGGGGSSPGEADTGRRRALMLPAVLQAPGNHQHPHRITNFFIDNILRPEFGRRKDAGTCCAGAGGGRGGGAGGEGGASGAEGGGGAGGSEQLLGSGSREPRQNPPCAPGAGGPLPAAGSDSPGDGEGGSKTLSLHGGAKKGGDPGGPLDGSLKARGLGGGDLSVSSDSDSSQAGANLGAQPMLWPAWVYCTRYSDRPSSGPRSRKPKKKNPNKEDKRPRTAFTAEQLQRLKAEFQTNRYLTEQRRQSLAQELSLNESQIKIWFQNKRAKIKKATGNKNTLAVHLMAQGLYNHSTTAKEGKSDSE

SEQ ID NO: 14935 - protein, 434 aa, Homo sapiens
MSILKIHAREIFDSRGNPTVEVDLFTSKGLFRAAVPSGASTGIYEALELRDNDKTRYMGKGVSKAVEHINKTIAPALVSKKLNVTEQEKIDKLMIEMDGTENKSKFGANAILGVSLAVCKAGAVEKGVPLYRHIADLAGNSEVILPVPAFNVINGGSHAGNKLAMQEFMILPVGAANFREAMRIGAEVYHNLKNVIKEKYGKDATNVGDEGGFAPNILENKEGLELLKTAIGKAGYTDKVVIGMDVAASEFFRSGKYDLDFKSPDDPSRYISPDQLADLYKSFIKDYPVVSIEDPFDQDDWGAWQKFTASAGIQVVGDDLTVTNPKRIAKAVNEKSCNCLLLKVNQIGSVTESLQACKLAQANGWGVMVSHRSGETEDTFIADLVVGLCTGQIKTGAPCRSERLAKYNQLLRIEEELGSKAKFAGRNFRNPLAK

SEQ ID NO: 14936 - protein, 686 aa, Homo sapiens
MQLGEQLLVSSVNLPGAHFYPLESARGGSGGSAGHLPSAAPSPQKLDLDKASKKFSGSLSCEAVSGEPAAASAGAPAAMLSDTDAGDAFASAAAVAKPGPPDGRKGSPCGEEELPSAAAAAAAAAAAAAATARYSMDSLSSERYYLQSPGPQGSELAAPCSLFPYQAAAGAPHGPVYPAPNGARYPYGSMLPPGGFPAAVCPPGRAQFGPGAGAGSGAGGSSGGGGGPGTYQYSQGAPLYGPYPGAAAAGSCGGLGGLGVPGSGFRAHVYLCNRPLWLKFHRHQTEMIITKQGRRMFPFLSFNINGLNPTAHYNVFVEVVLADPNHWRFQGGKWVTCGKADNNMQGNKMYVHPESPNTGSHWMRQEISFGKLKLTNNKGANNNNTQMIVLQSLHKYQPRLHIVEVTEDGVEDLNEPSKTQTFTFSETQFIAVTAYQNTDITQLKIDHNPFAKGFRDNYDSSHQIVPGGRYGVQSFFPEPFVNTLPQARYYNGERTVPQTNGLLSPQQSEEVANPPQRWLVTPVQQPGTNKLDISSYESEYTSSTLLPYGIKSLPLQTSHALGYYPDPTFPAMAGWGGRGSYQRKMAAGLPWTSRTSPTVFSEDQLSKEKVKEEIGSSWIETPPSIKSLDSNDSGVYTSACKRRRLSPSNSSNENSPSIKCEDINAEEYSKDTSKGMGGYYAFYTTP

SEQ ID NO: 14937 - protein, 870 aa, Homo sapiens
MTADKEKKRSSSERRKEKSRDAARCRRSKETEVFYELAHELPLPHSVSSHLDKASIMRLAISFLRTHKLLSSVCSENESEAEADQQMDNLYLKALEGFIAVVTQDGDMIFLSENISKFMGLTQVELTGHSIFDFTHPCDHEEIRENLSLKNGSGFGKKSKDMSTERDFFMRMKCTVTNRGRTVNLKSATWKVLHCTGQVKVYNNCPPHNSLCGYKEPLLSCLIIMCEPIQHPSHMDIPLDSKTFLSRHSMDMKFTYCDDRITELIGYHPEELLGRSAYEFYHALDSENMTKSHQNLCTKGQVVSGQYRMLAKHGGYVWLETQGTVIYNPRNLQPQCIMCVNYVLSEIEKNDVVFSMDQTESLFKPHLMAMNSIFDSSGKGAVSEKSNFLFTKLKEEPEELAQLAPTPGDAIISLDFGNQNFEESSAYGKAILPPSQPWATELRSHSTQSEAGSLPAFTVPQAAAPGSTTPSATSSSSSCSTPNSPEDYYTSLDNDLKIEVIEKLFAMDTEAKDQCSTQTDFNELDLETLAPYIPMDGEDFQLSPICPEERLLAENPQSTPQHCFSAMTNIFQPLAPVAPHSPFLLDKFQQQLESKKTEPEHRPMSSIFFDAGSKASLPPCCGQASTPLSSMGGRSNTQWPPDPPLHFGPTKWAVGDQRTEFLGAAPLGPPVSPPHVSTFKTRSAKGFGARGPDVLSPAMVALSNKLKLKRQLEYEEQAFQDLSGGDPPGGSTSHLMWKRMKNLRGGSCPLMPDKPLSANVPNDKFTQNPMRGLGHPLRHLPLPQPPSAISPGENSKSRFPPQCYATQYQDYSLSSAHKVSGMASRLLGPSFESYLLPELTRYDCEVNVPVLGSSTLLQGGDLLRALDQAT

SEQ ID NO: 14938 - protein, 548 aa, Homo sapiens
MKTPADTGFAFPDWAYKPESSPGSRQIQLWHFILELLRKEEYQGVIAWQGDYGEFVIKDPDEVARLWGVRKCKPQMNYDKLSRALRYYYNKRILHKTKGKRFTYKFNFNKLVLVNYPFIDVGLAGGAVPQSAPPVPSGGSHFRFPPSTPSEVLSPTEDPRSPPACSSSSSSLFSAVVARRLGRGSVSDCSDGTSELEEPLGEDPRARPPGPPDLGAFRGPPLARLPHDPGVFRVYPRPRGGPEPLSPFPVSPLAGPGSLLPPQLSPALPMTPTHLAYTPSPTLSPMYPSGGGGPSGSGGGSHFSFSPEDMKRYLQAHTQSVYNYHLSPRAFLHYPGLVVPQPQRPDKCPLPPMAPETPPVPSSASSSSSSSSSPFKFKLQPPPLGRRQRAAGEKAVAGADKSGGSAGGLAEGAGALAPPPPPPQIKVEPISEGESEEVEVTDISDEDEEDGEVFKTPRAPPAPPKPEPGEAPGASQCMPLKLRFKRRWSEDCRLEGGGGPAGGFEDEGEDKKVRGEGPGEAGGPLTPRRVSSDLQHATAQLSLEHRDS

SEQ ID NO: 14939 - protein, 486 aa, Homo sapiens
MIQTVPDPAAHIKEALSVVSEDQSLFECAYGTPHLAKTEMTASSSSDYGQTSKMSPRVPQQDWLSQPPARVTIKMECNPSQVNGSRNSPDECSVAKGGKMVGSPDTVGMNYGSYMEEKHMPPPNMTTNERRVIVPADPTLWSTDHVRQWLEWAVKEYGLPDVNILLFQNIDGKELCKMTKDDFQRLTPSYNADILLSHLHYLRETPLPHLTSDDVDKALQNSPRLMHARNTGGAAFIFPNTSVYPEATQRITTRPDLPYEPPRRSAWTGHGHPTPQSKAAQPSPSTVPKTEDQRPQLDPYQILGPTSSRLANPGSGQIQLWQFLLELLSDSSNSSCITWEGTNGEFKMTDPDEVARRWGERKSKPNMNYDKLSRALRYYYDKNIMTKVHGKRYAYKFDFHGIAQALQPHPPESSLYKYPSDLPYMGSYHAHPQKMNFVAPHPPALPVTSSSFFAAPNPYWNSPTGGIYPNTRLPTSHMPSHLGTYY

SEQ ID NO: 14940 - protein, 1159 aa, Homo sapiens
MPVRRGHVAPQNTFLDTIIRKFEGQSRKFIIANARVENCAVIYCNDGFCELCGYSRAEVMQRPCTCDFLHGPRTQRRAAAQIAQALLGAEERKVEIAFYRKDGSCFLCLVDVVPVKNEDGAVIMFILNFEVVMEKDMVGSPAHDTNHRGPPTSWLAPGRAKTFRLKLPALLALTARESSVRSGGAGGAGAPGAVVVDVDLTPAAPSSESLALDEVTAMDNHVAGLGPAEERRALVGPGSPPRSAPGQLPSPRAHSLNPDASGSSCSLARTRSRESCASVRRASSADDIEAMRAGVLPPPPRHASTGAMHPLRSGLLNSTSDSDLVRYRTISKIPQITLNFVDLKGDPFLASPTSDREIIAPKIKERTHNVTEKVTQVLSLGADVLPEYKLQAPRIHRWTILHYSPFKAVWDWLILLLVIYTAVFTPYSAAFLLKETEEGPPATECGYACQPLAVVDLIVDIMFIVDILINFRTTYVNANEEVVSHPGRIAVHYFKGWFLIDMVAAIPFDLLIFGSGSEELIGLLKTARLLRLVRVARKLDRYSEYGAAVLFLLMCTFALIAHWLACIWYAIGNMEQPHMDSRIGWLHNLGDQIGKPYNSSGLGGPSIKDKYVTALYFTFSSLTSVGFGNVSPNTNSEKIFSICVMLIGSLMYASIFGNVSAIIQRLYSGTARYHTQMLRVREFIRFHQIPNPLRQRLEEYFQHAWSYTNGIDMNAVLKGFPECLQADICLHLNRSLLQHCKPFRGATKGCLRALAMKFKTTHAPPGDTLVHAGDLLTALYFISRGSIEILRGDVVVAILGKNDIFGEPLNLYARPGKSNGDVRALTYCDLHKIHRDDLLEVLDMYPEFSDHFWSSLEITFNLRDTNMIPGSPGSTELEGGFSRQRKRKLSFRRRTDKDTEQPGEVSALGPGRAGAGPSSRGRPGGPWGESPSSGPSSPESSEDEGPGRSSSPLRLVPFSSPRPPGEPPGGEPLMEDCEKSSDTCNPLSGAFSGVSNIFSFWGDSRGRQYQELPRCPAPTPSLLNIPLSSPGRRPRGDVESRLDALQRQLNRLETRLSADMATVLQLLQRQMTLVPPAYSAVTTPGPGPTSTSPLLPVSPLPTLTLDSLSQVSQFMACEELPPGAPELPQEGPTRRLSLPGQLGALTSQPLHRHGSDPGS

SEQ ID NO: 14941 - protein, 595 aa, Homo sapiens [sequence omitted]

SEQ ID NO: 14942 - protein, 530 aa, Homo sapiens
MDIKNSPSSLNSPSSYNCSQSILPLEHGSIYIPSSYVDSHHEYPAMTFYSPAVMNYSIPSNVTNLEGGPGRQTTSPNVLWPTPGHLSPLVVHRQLSHLYAEPQKSPWCEARSLEHTLPVNRETLKRKVSGNRCASPVTGPGSKRDAHFCAVCSDYASGYHYGVWSCEGCKAFFKRSIQGHNDYICPATNQCTIDKNRRKSCQACRLRKCYEVGMVKCGSRRERCGYRLVRRQRSADEQLHCAGKAKRSGGHAPRVRELLLDALSPEQLVLTLLEAEPPHVLISRPSAPFTEASMMMSLTKLADKELVHMISWAKKIPGFVELSLFDQVRLLESCWMEVLMMGLMWRSIDHPGKLIFAPDLVLDRDEGKCVEGILEIFDMLLATTSRFRELKLQHKEYLCVKAMILLNSSMYPLVTATQDADSSRKLAHLLNAVTDALVWVIAKSGISSQQQSMRLANLLMLLSHVRHASNKGMEHLLNMKCKNVVPVYDLLLEMLNAHVLRGCKSSITGSECSPAEDSKSKEGSQNPQSQ

SEQ ID NO: 14943 - protein, 423 aa, Homo sapiens
MSSQVVGIEPLYIKAEPASPDSPKGSSETETEPPVALAPGPAPTRCLPGHKEEEDGEGAGPGEQGGGKLVLSSLPKRLCLVCGDVASGYHYGVASCEACKAFFKRTIQGSIEYSCPASNECEITKRRRKACQACRFTKCLRVGMLKEGVRLDRVRGGRQKYKRRPEVDPLPFPGPFPAGPLAVAGGPRKTAAPVNALVSHLLVVEPEKLYAMPDPAGPDGHLPAVATLCDLFDREIVVTISWAKSIPGFSSLSLSDQMSVLQSVWMEVLVLGVAQRSLPLQDELAFAEDLVLDEEGARAAGLGELGAALLQLVRRLQALRLEREEYVLLKALALANSDSVHIEDAEAVEQLREALHEALLEYEAGRAGPGGGAERRRAGRLLLTLPLLRQTAGKVLAHFYGVKLEGKVPMHKLFLEMLEAMMD

SEQ ID NO: 14944 - protein, 433 aa, Homo sapiens
MSSDDRHLGSSCGSFIKTEPSSPSSGIDALSHHSPSGSSDASGGFGLALGTHANGLDSPPMFAGAGLGGTPCRKSYEDCASGIMEDSAIKCEYMLNAIPKRLCLVCGDIASGYHYGVASCEACKAFFKRTIQGNIEYSCPATNECEITKRRRKSCQACRFMKCLKVGMLKEGVRLDRVRGGRQKYKRRLDSESSPYLSLQISPPAKKPLTKIVSYLLVAEPDKLYAMPPPGMPEGDIKALTTLCDLADRELVVIIGWAKHIPGFSSLSLGDQMSLLQSAWMEILILGIVYRSLPYDDKLVYAEDYIMDEEHSRLAGLLELYRAILQLVRRYKKLKVEKEEFVTLKALALANSDSMYIEDLEAVQKLQDLLHEALQDYELSQRHEEPWRTGKLLLTLPLLRQTAAKAVQHFYSVKLQGKVPMHKLFLEMLEAKV

SEQ ID NO: 14945 - protein, 458 aa, Homo sapiens
MDSVELCLPESFSLHYEEELLCRMSNKDRHIDSSCSSFIKTEPSSPASLTDSVNHHSPGGSSDASGSYSSTMNGHQNGLDSPPLYPSAPILGGSGPVRKLYDDCSSTIVEDPQTKCEYMLNSMPKRLCLVCGDIASGYHYGVASCEACKAFFKRTIQGNIEYSCPATNECEITKRRRKSCQACRFMKCLKVGMLKEGVRLDRVRGGRQKYKRRIDAENSPYLNPQLVQPAKKPYNKIVSHLLVAEPEKIYAMPDPTVPDSDIKALTTLCDLADRELVVIIGWAKHIPGFSTLSLADQMSLLQSAWMEILILGVVYRSLSFEDELVYADDYIMDEDQSKLAGLLDLNNAILQLVKKYKSMKLEKEEFVTLKAIALANSDSMHIEDVEAVQKLQDVLHEALQDYEAGQHMEDPRRAGKMLMTLPLLRQTSTKAVQHFYNIKLEGKVPMHKLFLEMLEAKV

SEQ ID NO: 14946 - protein, 406 aa, Homo sapiens
MESLRGYTHSDIGYRSLAVGEDIEEVNDEKLTVTSLMARGGEDEENTRSKPEYGTEAENNVGTEGSVPSDDQDREGGGGHEPEQQQEEPPLTKPEQQQEEPPLLELKQEQEEPPQTTVEGPQPAEGPQTAEGPQPPERKRRRRTAFTQFQLQELENFFDESQYPDVVARERLAARLNLTEDRVQVWFQNRRAKWKRNQRVLMLRNTATADLAHPLDMFLGGAYYAAPALDPALCVHLVPQLPRPPVLPVPPMPPRPPMVPMPPRPPIAPMPPMAPVPPGSRMAPVPPGPRMAPVPPWPPMAPVPPWPPMAPVPTGPPMAPVPPGPPMARVPPGPPMARVPPGPPMAPLPPGPPMAPLPPGPPMAPLPPGPPMAPLPPRSHVPHTGLAPVHITWAPVINSYYACPFF

SEQ ID NO: 14947 - protein, 441 aa, Homo sapiens
MKAAVDLKPTLTIIKTEKVDLELFPSPDMECADVPLLTPSSKEMMSQALKATFSGFTKEQQRLGIPKDPRQWTETHVRDWVMWAVNEFSLKGVDFQKFCMNGAALCALGKDCFLELAPDFVGDILWEHLEILQKEDVKPYQVNGVNPAYPESRYTSDYFISYGIEHAQCVPPSEFSEPSFITESYQTLHPISSEELLSLKYENDYPSVILRDPLQTDTLQNDYFAIKQEVVTPDNMCMGRTSRGKLGGQDSFESIESYDSCDRLTQSWSSQSSFNSLQRVPSYDSFDSEDYPAALPNHKPKGTFKDYVRDRADLNKDKPVIPAAALAGYTGSGPIQLWQFLLELLTDKSCQSFISWTGDGWEFKLSDPDEVARRWGKRKNKPKMNYEKLSRGLRYYYDKNIIHKTAGKRYVYRFVCDLQSLLGYTPEELHAMLDVKPDADE

SEQ ID NO: 14948 - protein, 469 aa, Homo sapiens
MNDFGIKNMDQVAPVANSYRGTLKRQPAFDTFDGSLFAVFPSLNEEQTLQEVPTGLDSISHDSANCELPLLTPCSKAVMSQALKATFSGFKKEQRRLGIPKNPWLWSEQQVCQWLLWATNEFSLVNVNLQRFGMNGQMLCNLGKERFLELAPDFVGDILWEHLEQMIKENQEKTEDQYEENSHLTSVPHWINSNTLGFGTEQAPYGMQTQNYPKGGLLDSMCPASTPSVLSSEQEFQMFPKSRLSSVSVTYCSVSQDFPGSNLNLLTNNSGTPKDHDSPENGADSFESSDSLLQSWNSQSSLLDVQRVPSFESFEDDCSQSLCLNKPTMSFKDYIQERSDPVEQGKPVIPAAVLAGFTGSGPIQLWQFLLELLSDKSCQSFISWTGDGWEFKLADPDEVARRWGKRKNKPKMNYEKLSRGLRYYYDKNIIHKTSGKRYVYRFVCDLQNLLGFTPEELHAILGVQPDTED

SEQ ID NO: 14949 - protein, 477 aa, Homo sapiens
MDGFYDQQVPYMVTNSQRGRNCNEKPTNVRKRKFINRDLAHDSEELFQDLSQLQETWLAEAQVPDNDEQFVPDYQAESLAFHGLPLKIKKEPHSPCSEISSACSQEQPFKFSYGEKCLYNVSAYDQKPQVGMRPSNPPTPSSTPVSPLHHASPNSTHTPKPDRAFPAHLPPSQSIPDSSYPMDHRFRRQLSEPCNSFPPLPTMPREGRPMYQRQMSEPNIPFPPQGFKQEYHDPVYEHNTMVGSAASQSFPPPLMIKQEPRDFAYDSEVPSCHSIYMRQEGFLAHPSRTEGCMFEKGPRQFYDDTCVVPEKFDGDIKQEPGMYREGPTYQRRGSLQLWQFLVALLDDPSNSHFIAWTGRGMEFKLIEPEEVARRWGIQKNRPAMNYDKLSRSLRYYYEKGIMQKVAGERYVYKFVCDPEALFSMAFPDNQRPLLKTDMERHINEEDTVPLSHFDESMAYMPEGGCCNPHPYNEGYVY

SEQ ID NO: 14950 - protein, 342 aa, Homo sapiens
MDLWNWDEASPQEVPPGNKLAGLEGAKLGFCFPDLALQGDTPTATAETCWKGTSSSLASFPQLDWGSALLHPEVPWGAEPDSQALPWSGDWTDMACTAWDSWSGASQTLGPAPLGPGPIPAAGSEGAAGQNCVPVAGEATSWSRAQAAGSNTSWDCSVGPDGDTYWGSGLGGEPRTDCTISWGGPAGPDCTTSWNPGLHAGGTTSLKRYQSSALTVCSEPSPQSDRASLARCPKTNHRGPIQLWQFLLELLHDGARSSCIRWTGNSREFQLCDPKEVARLWGERKRKPGMNYEKLSRGLRYYYRRDIVRKSGGRKYTYRFGGRVPSLAYPDCAGGGRGAETQ

SEQ ID NO: 14951 - protein, 512 aa, Homo sapiens
MKAGCSIVEKPEGGGGYQFPDWAYKTESSPGSRQIQLWHFILELLQKEEFRHVIAWQQGEYGEFVIKDPDEVARLWGRRKCKPQMNYDKLSRALRYYYNKRILHKTKGKRFTYKFNFNKLVMPNYPFINIRSSGVVPQSAPPVPTASSRFHFPPLDTHSPTNDVQPGRFSASSLTASGQESSNGTDRKTELSELEDGSAADWRRGVDPVSSRNAIGGGGIGHQKRKPDIMLPLFARPGMYPDPHSPFAVSPIPGRGGVLNVPISPALSLTPTIFSYSPSPGLSPFTSSSCFSFNPEEMKHYLHSQACSVFNYHLSPRTFPRYPGLMVPPLQCQMHPEESTQFSIKLQPPPVGRKNRERVESSEESAPVTTPTMASIPPRIKVEPASEKDPESLRQSAREKEEHTQEEGTVPSRTIEEEKGTIFARPAAPPIWPSVPISTPSGEPLEVTEDSEDRPGKEPSAPEKKEDALMPPKLRLKRRWNDDPEARELSKSGKFLWNGSGPQGLATAAADA

SEQ ID NO: 14952 - protein, 361 aa, Homo sapiens
MHCSCLAEGIPANPGNWISGLAFPDWAYKAESSPGSRQIQLWHFILELLQKEEFRHVIAWQQGEYGEFVIKDPDEVARLWGRRKCKPQMNYDKLSRALRYYYNKRILHKTKGKRFTYKFNFSKLIVVNYPLWEVRAPPSPHLLLGAPALCRPALVPVGVQSELLHSMLFAHQAMVEQLTGQQTPRGPPETSGDKKGSSSSVYRLGSAPGPCRLGLCCHLGSVQGELPGVASFTPPLPPPLPSNWTCLSGPFLPPLPSEQQLPGAFKPDILLPGPRSLPGAWHFPGLPLLAGLGQGAGERLWLLSLRPEGLEVKPAPMMEAKGGLDPREVFCPETRRLKTGEESLTSPNLENLKAVWPLDPP

SEQ ID NO: 14953 - protein, 484 aa, Homo sapiens
MERRMKAGYLDQQVPYTFSSKSPGNGSLREALIGPLGKLMDPGSLPPLDSEDLFQDLSHFQETWLAEAQVPDSDEQFVPDFHSENLAFHSPTTRIKKEPQSPRTDPALSCSRKPPLPYHHGEQCLYSSAYDPPRQIAIKSPAPGALGQSPLQPFPRAEQRNFLRSSGTSQPHPGHGYLGEHSSVFQQPLDICHSFTSQGGGREPLPAPYQHQLSEPCPPYPQQSFKQEYHDPLYEQAGQPAVDQGGVNGHRYPGAGVVIKQEQTDFAYDSDVTGCASMYLHTEGFSGPSPGDGAMGYGYEKPLRPFPDDVCVVPEKFEGDIKQEGVGAFREGPPYQRRGALQLWQFLVALLDDPTNAHFIAWTGRGMEFKLIEPEEVARLWGIQKNRPAMNYDKLSRSLRYYYEKGIMQKVAGERYVYKFVCEPEALFSLAFPDNQRPALKAEFDRPVSEEDTVPLSHLDESPAYLPELAGPAQPFGPKGGYSY

SEQ ID NO: 14954 - protein, 510 aa, Homo sapiens
MDGFYDQQVPFMVPGKSRSEECRGRPVIDRKRKFLDTDLAHDSEELFQDLSQLQEAWLAEAQVPDDEQFVPDFQSDNLVLHAPPPTKIKRELHSPSSELSSCSHEQALGANYGEKCLYNYCAYDRKPPSGFKPLTPPTTPLSPTHQNPLFPPPQATLPTSGHAPAAGPVQGVGPAPAPHSLPEPGPQQQTFAVPRPPHQPLQMPKMMPENQYPSEQRFQRQLSEPCHPFPPQPGVPGDNRPSYHRQMSEPIVPAAPPPPQGFKQEYHDPLYEHGVPGMPGPPAHGFQSPMGIKQEPRDYCVDSEVPNCQSSYMRGGYFSSSHEGFSYEKDPRLYFDDTCVVPERLEGKVKQEPTMYREGPPYQRRGSLQLWQFLVTLLDDPANAHFIAWTGRGMEFKLIEPEEVARRWGIQKNRPAMNYDKLSRSLRYYYEKGIMQKVAGERYVYKFVCDPDALFSMAFPDNQRPFLKAESECHLSEEDTLPLTHFEDSPAYLLDMDRCSSLPYAEGFAY

SEQ ID NO: 14955 - protein, 452 aa, Homo sapiens
MSETPAQCSIKQERISYTPPESPVPSYASSTPLHVPVPRALRMEEDSIRLPAHLRLQPIYWSRDDVAQWLKWAENEFSLRPIDSNTFEMNGKALLLLTKEDFRYRSPHSGDVLYELLQHILKQRKPRILFSPFFHPGNSIHTQPEVILHQNHEEDNCVQRTPRPSVDNVHHNPPTIELLHRSRSPITTNHRPSPDPEQRPLRSPLDNMIRRLSPAERAQGPRPHQENNHQESYPLSVSPMENNHCPASSESHPKPSSPRQESTRVIQLMPSPIMHPLILNPRHSVDFKQSRLSEDGLHREGKPINLSHREDLAYMNHIMVSVSPPEEHAMPIGRIADCRLLWDYVYQLLSDSRYENFIRWEDKESKIFRIVDPNGLARLWGNHKNRTNMTYEKMSRALRHYYKLNIIRKEPGQRLLFRFMKTPDEIMSGRTDRLEHLESQELDEQIYQEDEC

SEQ ID NO: 14956 - protein, 341 aa, Homo sapiens
MQEGELAISPISPVAAMPPLGTHVQARCEAQINLLGEGGICKLPGRLRIQPALWSREDVLHWLRWAEQEYSLPCTAEHGFEMNGRALCILTKDDFRHRAPSSGDVLYELLQYIKTQRRALVCGPFFGGIFRLKTPTQHSPVPPEEVTGPSQMDTRRGHLLQPPDPGLTSNFGHLDDPGLARWTPGKEESLNLCHCAELGCRTQGVCSFPAMPQAPIDGRIADCRLLWDYVYQLLLDTRYEPYIKWEDKDAKIFRVVDPNGLARLWGNHKNRVNMTYEKMSRALRHYYKLNIIKKEPGQKLLFRFLKTPGKMVQDKHSHLEPLESQEQDRIEFKDKRPEISP

SEQ ID NO: 14957 - protein, 407 aa, Homo sapiens
MESRKDMVVFLDGGQLGTLVGKRVSNLSEAVGSPLPEPPEKMVPRGCLSPRAVPPATRERGGGGPEEEPVDGLAGSAAGPGAEPQVAGAAMLGPGPPAPSVDSLSGQGQPSSSDTESDFYEEIEVSCTPDCATGNAEYQHSKGSGSEALVGSPNGGSETPKSNGGSGGGGSQGTLACSASDQMRRYRTAFTREQIARLEKEFYRENYVSRPRRCELAAALNLPETTIKVWFQNRRMKDKRQRLAMTWPHPADPAFYTYMMSHAAAAGGLPYPFPSHLPLPYYSPVGLGAASAASAAASPFSGSLRPLDTFRVLSQPYPRPELLCAFRHPPLYPGPAHGLGASAGGPCSCLACHSGPANGLAPRAAAASDFTCASTSRSDSFLTFAPSVLSKASSVALDQREEVPLTR

SEQ ID NO: 14958 - protein, 476 aa, Homo sapiens
MMERIRKEMILMERGLHSPTAGKRFSNLSNSAGNAVLEALENSQHPARLSPRLPSAPLHSALGELPAKGKFEIDTLFNLQHTGSESTVSSEISSAAESRKKPGHYSEAAAEADMSSDVEVGCSALRSPGGLGAAQLKENNGKGYAESGSAAGTTTSASGSGLGSLHGGSGGSGGSAALGGSGSGADQVRRYRTAFTREQIARLEKEFYRENYVSRPRRCELAAALNLPETTIKVWFQNRRMKDKRQRLAMSWPHPADPSFYTYMMTHAAATGSLPYPFHSHVPLHYYPHVGVTAAAAAAAASGAAAAASSPFATSIRPLDTFRALSHPYSRPELLCSFRHPGLYQAPAAAAGLNSAASAAAAAAAAAAAASSAAAAGAPPSGGSAPCSCLSCHSSQSAAAAAAAAAAALGSRGGGGGGGGGGGGGGGGAGAGGGSDFGCSAAAPRSESGFLPYSAAVLSKTAVSPPDQRDEAPLTR

SEQ ID NO: 14959 - protein, 747 aa, Homo sapiens
MEIPNPPTSKCITYWKRKVKSEYMRLRQLKRLQANMGAKALYVANFAKVQEKTQILNEEWKKLRVQPVQSMKPVSGHPFLKKCTIESIFPGFASQHMLMRSLNTVALVPIMYSWSPLQQNFMVEDETVLCNIPYMGDEVKEEDETFIEELINNYDGKVHGEEEMIPGSVLISDAVFLELVDALNQYSDEEEEGHNDTSDGKQDDSKEDLPVTRKRKRHAIEGNKKSSKKQFPNDMIFSAIASMFPENGVPDDMKERYRELTEMSDPNALPPQCTPNIDGPNAKSVQREQSLHSFHTLFCRRCFKYDCFLHPFHATPNVYKRKNKEIKIEPEPCGTDCFLLLEGAKEYAMLHNPRSKCSGRRRRRHHIVSASCSNASASAVAETKEGDSDRDTGNDWASSSSEANSRCQTPTKQKASPAPPQLCVVEAPSEPVEWTGAEESLFRVFHGTYFNNFCSIARLLGTKTCKQVFQFAVKESLILKLPTDELMNPSQKKKRKHRLWAAHCRKIQLKKDNSSTQVYNYQPCDHPDRPCDSTCPCIMTQNFCEKFCQCNPDCQNRFPGCRCKTQCNTKQCPCYLAVRECDPDLCLTCGASEHWDCKVVSCKNCSIQRGLKKHLLLAPSDVAGWGTFIKESVQKNEFISEYCGELISQDEADRRGKVYDKYMSSFLFNLNNDFVVDATRKGNKIRFANHSVNPNCYAKVVMVNGDHRIGIFAKRAIQAGEELFFDYRYSQADALKYVGIERETDVL

SEQ ID NO: 14960 - protein, 746 aa, Homo sapiens
MGQTGKKSEKGPVCWRKRVKSEYMRLRQLKRFRRADEVKSMFSSNRQKILERTEILNQEWKQRRIQPVHILTSVSSLRGTRECSVTSDLDFPTQVIPLKTLNAVASVPIMYSWSPLQQNFMVEDETVLHNIPYMGDEVLDQDGTFIEELIKNYDGKVHGDRECGFINDEIFVELVNALGQYNDDDDDDDGDDPEEREEKQKDLEDHRDDKESRPPRKFPSDKIFEAISSMFPDKGTAEELKEKYKELTEQQLPGALPPECTPNIDGPNAKSVQREQSLHSFHTLFCRRCFKYDCFLHPFHATPNTYKRKNTETALDNKPCGPQCYQHLEGAKEFAAALTAERIKTPPKRPGGRRRGRLPNNSSRPSTPTINVLESKDTDSDREAGTETGGENNDKEEEEKKDETSSSSEANSRCQTPIKMKPNIEPPENVEWSGAEASMFRVLIGTYYDNFCAIARLIGTKTCRQVYEFRVKESSIIAPAPAEDVDTPPRKKKRKHRLWAAHCRKIQLKKDGSSNHVYNYQPCDHPRQPCDSSCPCVIAQNFCEKFCQCSSECQNRFPGCRCKAQCNTKQCPCYLAVRECDPDLCLTCGAADHWDSKNVSCKNCSIQRGSKKHLLLAPSDVAGWGIFIKDPVQKNEFISEYCGEIISQDEADRRGKVYDKYMCSFLFNLNNDFVVDATRKGNKIRFANHSVNPNCYAKVMMVNGDHRIGIFAKRAIQTGEELFFDYRYSQADALKYVGIEREMEIP

SEQ ID NO: 14961 - protein, 330 aa, Homo sapiens
MKRRQKRKHLENEESQETAEKGGGMSKSQEDALQPGSTRVAKGWSQGVGEVTSTSEYCSCVSSSRKLIHSGIQRIHRDSPQPQSPLAQVQERGETPPRSQHVSLSSYSSYKTCVSSLCVNKEERGMKIYYMQVQMNKGVAVSWETEETLESLEKQPRMEEVTLSEVVRVGTPPSDVSTRNLLSDSEPSGEEKEHEERTESDSLPGSPTVEDTPRAKTPDWLVTMENGFRCMACCRVFTTMEALQEHVQFGIREGFSCHVFHLTMAQLTGNMESESTQDEQEEENGNEKEEEEKPEAKEEEGQPTEEDLGLRRSWSQCPGCVFHSPKDRNS

SEQ ID NO: 14962 - protein, 166 aa, Homo sapiens
MAAYPESCVDTTVLDFVADLSLASPRRPLLCDFAPGVSLGDPALALREGRPRRMARFEEGDPEEEECEVDQGDGEEEEEEERGRGVSLLGRPKRKRVITYAQRQAANIRERKRMFNLNEAFDQLRRKVPTFAYEKRLSRIETLRLAIVYISFMTELLESCEKKESG

SEQ ID NO: 14963 - protein, 238 aa, Homo sapiens
MRQSGASQPLLINMYLPDPVGDGLFKDGKNPSWGPLSPAVQKGSGQIQLWQFLLELLADRANAGCIAWEGGHGEFKLTDPDEVARRWGERKSKPNMNYDKLSRALRYYYDKNIMSKVHGKRYAYRFDFQGLAQACQPPPAHAHAAAAAAAAAAAAQDGALYKLPAGLAPLPFPGLSKLNLMAASAGVAPAGFSYWPGPGPAATAAAATAALYPSPSLQPPPGPFGAVAAASHLGGHYH

SEQ ID NO: 14964 - protein, 475 aa, Homo sapiens
MDSSCHNATTKMLATAPARGNMMSTSKPLAFSIERIMARTPEPKALPVPHFLQGALPKGEPKHSLHLNSSIPCMIPFVPVAYDTSPKAGVTGSEPRKASLEAPAAPAAVPSAPAFSCSDLLNCALSLKGDLARDALPLQQYKLVRPRVVNHSSFHAMGALCYLNRGDGPCHPAAGVNIHPVASYFLSSPLHPQPKTYLAERNKLVVPAVEKYPSGVAFKDLSQAQLQHYMKESAQLLSEKIAFKTSDFSRGSPNAKPKVFTCEVCGKVFNAHYNLTRHMPVHTGARPFVCKVCGKGFRQASTLCRHKIIHTQEKPHKCNQCGKAFNRSSTLNTHTRIHAGYKPFVCEFCGKGFHQKGNYKNHKLTHSGEKQFKCNICNKAFHQVYNLTFHMHTHNDKKPFTCPTCGKGFCRNFDLKKHVRKLHDSSLGLARTPAGEPGTEPPPPLPQQPPMTLPPLQPPLPTPGPLQPGLHQGHQ

SEQ ID NO: 14965 - protein, 459 aa, Homo sapiens
MASSASLETMVPPACPRAGASPATSKTLAFSIERIMAKTSEPRAPFEPRPGALEADGSQGKKLLNLCSPLPCMIPLQPLGYEVPSKTLLSYSELWKSSLRAGGGGGGGGGGGGGGGGAPVCGASGLCKTNCGVCCKAELGLAPSALPAGRVIKPQVINQAVGLPASGSLYYFNYLDSTAYPPSELLSGHLFPSGLLNAQAPAALAAHPKLFLLENAKLAGLAADKFPHPAPYPHKERLPAPLEQVLKENSALTAERGGVKGHSKLPGGSADGKPKNFTCEVCGKVFNAHYNLTRHMPVHTGARPFVCKVCGKGFRQASTLCRHKIIHTQEKPHKCNQCGKAFNRSSTLNTHIRIHAGYKPFVCEFCGKGFHQKGNYKNHKLTHSGEKQYKCTICNKAFHQVYNLTFHMHTHNDKKPFTCATCGKGFCRNFDLKKHVRKLHDSVGPAAPSAKDLTRTVQS

SEQ ID NO: 14966 - protein, 219 aa, Homo sapiens
MDPAPGVLDPRAAPPALLGTPQAEVLEDVLREQFGPLPQLAAVCRLKRLPSGGYSSTENLQLVLERRRVANAKERERIKNLNRGFARLKALVPFLPQSRKPSKVDILKGATEYIQVLSDLLEGAKDSKKQDPDEQSYSNNSSESHTSSARQLSRNITQHISCAFGLKNEEEGPWADGGSGEPAHACRHSVMSTTEIISPTRSLDRFPEVELLSHRLPQV

SEQ ID NO: 14967 - protein, 496 aa, Homo sapiens
MDDVPAPTPAPAPPAAAAPRVPFHCSECGKSFRYRSDLRRHFARHTALKPHACPRCGKGFKHSFNLANHLRSHTGERPYRCSACPKGFRDSTGLLHHQVVHTGEKPYCCLVCELRFSSRSSLGRHLKRQHRGVLPSPLQPGPGLPALSAPCSVCCNVGPCSVCGGSGAGGGEGPEGAGAGLGSWGLAEAAAAAAASLPPFACGACARRFDHGRELAAHWAAHTDVKPFKCPRCERDFNAPALLERHKLTHDLQGPGAPPAQAWAAGPGAGPETAGEGTAAEAGDAPLASDRRLLLGPAGGGVPKLGGLLPEGGGEAPAPAAAAEPSEDTLYQCDCGTFFASAAALASHLEAHSGPATYGCGHCGALYAALAALEEHRRVSHGEGGGEEAATAAREREPASGEPPSGSGRGKKIFGCSECEKLFRSPRDLERHVLVHTGEKPFPCLECGKFFRHECYLKRHRLLHGTERPFPCHICGKGFITLSNLSRHLKLHRGMD

SEQ ID NO: 14968 - protein, 452 aa, Homo sapiens
MDGTIKEALSVVSDDQSLFDSAYGAAAHLPKADMTASGSPDYGQPHKINPLPPQQEWINQPVRVNVKREYDHMNGSRESPVDCSVSKCSKLVGGGESNPMNYNSYMDEKNGPPPPNMTTNERRVIVPADPTLWTQEHVRQWLEWAIKEYSLMEIDTSFFQNMDGKELCKMNKEDFLRATTLYNTEVLLSHLSYLRESSLLAYNTTSHTDQSSRLSVKEDPSYDSVRRGAWGNNMNSGLNKSPPLGGAQTISKNTEQRPQPDPYQILGPTSSRLANPGSGQIQLWQFLLELLSDSANASCITWEGTNGEFKMTDPDEVARRWGERKSKPNMNYDKLSRALRYYYDKNIMTKVHGKRYAYKFDFHGIAQALQPHPTESSMYKYPSDISYMPSYHAHQQKVNFVPPHPSSMPVTSSSFFGAASQYWTSPTGGIYPNPNVPRHPNTHVPSHLGSYY

SEQ ID NO: 14969 - protein, 380 aa, Homo sapiens
MMFSGFNADYEASSSRCSSASPAGDSLSYYHSPADSFSSMGSPVNAQDFCTDLAVSSANFIPTVTAISTSPDLQWLVQPALVSSVAPSQTRAPHPFGVPAPSAGAYSRAGVVKTMTGGRAQSIGRRGKVEQLSPEEEEKRRIRRERNKMAAAKCRNRRRELTDTLQAETDQLEDEKSALQTEIANLLKEKEKLEFILAAHRPACKIPDDLGFPEEMSVASLDLTGGLPEVATPESEEAFTLPLLNDPEPKPSVEPVKSISSMELKTEPFDDFLFPASSRPSGSETARSVPDMDLSGSFYAADWEPLHSGSLGMGPMATELEPLCTPVVTCTPSCTAYTSSFVFTYPEADSFPSCAAAHRKGSSSNEPSSDSLSSPTLLAL

SEQ ID NO: 14970 - protein, 338 aa, Homo sapiens
MFQAFPGDYDSGSRCSSSPSAESQYLSSVDSFGSPPTAAASQECAGLGEMPGSFVPTVTAITTSQDLQWLVQPTLISSMAQSQGQPLASQPPVVDPYDMPGTSYSTPGMSGYSSGGASGSGGPSTSGTTSGPGPARPARARPRRPREETLTPEEEEKRRVRRERNKLAAAKCRNRRRELTDRLQAETDQLEEEKAELESEIAELQKEKERLEFVLVAHKPGCKIPYEEGPGPGPLAEVRDLPGSAPAKEDGFSWLLPPPPPPPLPFQTSQDAPPNLTASLFTHSEVQVLGDPFPVVNPSYTSSFVLTCPEVSAFAGAQRTSGSDQPSDPLNSPSLLAL

SEQ ID NO: 14971 - protein, 271 aa, Homo sapiens
MFRDFGEPGPSSGNGGGYGGPAQPPAAAQAAQQKFHLVPSINTMSGSQELQWMVQPHFLGPSSYPRPLTYPQYSPPQPRPGVIRALGPPPGVRRRPCEQISPEEEERRRVRRERNKLAAAKCRNRRKELTDFLQAETDKLEDEKSGLQREIEELQKQKERLELVLEAHRPICKIPEGAKEGDTGSTSGTSSPPAPCRPVPCISLSPGPVLEPEALHTPTLMTTPSLTPFTPSLVFTYPSTPEPCASAHRKSSSSSGDPSSDPLGSPTLLAL

SEQ ID NO: 14972 - protein, 326 aa, Homo sapiens
MYQDYPGNFDTSSRGSSGSPAHAESYSSGGGGQQKFRVDMPGSGSAFIPTINAITTSQDLQWMVQPTVITSMSNPYPRSHPYSPLPGLASVPGHMALPRPGVIKTIGTTVGRRRRDEQLSPEEEEKRRIRRERNKLAAAKCRNRRRELTEKLQAETEELEEEKSGLQKEIAELQKEKEKLEFMLVAHGPVCKISPEERRSPPAPGLQPMRSGGGSVGAVVVKQEPLEEDSPSSSSAGLDKAQRSVIKPISIAGGFYGEEPLHTPIVVTSTPAVTPGTSNLVFTYPSVLEQESPASPSESCSKAHRRSSSSGDQSSDSLNSPTLLAL

SEQ ID NO: 14973 - protein, 472 aa, Homo sapiens
MLGTVKMEGHETSDWNSYYADTQEAYSSVPVSNMNSGLGSMNSMNTYMTMNTMTTSGNMTPASFNMSYANPGLGAGLSPGAVAGMPGGSAGAMNSMTAAGVTAMGTALSPSGMGAMGAQQAASMNGLGPYAAAMNPCMSPMAYAPSNLGRSRAGGGGDAKTFKRSYPHAKPPYSYISLITMAIQQAPSKMLTLSEIYQWIMDLFPYYRQNQQRWQNSIRHSLSFNDCFVKVARSPDKPGKGSYWTLHPDSGNMFENGCYLRRQKRFKCEKQPGAGGGGGSGSGGSGAKGGPESRKDPSGASNPSADSPLHRGVHGKTGQLEGAPAPGPAASPQTLDHSGATATGGASELKTPASSTAPPISSGPGALASVPASHPAHGLAPHESQLHLKGDPHYSFNHPFSINNLMSSSEQQHKLDFKAYEQALQYSPYGSTLPASLPLGSASVTTRSPIEPSALEPAYYQGVYSRPVLNTS

SEQ ID NO: 14974 - protein, 457 aa, Homo sapiens
MLGAVKMEGHEPSDWSSYYAEPEGYSSVSNMNAGLGMNGMNTYMSMSAAAMGSGSGNMSAGSMNMSSYVGAGMSPSLAGMSPGAGAMAGMGGSAGAAGVAGMGPHLSPSLSPLGGQAAGAMGGLAPYANMNSMSPMYGQAGLSRARDPKTYRRSYTHAKPPYSYISLITMAIQQSPNKMLTLSEIYQWIMDLFPFYRQNQQRWQNSIRHSLSFNDCFLKVPRSPDKPGKGSFWTLHPDSGNMFENGCYLRRQKRFKCEKQLALKEAAGAAGSGKKAAAGAQASQAQLGEAAGPASETPAGTESPHSSASPCQEHKRGGLGELKGTPAAALSPPEPAPSPGQQQQAAAHLLGPPHHPGLPPEAHLKPEHHYAFNHPFSINNLMSSEQQHHHSHHHHQPHKMDLKAYEQVMHYPGYGSPMPGSLAMGPVTNKTGLDASPLAADTSYYQGVYSRPIMNSS

SEQ ID NO: 14975 - protein, 350 aa, Homo sapiens
MLGSVKMEAHDLAEWSYYPEAGEVYSPVTPVPTMAPLNSYMTLNPLSSPYPPGGLPASPLPSGPLAPPAPAAPLGPTFPGLGVSGGSSSSGYGAPGPGLVHGKEMPKGYRRPLAHAKPPYSYISLITMAIQQAPGKMLTLSEIYQWIMDLFPYYRENQQRWQNSIRHSLSFNDCFVKVARSPDKPGKGSYWALHPSSGNMFENGCYLRRQKRFKLEEKVKKGGSGAATTTRNGTGSAASTTTPAATVTSPPQPPPPAPEPEAQGGEDVGALDCGSPASSTPYFTGLELPGELKLDAPYNFNHPFSINNLMSEQTPAPPKLDVGFGGYGAEGGEPGVYYQGLYSRSLLNAS

SEQ ID NO: 14976 - protein, 325 aa, Homo sapiens
MPRPGRNTYSDQKPPYSYISLTAMAIQSSPEKMLPLSEIYKFIMDRFPYYRENTQRWQNSLRHNLSFNDCFIKIPRRPDQPGKGSFWALHPSCGDMFENGSFLRRRKRFKVLKSDHLAPSKPADAAQYLQQQAKLRLSALAASGTHLPQMPAAAYNLGGVAQPSGFKHPFAIENIIAREYKMPGGLAFSAMQPVPAAYPLPNQLTTMGSSLGTGWPHVYGSAGMIDSATPISMASGDYSAYGVPLKPLCHAAGQTLPAIPVPIKPTPAAVPALPALPAPIPTLLSNSPPSLSPTSSQTATSQSSPATPSETLTSPASALHSVAVH

SEQ ID NO: 14977 - protein, 432 aa, Homo sapiens
MPRPGKSSYSDQKPPYSYISLTAMAIQHSAEKMLPLSDIYKFIMERFPYYREHTQRWQNSLRHNLSFNDCFIKIPRRPDQPGKGSFWALHPDCGDMFENGSFLRRRKRFKVLRADHTHLHAGSTKSAPGAGPGGHLHPHHHHHPHHHHHHHAAAHHHHHHHPPQPPPPPPPPPPHMVHYFHQQPPTAPQPPPHLPSQPPQQPPQQSQPQQPSHPGKMQEAAAVAAAAAAAAAAAVGSVGRLSQFPPYGLGSAAAAAAAAAASTSGFKHPFAIENIIGRDYKGVLQAGGLPLASVMHHLGYPVPGQLGNVVSSVWPHVGVMDSVAAAAAAAAAAGVPVGPEYGAFGVPVKSLCHSASQSLPAMPVPIKPTPALPPVSALQPGLTVPAASQQPPAPSTVCSAAAASPVASLLEPTAPTSAESKGGSLHSVLVHS

SEQ ID NO: 14978 - protein, 553 aa, Homo sapiens
MQARYSVSSPNSLGVVPYLGGEQSYYRAAAAAAGGGYTAMPAPMSVYSHPAHAEQYPGGMARAYGPYTPQPQPKDMVKPPYSYIALITMAIQNAPDKKITLNGIYQFIMDRFPFYRDNKQGWQNSIRHNLSLNECFVKVPRDDKKPGKGSYWTLDPDSYNMFENGSFLRRRRRFKKKDAVKDKEEKDRLHLKEPPPPGRQPPPAPPEQADGNAPGPQPPPVRIQDIKTENGTCPSPPQPLSPAAALGSGSAAAVPKIESPDSSSSSLSSGSSPPGSLPSARPLSLDGADSAPPPPAPSAPPPHHSQGFSVDNIMTSLRGSPQSAAAELSSGLLASAAASSRAGIAPPLALGAYSPGQSSLYSSPCSQTSSAGSSGGGGGGAGAAGGAGGAGTYHCNLQAMSLYAAGERGGHLQGAPGGAGGSAVDDPLPDYSLPPVTSSSSSSLSHGGGGGGGGGGQEAGHHPAAHQGRLTSWYLNQAGGDLGHLASAAAAAAAAGYPGQQQNFHSVREMFESQRIGLNNSPVNGNSSCQMAFPSSQSLYRTSGAFVYDCSKF

SEQ ID NO: 14979 - protein, 501 aa, Homo sapiens
MQARYSVSDPNALGVVPYLSEQNYYRAAGSYGGMASPMGVYSGHPEQYSAGMGRSYAPYHHHQPAAPKDLVKPPYSYIALITMAIQNAPEKKITLNGIYQFIMDRFPFYRENKQGWQNSIRHNLSLNECFVKVPRDDKKPGKGSYWTLDPDSYNMFENGSFLRRRRRFKKKDVSKEKEERAHLKEPPPAASKGAPATPHLADAPKEAEKKVVIKSEAASPALPVITKVETLSPESALQGSPRSAASTPAGSPDGSLPEHHAAAPNGLPGFSVENIMTLRTSPPGGELSPGAGRAGLVVPPLALPYAAAPPAAYGQPCAQGLEAGAAGGYQCSMRAMSLYTGAERPAHMCVPPALDEALSDHPSGPTSPLSALNLAAGQEGALAATGHHHQHHGHHHPQAPPPPPAPQPQPTPQPGAAAAQAASWYLNHSGDLNHLPGHTFAAQQQTFPNVREMFNSHRLGIENSTLGESQVSGNASCQLPYRSTPPLYRHAAPYSYDCTKY

SEQ ID NO: 14980 - protein, 465 aa, Homo sapiens
MTLSTEMSDASGLAEETDIDVVGEGEDEEDEEEEDDDEGGGGGPRLAVPAQRRRRRRSYAGEDELEDLEEEEDDDDILLAPPAGGSPAPPGPAPAAGAGAGGGGGGGGAGGGGSAGSGAKNPLVKPPYSYIALITMAILQSPKKRLTLSEICEFISGRFPYYREKFPAWQNSIRHNLSLNDCFVKIPREPGNPGKGNYWTLDPESADMFDNGSFLRRRKRFKRQPLLPPNAAAAESLLLRGAGAAGGAGDPAAAAALFPPAPPPPPHAYGYGPYGCGYGLQLPPYAPPSALFAAAAAAAAAAAFHPHSPPPPPPPHGAAAELARTAFGYRPHPLGAALPGPLPASAAKAGGPGASALARSPFSIESIIGGSLGPAAAAAAAAQAAAAAQASPSPSPVAAPPAPGSSGGGCAAQAAVGPAAALTRSLVAAAAAAASSVSSSAALGTLHQGTALSSVENFTARISNC

SEQ ID NO: 14981 - protein, 495 aa, Homo sapiens
MTLGSCCCEIMSSESSPAALSEADADIDVVGGGSGGGELPARSGPRAPRDVLPHGHEPPAEEAEADLAEDEEESGGCSDGEPRALASRGAAAAAGSPGPGAAAARGAAGPGPGPPSGGAATRSPLVKPPYSYIALITMAILQSPKKRLTLSEICEFISGRFPYYREKFPAWQNSIRHNLSLNDCFVKIPREPGNPGKGNYWTLDPESADMFDNGSFLRRRKRFKRQPLPPPHPHPHPHPELLLRGGAAAAGDPGAFLPGFAAYGAYGYGYGLALPAYGAPPPGPAPHPHPHPHAFAFAAAAAAAPCQLSVPPGRAAAPPPGPPTASVFAGAGSAPAPAPASGSGPGPGPAGLPAFLGAELGCAKAFYAASLSPPAAGTAAGLPTALLRQGLKTDAGGGAGGGGAGAGQRPSFSIDHIMGHGGGGAAPPGAGEGSPGPPFAAAAGPGGQAQVLAMLTAPALAPVAGHIRLSHPGDALLSSGSRFASKVAGLSGCHF

SEQ ID NO: 14982 - protein, 478 aa, Homo sapiens
MTLSGGGSASDMSGQTVLTAEDVDIDVVGEGDDGLEEKDSDAGCDSPAGPPELRLDEADEVPPAAPHHGQPQPPHQQPLTLPKEAAGAGAGPGGDVGAPEADGCKGGVGGEEGGASGGGPGAGSGSAGGLAPSKPKNSLVKPPYSYIALITMAILQSPQKKLTLSGICEFISNRFPYYREKFPAWQNSIRHNLSLNDCFVKIPREPGNPGKGNYWTLDPQSEDMFDNGSFLRRRKRFKRHQQEHLREQTALMMQSFGAYSLAAAAGAAGPYGRPYGLHPAAAAGAYSHPAAAAAAAAAAALQYPYALPPVAPVLPPAVPLLPSGELGRKAAAFGSQLGPGLQLQLNSLGAAAAAAGTAGAAGTTASLIKSEPSARPSFSIENIIGGGPAAPGGSAVGAGVAGGTGGSGGGSTAQSFLRPPGTVQSAALMATHQPLSLSRTTATIAPILSVPLSGQFLQPAASAAAAAAAAAQAKWPAQ

SEQ ID NO: 14983 - protein, 439 aa, Homo sapiens
MNLPRAERLRSTPQRSLRDSDGEDGKIDVLGEEEDEDEEEAASQQFLEQSLQPGLQVARWGGVALPREHIEGGGGPSDPSEFGTEFRAPPRSAAASEDARQPAKPPSSYIALITMAILQSPHKRLTLSGICAFISDRFPYYRRKFPAWQNSIRHNLSLNDCFVKIPREPGRPGKGNYWSLDPASQDMFDNGSFLRRRKRFQRHQPTPGAHLPHPFPLPAAHAALHNPRPGPLLGAPAPPQPVPGAYPNTGPGRRPYALLHPHPPRYLLLSAPAYAGAPKKAEGADLATPAPFPCCSPHLVLSLGRRARVWRRHREADASLSALRVSCKGSGERVQGLRRVCPRPRGATAPCSSDRQACRTILQQQQRHQEEDCANGCAPTKGAVLGGHLSAASALLRYQAVAEGSGLTSLAAPLGGEGTSPVFLVSPTPSSLAESAGPS

SEQ ID NO: 14984 - protein, 408 aa, Homo sapiens
MNLPRAERPRSTPQRSLRDSDGEDGKIDVLGEEEDEDEVEDEEEEASQKFLEQSLQPGLQVARWGGVALPREHIEGGGPSDPSEFGTEFRAPPRSAAASEDARQPAKPPYSYIALITMAILQSPHKRLTLSGICAFISGRFPYYRRKFPAWQNSIRHNLSLNDCFVKIPREPGHPGKGTYWSLDPASQDMFDNGSFLRRRKRFKRHQLTPGAHLPHPFPLPAAHAALHNPRPGPLLGAPALPQPVPGAYPNTAPGRRPYALLHPHPPRYLLLSAPAYAGAPKKAEGADLATPGTLPVLQPSLGPQPWEEGKGLASPPGGGCISFSIESIMQGVRGAGTGAAQSLSPTAWSYCPLLQRPSSLSDNFAATAAASGGGLRQRLRSHQGRGAGRAPVGRVGAAAVSGGGRGL

SEQ ID NO: 14985 - protein, 417 aa, Homo sapiens
MNLPRAERLRSTPQRSLRDSDGEDGKIDVLGEEEDEDEVEDEEEAASQQFLEQSLQPGLQVARWGGVALPREHIEGGGGPSDPSEFGTKFRAPPRSAAASEDARQPAKPPYSYIALITMAILQNPHKRLTLSGICAFISGRFPYYRRKFPAWQNSIRHNLSLNDCFVKIPREPGHPGKGNYWSLDPASQDMFDNGSFLRRRKRFKRHQLTPGAHLPHPFPLPAAHAALHNPRPGPLLGAPAPPQPVPGAYPNTAPGRRPYALLHPHPLRYLLLSAPVYAGAPKKAEGAALATPAPFPCCSPHLVLSLGRRARVWRRHREADASLSALRVLCKGSGERVQGLRRICPRPRGATATCSSDHQACCIPRPLPLCCKCPPPPLLGQFCSNSSSIRRRTAPTAALPPRARCWAGTCRPRRPC

SEQ ID NO: 14986 - protein, 416 aa, Homo sapiens
MNLPRAERPRSTPQRSLRDSDGEDGKIDVLGEEEDEDEVEDEEEEARQQFLEQSLQPGLQVARWGGVALPREHIEGGGGPSDPSEFGTKFRAPPRSAAASEDARQPAKPPYSYIALITMAILQNPHKRLTLSGICAFISGRFPYYRRKFPAWQNSIRHNLSLNDCFVKIPREPGHPGKGNYWSLDPASQDMFDNGSFLRRRKRFKRHQLTPGAHLPHPFPLPAAHAALHNPHPGPLLGAPAPPQPVPGAYPNTAPGRRPYALLHPHPLRYLLLSARVYAGAPKKAEGADLATPAPFPCCSPHLVLSLGRRARVWRRHREADASLSALRVLCKGSGERVQGLRRVCPRPRGATATCSSDHQACCIPKPLPLCCKCPPPLLLGQFCSNSSSIRRTAPTAALPPRARCWAGTCRPRRRC

SEQ ID NO: 14987 - protein, 416 aa, Homo sapiens
MNLPRAERPRSTPQRSLRDSDGEDGKIDVLGEEEDEDEVEDEEEEARQQFLEQSLQPGLQVARWGGVALPREHIEGGGGPSDPSEFGTKFRAPPRSAAASEDARQPAKPPYSYIALITMAILQNPHKRLTLSGICAFISGRFPYYRRKFPAWQNSIRHNLSLNDCFVKIPREPGHPGKGNYWSLDPASQDMFDNGSFLRRRKRFKRHQLTPGAHLPHPFPLPAAHAALHNPHPGPLLGAPAPPQPVPGAYPNTAPGRCPYALLHPHPLRYLLLSAPVYAGAPKKAEGADLATPAPFPCCSPHLVLSLGRRARVWRRHREADASLSALRVLCKGSGERVQGLRRVCPRPRGATATCSSDHQACCIPKPLPLCCKCPPPLLLGQFCSNSSSIRRTAPTAALPPRARCWAGTCRPRRRC

SEQ ID NO: 14988 - protein, 417 aa, Homo sapiens
MNLPRAERLRSTPQRSLRDSDGEDGKIDVLGEEEDEDEVEDEEEAASQQFLEQSLQPGLQVARWGGVALPREHIEGGGGPSDPSEFGTKFRAPPRSAAASEDARQPAKPPYSYIALITMAILQNPHKRLTLSGICAFISGRFPYYRRKFPAWQNSIRHNLSLNDCFVKIPREPGHPGKGNYWSLDPASQDMFDNGSFLRRRKRFKRHQLTPGAHLPHPFPLPAAHAALHNPHPGPLLGAPAPPQPVPGAYPNTAPGRRPYALLHPHPLRYLLLSAPVYAGAPKKAEGAALATPAPFPCCSPHLVLSLGRRARVWRRHREADASLSALRVLCKGSGERVQGLRRVCPRPRGATATCSSDHQACCIPRPLPLCCKCPPPPLLGQFCSNSSSIRRRTAPTAALPPRARCWAGTCRPRRPC

SEQ ID NO: 14989 - protein, 373 aa, Homo sapiens
MTAESGPPPPQPEVLATVKEERGETAAGAGVPGEATGRGAGGRRRKRPLQRGKPPYSYIALIAMAIAHAPERRLTLGGIYKFITERFPFYRDNPKKWQNSIRHNLTLNDCFLKIPREAGRPGKGNYWALDPNAEDMFESGSFLRRRKRFKRSDLSTYPAYMHDAAAAAAAAAAAAAAAAIFPGAVPAARPPYPGAVYAGYAPPSLAAPPPVYYPAASPGPCRVFGLVPERPLSPELGPAPSGPGGSCAFASAGAPATTTGYQPAGCTGARPANPSAYAAAYAGPDGAYPQGAGSAIFAAAGRLAGPASPPAGGSSGGVETTVDFYGRTSPGQFGALGACYNPGGQLGGASAGAYHARHAAAYPGGIDRFVSAM

SEQ ID NO: 14990 - protein, 319 aa, Homo sapiens
MAGRSDMDPPAAFSGFPALPAVAPSGPPPSPLAGAEPGREPEEAAAGRGEAAPTPAPGPGRRRRRPLQRGKPPYSYIALIAMALAHAPGRRLTLAAIYRFITERFAFYRDSPRKWQNSIRHNLTLNDCFVKVPREPGNPGKGNYWTLDPAAADMFDNGSFLRRRKRFKRAELPAHAAAAPGPPLPFPYAPYAPAPGPALLVPPPSAGPGPSPPARLFSVDSLVNLQPELAGLGAPEPPCCAAPDAAAAAFPPCAAAASPPLYSQVPDRLVLPATRPGPGPLPAEPLLALAGPAAALGPLSPGEAYLRQPGFASGLERYL

SEQ ID NO: 14991 - protein, 379 aa, Homo sapiens
MSSAPEKQQPPHGGGGGGGGGGGAAMDPASSGPSKAKKTNAGIRRPEKPPYSYIALIVMAIQSSPTKRLTLSEIYQFLQSRFPFFRGSYQGWKNSVRHNLSLNECFIKLPKGLGRPGKGHYWTIDPASEFMFEEGSFRRRPRGFRRKCQALKPMYSMMNGLGFNHLPDTYGFQGSAGGLSCPPNSLALEGGLGMMNGHLPGNVDGMALPSHSVPHLPSNGGHSYMGGCGGAAAGEYPHHDSSVPASPLLPTGAGGVMEPHAVYSGSAAAWPPSASAALNSGASYIKQQPLSPCNPAANPLSGSLSTHSLEQPYLHQNSHNAPAELQGIPRYHSQSPSMCDRKEFVFSFNAMASSSMHSAGGGSYYHQQVTYQDIKPCVM

SEQ ID NO: 14992 - protein, 444 aa, Homo sapiens
MTTEGGPPPAPLRRACSPVPGALQAALMSPPPAAAAAAAAAPETTSSSSSSSSASCASSSSSSNSASAPSAACKSAGGGGAGAGSGGAKKASSGLRRPEKPPYSYIALIVMAIQSSPSKRLTLSEIYQFLQARFPFFRGAYQGWKNSVRHNLSLNECFIKLPKGLGRPGKGHYWTIDPASEFMFEEGSFRRRPRGFRRKCQALKPMYHRVVSGLGFGASLLPQGFDFQAPPSAPLGCHSQGGYGGLDMMPAGYDAGAGAPSHAHPHHHHHHHVPHMSPNPGSTYMASCPVPAGPGGVGAAGGGGGGDYGPDSSSSPVPSSPAMASAIECHSPYTSPAAHWSSPGASPYLKQPPALTPSSNPAASAGLHSSMSSYSLEQSYLHQNAREDLSVGLPRYQHHSTPVCDRKDFVLNFNGISSFHPSASGSYYHHHHQSVCQDIKPCVM

SEQ ID NO: 14993 - protein, 489 aa, Homo sapiens [sequence omitted]

SEQ ID NO: 14994 - protein, 365 aa, Homo sapiens
MGPCSGSRLGPPEAESPSQPPKRRKKRYLRHDKPPYTYLAMIALVIQAAPSRRLKLAQIIRQVQAVFPFFREDYEGWKDSIRHNLSSNRCFRKVPKDPAKPQAKGNFWAVDVSLIPAEALRLQNTALCRRWQNGGARGAFAKDLGPYVLHGRPYRPPSPPPPPSEGFSIKSLLGGSGEGAPWPGLAPQSSPVPAGTGNSGEEAVPTPPLPSSERPLWPLCPLPGPTRVEGETVQGGAIGPSTLSPEPRAWPLHLLQGTAVPGGRSSGGHRASLWGQLPTSYLPIYTPNVVMPLAPPPTSCPQCPSTSPAYWGVAPETRGPPGLLCDLDALFQGVPPNKSIYDVWVSHPRDLAAPGPGWLLSWCSL

SEQ ID NO: 14995 - protein, 378 aa, Homo sapiens
MSSFDLPAPSPPRCSPQFPSIGQEPPEMNLYYENFFHPQGVPSPQRPSFEGGGEYGATPNPYLWFNGPTMTPPPYLPGPNASPFLPQAYGVQRPLLPSVSGLGGSDLGWLPIPSQEELMKLVRPPYSYSALIAMAIHGAPDKRLTLSQIYQYVADNFPFYNKSKAGWQNSIRHNLSLNDCFKKVPRDEDDPGKGNYWTLDPNCEKMFDNGNFRRKRKRKSDVSSSTASLALEKTESSLPVDSPKTTEPQDILDGASPGGTTSSPEKRPSPPPSGAPCLNSFLSSMTAYVSGGSPTSHPLVTPGLSPEPSDKTGQNSLTFNSFSPLTNLSNHSGGGDWANPMPTNMLSYGGSVLSQFSPHFYNSVNTSGVLYPREGTEV

SEQ ID NO: 14996 - protein, 318 aa, Homo sapiens
MATYCDDLGPSSAPPGQAQATAHPPGYEPGDLGAVGGGPLLWVNAPALSPKSYASGPGPAPPYAAPSYGAPGPLLGAPGGLAGADLAWLSLSGQQELLRLVRPPYSYSALIAMAIQSAPLRKLTLSQIYQYVAGNFPFYKRSKAGWQNSIRHNLSLNDCFKKVPRDEDDPGKGNYWTLDPNCEKMFDNGNFRRKRKRRAEASAAVRSGARSVGGAEAPALEPPSAACLDLQASPSPSAPEAATCFSGFASAMSALAGGLGTFPGGLAGDFSFGRRPPTVATHAPQTLNPSPGFAPGHQTAAAGFRLSHLLYSREGTEV

SEQ ID NO: 14997 - protein, 420 aa, Homo sapiens
MALYCGDNFGVYSQPGLPPPAATAAAPGAPPAARAPYGLADYAAPPAAAANPYLWLNGPGVGGPPSAAAAAAAAYLGAPPPPPPPGAAAGPFLQPPPAAGTFGCSQRPFAQPAPAAPASPAAPAGPGELGWLSMASREDLMKMVRPPYSYSALIAMAIQSAPERKLTLSHIYQFVADSFPFYQRSKAGWQNSIRHNLSLNDCFKKVPRDEDDPGKGNYWTLDPNCEKMFDNGNFRRKRKRRSEASNGSTVAAGTSKSEEGLSSGLGSGVGGKPEEESPSTLLRPSHSPEPPEGTKSTASSPGGPMLTSTPCLNTFFSSLSSLSVSSSVSTQRALPGSRHLGIQGAQLPSSGVFSPTSISEASADTLQLSNSTSNSTGQRSSYYSPFPASTSGGQSSPFSSPFHNFSMVNSLIYPREGSEV

SEQ ID NO: 14998 - protein, 421 aa, Homo sapiens
MAESWLRLSGAGPAEEAGPEGGLEEPDALDDSLTSLQWLQEFSILNAKAPALPPGGTDPHGYHQVPGSAAPGSPLAADPACLGQPHTPGKPTSSCTSRSAPPGLQAPPPDDVDYATNPHVKPPYSYATLICMAMQASKATKITLSAIYKWITDNFCYFRHADPTWQNSIRHNLSLNKCFIKVPREKDEPGKGGFWRIDPQYAERLLSGAFKKRRLPPVHIHPAFARQAAQEPSAVPRAGPLTVNTEAQQLLREFEEATGEAGWGAGEGRLGHKRKQPLPKRVAKVPRPPSTLLPTPEEQGELEPLKGNFDWEAIFDAGTLGGELGALEALELSPPLSPASHVDVDLTIHGRHIDCPATWGPSVEQAADSLDFDETFLATSFLQHPWDESGSGCLPPEPLFEAGDATLASDLQDWASVGAFL

SEQ ID NO: 14999 - protein, 574 aa, Homo sapiens
MASDLESSLTSIDWLPQLTLRATIEKLGSASQAGPPGSSRKCSPGSPTDPNATLSKDEAAVHQDGKPRYSYATLITYAINSSPAKKMTLSEIYRWICDNFPYYKNAGIGWKNSIRHNLSLNKCFRKVPRPRDDPGKGSYWTIDTCPDISRKRRHPPDDDLSQDSPEQEASKSPRGGVAGSGEASLPPEGNPQMSLQSPTSIASYSQGTGSVDGGAVAAGASGRESAEGPPPLYNTNHDFKFSYSEINFQDLSWSFRNLYKSMLEKSSSSSQHGFSSLLGDIPPSNNYYMYQQQQPPPPQQQQQQQQPPQPPPQQSQPQQQQAPAQGPSAVGGAPPLHTPSTDGCTPPGGKQAGAEGYGPPPVMAMHPPPLQHGGYHPHQHHPHSHPAQQPPPPQPQAQGQAPINNTGFAFPSDWCSNIDSLKESFKMVNRLNWSSIEQSQFSELMESLRQAEQKNWTLDQHHIANLCDSLNHFLTQTGHVPPQGGTHRPPAPARIADSCALTSGKQESAMSQVNSYGHPQAPHLYPGPSPMYPIPTQDSAGYNRPAHHMVPRPSVPPPGANEEIPDDFDWDLIT

SEQ ID NO: 15000 - protein, 622 aa, Homo sapiens
MGLYGQACPSVTSLRMTSELESSLTSMDWLPQLTMRAAIQKSDATQNAHGTGISKKNALLDPNTTLDQEEVQQHKDGKPPYSYASLITFAINSSPKKKMTLSEIYQWICDNFPYYREAGSGWKNSIRHNLSLNKCFLKVPRSKDDPGKGSYWAIDTNPKEDVLPTRPKKRARSVERASTPYSIDSDSLGMECIISGSASPTLAINTVTNKVTLYNTDQDGSDSPRSSLNNSLSDQSLASVNLNSVGSVHSYTPVTSHPESVSQSLTPQQQPQYNLPERDKQLLFSEYNFEDLSASFRSLYKSVFEQSLSQQGLMNIPSESSQQSHTSCTYQHSPSSTVSTHPHSNQSSLSNSHGSGLNTTGSNSVAQVSLSHPQMHTQPSPHPPHRPHGLPQHPQRSPHPAPHPQQHSQLQSPHPQHPSPHQHIQHHPNHQHQTLTHQAPPPPQQVSCNSGVSNDWYATLDMLKESCRIASSVNWSDVDLSQFQGLMESMRQADLKNWSLDQVQFADLCSSLNQFFTQTGLIHSQSNVQQNVCHGAMHPTKPSQHIGTGNLYIDSRQNLPPSVMPPPGYPHIPQALSTPGTTMAGHHRAMNQQHMMPSQAFQMRRSLPPDDIQDDFDWDSIV

SEQ ID NO: 15001 - protein, 733 aa, Homo sapiens
MAEVGEDSGARALLALRSAPCSPVLCAAAAAAAFPAAAPPPAPAQPQPPPGPPPPPPPPLPPGAIAGAGSSGGSSGVSGDSAVAGAAPALVAAAAASVRQSPGPALARLEGREFEFLMRQPSVTIGRNSSQGSVDLSMGLSSFISRRHLQLSFQEPHFYLRCLGKNGVFVDGAFQRRGAPALQLPKQCTFRFPSTAIKIQFTSLYHKEEAPASPLRPLYPQISPLKIHIPEPDLRSMVSPVPSPTGTISVPNSCPASPRGAGSSSYRFVQNVTSDLQLAAEFAAKAASEQQADTSGGDSPKDESKPPFSYAQLIVQAISSAQDRQLTLSGIYAHITKHYPYYRTADKGWQNSIRHNLSLNRYFIKVPRSQEEPGKGSFWRIDPASEAKLVEQAFRKRRQRGVSCFRTPFGPLSSRSAPASPTHPGLMSPRSGGLQTPECLSREGSPIPHDPEFGSKLASVPEYRYSQSAPGSPVSAQPVIMAVPPRPSSLVAKPVAYMPASIVTSQQPAGHAIHVVQQAPTVTMVRVVTTSANSANGYILTSQGAAGGSHDAAGAAVLDLGSEARGLEEKPTIAFATIPAAGGVIQTVASQMAPGVPGHTVTILQPATPVTLGQHHLPVRAVTQNGKHAVPTNSLAGNAYALTSPLQLLATQASSSAPVVVTRVCEVGPKEPAAAVAATATTTPATATTASASASSTGEPEVKRSRVEEPSGAVTTPAGVIAAAGPQGPGTGE

SEQ ID NO: 15002 - protein, 660 aa, Homo sapiens
MAAAAAALSGAGTPPAGGGAGGGGAGGGGSPPGGWAVARLEGREFEYLMKKRSVTIGRNSSQGSVDVSMGHSSFISRRHLEIFTPPGGGGHGGAAPELPPAQPRPDAGGDFYLRCLGKNGVFVDGVFQRRGAPPLQLPRVCTFRFPSTNIKITFTALSSEKREKQEASESPVKAVQPHISPLTINIPDTMAHLISPLPSPTGTISAANSCPSSPRGAGSSGYKVGRVMPSDLNLMADNSQPENEKEASGGDSPKDDSKPPYSYAQLIVQAITMAPDKQLTLNGIYTHITKNYPYYRTADKGWQNSIRHNLSLNRYFIKVPRSQEEPGKGSFWRIDPASESKLIEQAFRKRRPRGVPCFRTPLGPLSSRSAPASPNHAGVLSAHSSGAQTPESLSREGSPAPLEPEPGAAQPKLAVIQEARFAQSAPGSPLSSQPVLITVQRQLPQAIKPVTYTVATPVTTSTSQPPVVQTVHVVHQIPAVSVTSVAGLAPANTYTVSGQAVVTPAAVLAPPKAEAQENGDHREVKVKVEPIPAIGHATLGTASRIIQTAQTTPVQTVTIVQQAPLGQHQLPIKTVTQNGTHVASVPTAVHGQVNNAAASPLHMLATHASASASLPTKRHNGDQPEQPELKRIKTEDGEGIVIALSVDTPPAAVREKGVQN

SEQ ID NO: 15003 - protein, 345 aa, Homo sapiens
MSHLFDPRLPALAASPMLYLYGPERPGLPLAFAPAAALAASGRAETPQKPPYSYIALIAMAIQDAPEQRVTLNGIYQFIMDRFPFYHDNRQGWQNSIRHNLSLNDCFVKVPREKGRPGKGSYWTLDPRCLDMFENGNYRRRKRKPKPGPGAPEAKRPRAETHQRSAEAQPEAGSGAGGSGPAISRLQAAPAGPSPLLDGPSPPAPLHWPGTASPNEDAGDAAQGAAAVAVGQAARTGDGPGSPLRPASRSSPKSSDKSKSFSIDSILAGKQGQKPPSGDELLGGAKPGPGGRLGASLLAASSSLRPPFNASLMLDPHVQGGFYQLGIPFLSYFPLQVPDTVLHFQ

SEQ ID NO: 15004 - protein, 376 aa, Homo sapiens
MMASYPEPEDAAGALLAPETGRTVKEPEGPPPSPGKGGGGGGGTAPEKPDPAQKPPYSYVALIAMAIRESAEKRLTLSGIYQYIIAKFPFYEKNKKGWQNSIRHNLSLNECFIKVPREGGGERKGNYWTLDPACEDMFEKGNYRRRRRMKRPFRPPPAHFQPGKGLFGAGGAAGGCGVAGAGADGYGYLAPPKYLQSGFLNNSWPLPQPPSPMPYASCQMAAAAAAAAAAAAAAGPGSPGAAAVVKGLAGPAASYGPYTRVQSMALPPGVVNSYNGLGGPPAAPPPPPHPHPHPHAHHLHAAAAPPPAPPHHGAAAPPPGQLSPASPATAAPPAPAPTSAPGLQFACARQPELAMMHCSYWDHDSKTGALHSRLDL

SEQ ID NO: 15005 - protein, 763 aa, Homo sapiens
MKTSPRRPLILKRRRLPLPVQNAPSETSEEEPKRSPAQQESNQAEASKEVAESNSCKFPAGIKIINHPTMPNTQVVAIPNNANIHSIITALTAKGKESGSSGPNKFILISCGGAPTQPPGLRPQTQTSYDAKRTEVTLETLGPKPAARDVNLPRPPGALCEQKRETCADGEAAGCTINNSLSNIQWLRKMSSDGLGSRSIKQEMEEKENCHLEQRQVKVEEPSRPSASWQNSVSERPPYSYMAMIQFAINSTERKRMTLKDIYTWIEDHFPYFKHIAKPGWKNSIRHNLSLHDMFVRETSANGKVSFWTIHPSANRYLTLDQVFKPLDPGSPQLPEHLESQQKRPNPELRRNMTIKTELPLGARRKMKPLLPRVSSYLVPIQFPVNQSLVLQPSVKVPLPLAASLMSSELARHSKRVRIAPKVLLAEEGIAPLSSAGPGKEEKLLFGEGFSPLLPVQTIKEEEIQPGEEMPHLARPIKVESPPLEEWPSPAPSFKEESSHSWEDSSQSPTPRPKKSYSGLRSPTRCVSEMLVIQHRERRERSRSRRKQHLLPPCVDEPELLFSEGPSTSRWAAELPFPADSSDPASQLSYSQEVGGPFKTPIKETLPISSTPSKSVLPRTPESWRLTPPAKVGGLDFSPVQTSQGASDPLPDPLGLMDLSTTPLQSAPPLESPQRLLSSEPLDLISVPFGNSSPSDIDVPKPGSPEPQVSGLAANRSLTEGLVLDTMNDSLSKILLDISFPGLDEDPLGPDNINWSQFIPELQ

SEQ ID NO: 15006 - protein, 648 aa, Homo sapiens
MVSLPPPQSDVTLPGPTRLEGERQGDLMQAPGLPGSPAPQSKHAGFSCSSFVSDGPPERTPSLPPHSPRIASPGPEQVQGHCPAGPGPGPFRLSPSDKYPGFGFEEAAASSPGRFLKGSHAPFHPYKRPFHEDVFPEAETTLALKGHSFKTPGPLEAFEEIPVDVAEAEAFLPGFSAEAWCNGLPYPSQEHGPQVLGSEVKVKPPVLESGAGMFCYQPPLQHMYCSSQPPFHQYSPGGGSYPIPYLGSSHYQYQRMAPQASTDGHQPLFPKPIYSYSILIFMALKNSKTGSLPVSEIYNFMTEHFPYFKTAPDGWKNSVRHNLSLNKCFEKVENKSGSSSRKGCLWALNPAKIDKMQEELQKWKRKDPIAVRKSMAKPEELDSLIGDKREKLGSPLLGCPPPGLSGSGPIRPLAPPAGLSPPLHSLHPAPGPIPGKNPLQDLLMGHTPSCYGQTYLHLSPGLAPPGPPQPLFPQPDGHLELRAQPGTPQDSPLPAHTPPSHSAKLLAEPSPARTMHDTLLPDGDLGTDLDAINPSLTDFDFQGNLWEQLKDDSLALDPLVLVTSSPTSSSMPPPQPPPHCFPPGPCLTETGSGAGDLAAPGSGGSGALGDLHLTTLYSAFMELEPTPPTAPAGPSVYLSPSSKPVALA

SEQ ID NO: 15007 - protein, 431 aa, Homo sapiens
MGPVIGMTPDKRAETPGAEKIAGLSQIYKMGSLPEAVDAARPKATLVDSESADDELTNLNWLHESTNLLTNFSLGSEGLPIVSPLYDIEGDDVPSFGPACYQNPEKKSATSKPPYSFSLLIYMAIEHSPNKCLPVKEIYSWILDHFPYFATAPTGWKNSVRHNLSLNKCFQKVERSHGKVNGKGSLWCVDPEYKPNLIQALKKQPFSSASSQNGSLSPHYLSSVIKQNQVRNLKESDIDAAAAMMLLNTSIEQGILECEKPLPLKTALQKKRSYGNAFHHPSAVRLQESDSLATSIDPKEDHNYSASSMAAQRCASRSSVSSLSSVDEVYEFIPKNSHVGSDGSEGFHSEEDTDVDYEDDPLGDSGYASQPCAKISEKGQSGKKMRKQTCQEIDEELKEAAGSLLHLAGIRTCLGSLISTAKTQNQKQRKK

SEQ ID NO: 15008 - protein, 490 aa, Homo sapiens
MGPVMPPSKKPESSGISVSSGLSQCYGGSGFSKALQEDDDLDFSLPDIRLEEGAMEDEELTNLNWLHESKNLLKSFGESVLRSVSPVQDLDDDTPPSPAHSDMPYDARQNPNCKPPYSFSCLIFMAIEDSPTKRLPVKDIYNWILEHFPYFANAPTGWKNSVRHNLSLNKCFKKVDKERSQSIGKGSLWCIDPEYRQNLIQALKKTPYHPHPHVFNTPPTCPQAYQSTSGPPIWPGSTFFKRNGALLQDPDIDAASAMMLLNTPPEIQAGFPPGVIQNGARVLSRGLFPGVRPLPITPIGVTAAMRNGITSCRMRTESEPSCGSPVVSGDPKEDHNYSSAKSSNARSTSPTSDSISSSSSSADDHYEFATKGSQEGSEGSEGSFRSHESPSDTEEDDRKHSQKEPKDSLGDSGYASQHKKRQHFAKARKVPSDTLPLKKRRTEKPPESDDEEMKEAAGSLLHLAGIRSCLNNITNRTAKGQKEQKETTKN

SEQ ID NO: 15009 - protein, 517 aa, Homo sapiens
MIESDTSSIMSGIIRNSGQNHHPSPQEYRLLATTSDDDLPGDLQSLSWLTAVDVPRLQQMASGRVDLGGPCVPHPHPGALAGVADLHVGATPSPLLHGPAGMAPRGMPGLGPITGHRDSMSQFPVGGQPSSGLQDPPHLYSPATQPQFPLPPGAQQCPPVGLYGPPFGVRPPYPQPHVAVHSSQELHPKHYPKPIYSYSCLIAMALKNSKTGSLPVSEIYSFMKEHFPYFKTAPDGWKNSVRHNLSLNKCFEKVENKMSGSSRKGCLWALNLARIDKMEEEMHKWKRKDLAAIHRSMANPEELDKLISDRPESCRRPGKPGEPEAPVLTHATTVAVAHGCLAVSQLPPQPLMTLSLQSVPLHHQVQPQAHLAPDSPAPAQTPPLHALPDLSPSPLPHPAMGRAPVDFINISTDMNTEVDALDPSIMDFALQGNLWEEMKDEGFSLDTLGAFADSPLGCDLGASGLTPASGGSDQSFPDLQVTGLYTAYSTPDSVAASGTSSSSQYLGAQGNKPIALL

SEQ ID NO: 15010 - protein, 655 aa, Homo sapiens
MAEAPQVVEIDPDFEPLPRPRSCTWPLPRPEFSQSNSATSSPAPSGSAAANPDAAAGLPSASAAAVSADFMSNLSLLEESEDFPQAPGSVAAAVAAAAAAAATGGLCGDFQGPEAGCLHPAPPQPPPPGPLSQHPPVPPAAAGPLAGQPRKSSSSRRNAWGNLSYADLITKAIESSAEKRLTLSQIYEWMVKSVPYFKDKGDSNSSAGWKNSIRHNLSLHSKFIRVQNEGTGKSSWWMLNPEGGKSGKSPRRRAASMDNNSKFAKSRSRAAKKKASLQSGQEGAGDSPGSQFSKWPASPGSHSNDDFDNWSTFRPRTSSNASTISGRLSPIMTEQDDLGEGDVHSMVYPPSAAKMASTLPSLSEISNPENMENLLDNLNLLSSPTSLTVSTQSSPGTMMQQTPCYSFAPPNTSLNSPSPNYQKYTYGQSSMSPLPQMPIQTLQDNKSSYGGMSQYNCAPGLLKELLTSDSPPHNDIMTPVDPGVAQPNSRVLGQNVMMGPNSVMSTYGSQASHNKMMNPSSHTHPGHAQQTSAVNGRPLPHTVSTMPHTSGMNRLTQVKTPVQVPLPHPMQMSALGGYSSVSSCNGYGRMGLLHQEKLPSDLDGMFIERLDCDMESIIRNDLMDGDTLDFNFDNVLPNQSFPHSVKTTTHSWVSG

SEQ ID NO: 15011 - protein, 673 aa, Homo sapiens
MAEAPASPAPLSPLEVELDPEFEPQSRPRSCTWPLQRPELQASPAKPSGETAADSMIPEEEDDEDDEDGGGRAGSAMAIGGGGGSGTLGSGLLLEDSARVLAPGGQDPGSGPATAAGGLSGGTQALLQPQQPLPPPQPGAAGGSGQPRKCSSRRNAWGNLSYADLITRAIESSPDKRLTLSQIYEWMVRCVPYFKDKGDSNSSAGWKNSIRHNLSLHSRFMRVQNEGTGKSSWWIINPDGGKSGKAPRRRAVSMDNSNKYTKSRGRAAKKKAALQTAPESADDSPSQLSKWPGSPTSRSSDELDAWTDFRSRTNSNASTVSGRLSPIMASTELDEVQDDDAPLSPMLYSSSASLSPSVSKPCTVELPRLTDMAGTMNLNDGLTENLMDDLLDNITLPPSQPSPTGGLMQRSSSFPYTTKGSGLGSPTSSFNSTVFGPSSLNSLRQSPMQTIQENKPATFSSMSHYGNQTLQDLLTSDSLSHSDVMMTQSDPLMSQASTAVSAQNSRRNVMLRNDPMMSFAAQPNQGSLVNQNLLHHQHQTQGALGGSRALSNSVSNMGLSESSSLGSAKHQQQSPVSQSMQTLSDSLSGSSLYSTSANLPVMGHEKFPSDLDLDMFNGSLECDMESIIRSELMDADGLDFNFDSLISTQNVVGLNVGNFTGAKQASSQSWVPG

SEQ ID NO: 15012 - protein, 505 aa, Homo sapiens
MDPGNENSATEAAAIIDLDPDFEPQSRPRSCTWPLPRPEIANQPSEPPEVEPDLGEKVHTEGRSEPILLPSRLPEPAGGPQPGILGAVTGPRKGGSRRNAWGNQSYAELISQAIESAPEKRLTLAQIYEWMVRTVPYFKDKGDSNSSAGWKNSIRHNLSLHSKFIKVHNEATGKSSWWMLNPEGGKSGKAPRRRAASMDSSSKLLRGRSKAPKKKPSVLPAPPEGATPTSPVGHFAKWSGSPCSRNREEADMWTTFRPRSSSNASSVSTRLSPLRPESEVLAEEIPASVSSYAGGVPPTLNEGLELLDGLNLTSSHSLLSRSGLSGFSLQHPGVTGPLHTYSSSLFSPAEGPLSAGEGCFSSSQALEALLTSDTPPPPADVLMTQVDPILSQAPTLLLLGGLPSSSKLATGVGLCPKPLEAPGPSSLVPTLSMIAPPPVMASAPIPKALGTPVLTPPTEAASQDRMPQDLDLDMYMENLECDMDNIISDLMDEGEGLDFNFEPDP

SEQ ID NO: 15013 - protein, 492 aa, Homo sapiens
MAAKLRAHQVDVDPDFAPQSRPRSCTWPLPQPDLAGDEDGALGAGVAEGAEDCGPERRATAPAMAPAPPLGAEVGPLRKAKSSRRNAWGNLSYADLITKAIESAPDKRLTLSQIYDWMVRYVPYFKDKGDSNSSAGWKNSIRHNLSLHTRFIRVQNEGTGKSSWWMLNPEGGKTGKTPRRRAVSMDNGAKFLRIKGKASKKKQLQAPERSPDDSSPSAPAPGPVPAAAKWAASPASHASDDYEAWADFRGGGRPLLGEAAELEDDEALEALAPSSPLMYPSPASALSPALGSRCPGELPRLAELGGPLGLHGGGGAGLPEGLLDGAQDAYGPRPAPRPGPVLGAPGELALAGAAAAYPGKGAAPYAPPAPSRSALAHPISLMTLPGEAGAAGLAPPGHAAAFGGPPGGLLLDALPGPYAAAAAGPLGAAPDRFPADLDLDMFSGSLECDVESIILNDFMDSDEMDFNFDSALPPPPPGLAGAPPPNQSWVPG

SEQ ID NO: 15014 - protein, 677 aa, Homo sapiens
MMQESGTETKSNGSAIQNGSGGSNHLLECGGLREGRSNGETPAVDIGAADLAHAQQQQQQALQVARQLLLQQQQQQQVSGLKSPKRNDKQPALQVPVSVAMMTPQVITPQQMQQILQQQVLSPQQLQVLLQQQQALMLQQQQLQEFYKKQQEQLQLQLLQQQHAGKQPKEQQQVATQQLAFQQQLLQMQQLQQQHLLSLQRQGLLTIQPGQPALPLQPLAQGMIPTELQQLWKEVTSAHTAEETTGNNHSSLDLTTTCVSSSAPSKTSLIMNPHASTNGQLSVHTPKRESLSHEEHPHSHPLYGHGVCKWPGCEAVCEDFQSFLKHLNSEHALDDRSTAQCRVQMQVVQQLELQLAKDKERLQAMMTHLHVKSTEPKAAPQPLNLVSSVTLSKSASEASPQSLPHTPTTPTAPLTPVTQGPSVITTTSMHTVGPIRRRYSDKYNVPISSADIAQNQEFYKNAEVRPPFTYASLIRQAILESPEKQLTLNEIYNWFTRMFAYFRRNAATWKNAVRHNLSLHKCFVRVENVKGAVWTVDEVEFQKRRPQKISGNPSLIKNMQSSHAYCTPLNAALQASMAENSIPLYTTASMGNPTLGNLASAIREELNGAMEHTNSNESDSSPGRSPMQAVHPVHVKEEPLDPEEAEGPLSLVTTANHSPDFDHDRDYEDEPVNEDME

SEQ ID NO: 15015 - protein, 431 aa, Homo sapiens
MPNPRPGKPSAPSLALGPSPGASPSWRAAPKASDLLGARGPGGTFQGRDLRGGAHASSSSLNPMPPSQLQLPTLPLVMVAPSGARLGPLPHLQALLQDRPHFMHQLSTVDAHARTPVLQVHPLESPAMISLTPPTTATGVFSLKARPGLPPGINVASLEWVSREPALLCTFPNPSAPRKDSTLSAVPQSSYPLLANGVCKWPGCEKVFEEPEDFLKHCQADHLLDEKGRAQCLLQREMVQSLEQQLVLEKEKLSAMQAHLAGKMALTKASSVASSDKGSCCIVAAGSQGPVVPAWSGPREAPDSLFAVRRHLWGSHGNSTFPEFLHNMDYFKFHNMRPPFTYATLIRWAILEAPEKQRTLNEIYHWFTRMFAFFRNHPATWKNAIRHNLSLHKCFVRVESEKGAVWTVDELEFRKKRSQRPSRCSNPTPGP

SEQ ID NO: 15016 - protein, 680 aa, Homo sapiens
MMVESASETIRSAPSGQNGVGSLSGQADGSSGGATGTTASGTGREVTTGADSNGEMSPAELLHFQQQQALQVARQFLLQQASGLSSPGNNDSKQSASAVQVPVSVAMMSPQMLTPQQMQQILSPPQLQALLQQQQALMLQQLQEYYKKQQEQLHLQLLTQQQAGKPQPKEALGNKQLAFQQQLLQMQQLQQQHLLNLQRQGLVSLQPNQASGPLQTLPQAAVCPTDLPQLWKGEGAPGQPAEDSVKQEGLDLTGTAATATSFAAPPKVSPPLSHHTLPNGQPTVLTSRRDSSSHEETPGSHPLYGHGECKWPGCETLCEDLGQFIKHLNTEHALDDRSTAQCRVQMQVVQQLEIQLAKESERLQAMMAHLHMRPSEPKPFSQPLNPVPGSSSFSKVTVSAADSFPDGLVHPPTSAAAPVTPLRPPGLGSASLHGGGPARRRSSDKFCSPISSELAQNHEFYKNADVRPPFTYASLIRQAILETPDRQLTLNEIYNWFTRMFAYFRRNTATWKNAVRHNLSLHKCFVRVENVKGAVWTVDEREYQKRRPPKMTGSPTLVKNMISGLSYGALNASYQAALAESSFPLLNSPGMLNPGSASSLLPLSHDDVGAPVEPLPSNGSSSPPRLSPPQYSHQVQVKEEPAEAEEDRQPGPPLGAPNPSASGPPEDRDLEEELPGEELS

SEQ ID NO: 15017 - protein, 403 aa, Homo sapiens
MKLEVFVPRAAHGDKQGSDLEGAGGSDAPSPLSAAGDDSLGSDGDCAANSPAAGGGARDTQGDGEQSAGGGPGAEEAIPAAAAAAVVAEGAEAGAAGPGAGGAGSGEGARSKPYTRRPKPPYSYIALIAMAIRDSAGGRLTLAEINEYLMGKFPFFRGSYTGWRNSVRHNLSLNDCFVKVLRDPSRPWGKDNYWMLNPNSEYTFADGVFRRRRKRLSHRAPVPAPGLRPEEAPGLPAAPPPAPAAPASPRMRSPARQEERASPAGKFSSSFAIDSILRKPFRSRRLRDTAPGTTLQWGAAPCPPLPAFPALLPAAPCRALLPLCAYGAGEPARLGAREAEVPPTAPPLLLAPLPAAAPAKPLRGPAAGGAHLYCPLRLPAALQAASVRRPGPHLPYPVETLLA

SEQ ID NO: 15018 - protein, 292 aa, Homo sapiens
MGNELFLAFTTSHLPLAEQKLARYKLRIVKPPKLPLEKKPNPDKDGPDYEPNLWMWVNPNIVYPPGKLEVSGRRKREDLTSTLPSSQPPQKEEDASCSEAAGVESLSQSSSKRSPPRKRFAFSPSTWELTEEEEAEDQEDSSSMALPSPHKRAPLQSRRLRQASSQAGRLWSRPPLNYFHLIALALRNSSPCGLNVQQIYSFTRKHFPFFRTAPEGWKNTVRHNLCFRDSFEKVPVSMQGGASTRPRSCLWKLTEEGHRRFAEEARALASTRLESIQQCMSQPDVMPFLFDL

SEQ ID NO: 15019 - protein, 311 aa, Homo sapiens
MDLKLKDCEFWYSLHGQVPGLLDWDMRNELFLPCTTDQCSLAEQILAKYRVGVMKPPEMPQKRRPSPDGDGPPCEPNLWMWVDPNILCPLGSQEAPKPSGKEDLTNISPFPQPPQKDEGSNCSEDKVVESLPSSSSEQSPLQKQGIHSPSDFELTEEEAEEPDDNSLQSPEMKCYQSQKLWQINNQEKSWQRPPLNCSHLIALALRNNPHCGLSVQEIYNFTRQHFPFFWTAPDGWKSTIHYNLCFLDSFEKVPDSLKDEDNARPRSCLWKLTKEGHRRFWEETRVLAFAQRERIQECMSQPELLTSLFDL

SEQ ID NO: 15020 - protein, 330 aa, Homo sapiens
MQQQPLPGPGAPTTEPTKPPYSYIALIAMAIQSSPGQRATLSGIYRYIMGRFAFYRHNRPGWQNSIRHNLSLNECFVKVPRDDRKPGKGSYWTLDPDCHDMFEHGSFLRRRRRFTRQTGAEGTRGPAKARRGPLRATSQDPGVPNATTGRQCSFPPELPDPKGLSFGGLVGAMPASMCPATTDGRPRPPMEPKEISTPKPACPGELPVATSSSSCPAFGFPAGFSEAESFNKAPTPVLSPESGIGSSYQCRLQALNFCMGADPGLEHLLASAAPSPAPPTPPGSLRAPLPLPTDHKEPWVAGGFPVQGGSGYPLGLTPCLYRTPGMFFFE

SEQ ID NO: 15021 - protein, 431 aa, Homo sapiens; identical to SEQ ID NO: 15015

SEQ ID NO: 15022 - protein, 644 aa, Homo sapiens
MADYSTVPPPSSGSAGGGGGGGGGGGVNDAFKDALQRARQIAAKIGGDAGTSLNSNDYGYGGQKRPLEDGDQPDAKKVAPQNDSFGTQLPPMHQQQSRSVMTEEYKVPDGMVGFIIGRGGEQISRIQQESGCKIQIAPDSGGLPERSCMLTGTPESVQSAKRLLDQIVEKGRPAPGFHHGDGPGNAVQEIMIPASKAGLVIGKGGETIKQLQERAGVKMVMIQDGPQNTGADKPLRITGDPYKVQQAKEMVLELIRDQGGFREVRNEYGSRIGGNEGIDVPIPRFAVGIVIGRNGEMIKKIQNDAGVRIQFKPDDGTTPERIAQITGPPDRCQHAAEIITDLLRSVQAGNPGGPGPGGRGRGRGQGNWNMGPPGGLQEFNFIVPTGKTGLIIGKGGETIKSISQQSGARIELQRNPPPNADPNMKLFTIRGTPQQIDYARQLIEEKIGGPVNPLGPPVPHGPHGVPGPHGPPGPPGPGTPMGPYNPAPYNPGPPGPAPHGPPAPYAPQGWGNAYPHWQQQAPPDPAKAGTDPNSAAWAAYYAHYYQQQAQPPPAAPAGAPTTTQTNGQGDQQNPAPAGQVDYTKAWEEYYKKMGQAVPAPTGAPPGGQPDYSAAWAEYYRQQAAYYAQTSPQGMPQHPPAPQGQ

SEQ ID NO: 15023 - protein, 572 aa, Homo sapiens
MAELVQGQSAPVGMKAEGFVDALHRVRQIAAKIDSIPHLNNSTPLVDPSVYGYGVQKRPLDDGVGNQLGALVHQRTVITEEFKVPDKMVGFIIGRGGEQISRIQAESGCKIQIASESSGIPERPCVLTGTPESIEQAKRLLGQIVDRCRNGPGFHNDIDSNSTIQEILIPASKVGLVIGRGGETIKQLQERTGVKMVMIQDGPLPTGADKPLRITGDAFKVQQAREMVLEIIREKDQADFRGVRGDFNSRMGGGSIEVSVPRFAVGIVIGRNGEMIKKIQNDAGVRIQFKPDDGISPERAAQVMGPPDRCQHAAHIISELILTAQERDGFGGLAAARGRGRGRGDWSVGAPGGVQEITYTVPADKCGLVIGKGGENIKSINQQSGAHVELQRNPPPNSDPNLRRFTIRGVPQQIEVARQLIDEKVGGTNLGAPGAFGQSPFSQPPAPPHQNTFPPRSSGCFPNMAAKVNGNPHSTPVSGPPAFLTQGWGSTYQAWQQPTQQVPSQQSQPQSSQPNYSKAWEDYYKKQSHAASAAPQASSPPDYTMAWAEYYRQQVAFYGQTLGQAQAHSQEQ

SEQ ID NO: 15024 - protein, 454 aa, Homo sapiens
MTKREAEELIEIEIDGTEKAECTEESIVEQTYAPAECVSQAIDINEPIGNLKKLLEPRLQCSLDAHEICLQDIQLDPERSLFDQGVKTDGTVQLSVQVISYQGIEPKLNILEIVKPADTVEVVIDPDAHHAESEAHLVEEAQVITLDGTKHITTISDETSEQVTRWAAALEGYRKEQERLGIPYDPIQWSTDQVLHWVVWVMKEFSMTDIDLTTLNISGRELCSLNQEDFFQRVPRGEILWSHLELLRKYVLASQEQQMNEIVTIDQPVQIIPASVQSATPTTIKVINSSAKAAKVQRAPRISGEDRSSPGNRTGNNGQIQLWQFLLELLTDKDARDCISWVGDEGEFKLNQPELVAQKWGQRKNKPTMNYEKLSRALRYYYDGDMICKVQGKRFVYKFVCDLKTLIGYSAAELNRLVTECEQKKLAKMQLHGIAQPVTAVALATASLQTEKDN

SEQ ID NO: 15025 - protein, 395 aa, Homo sapiens
MSLVDLGKKLLEAARAGQDDEVRILMANGAPFTTDWLGTSPLHLAAQYGHYSTTEVLLRAGVSRDARTKVDRTPLHMAASEGHASIVEVLLKHGADVNAKDMLKMTALHWATEHNHQEVVELLIKYGADVHTQSKFCKTAFDISIDNGNEDLAEILQIAMQNQINTNPESPDTVTIHAATPQFIIGPGGVVNLTGLVSSENSSKATDETGVSAVQFGNSSTSVLATLAALAEASAPLSNSSETPVVATEEVVTAESVDGAIQQVVSSGGQQVITIVTDGIQLGNLHSIPTSGIGQPIIVTMPDGQQVLTVPATDIAEETVISEEPPAKRQCIEIIENRVESAEIEEREALQKQLDEANREAQKYRQQLLKKEQEAEAYRQKLEAMTRLQTNKEAV

SEQ ID NO: 15026 - protein, 448 aa, Homo sapiens
MSLVDLGKRLLEAARKGQDDEVRTLMANGAPFTTDWLGTSPLHLAAQYGHYSTAEVLLRAGVSRDARTKVDRTPLHMAAADGHAHIVELLVRNGADVNAKDMLKMTALHWATERHHRDVVELLIKYGADVHAFSKFDKSAFDIALEKNNAEILVILQEAMQNQVNVNPERANPVTDPVSMAAPFIFTSGEVVNLASLISSTNTKTTSGDPHASTVQFSNSTTSVLATLAALAEASVPLSNSHRATANTEEIIEGNSVDSSIQQVMGSGGQRVITIVTDGVPLGNIQTSIPTGGIGQPFIVTVQDGQQVLTVPAGKVAEETVIKEEEEEKLPLTKKPRIGEKTNSVEESKEGNERELLQQQLQEANRRAQEYRHQLLKKEQEAEQYRLKLEAIARQQPNGVDFTMVEEVAEVDAVVVTEGELEERETKVTGSAGTTEPHTRVSMATVSS

SEQ ID NO: 15027 - protein, 413 aa, Homo sapiens
MEFPGLGSLGTSEPLPQFVDPALVSSTPESGVFFPSGPEGLDAAASSTAPSTATAAAAALAYYRDAEAYRHSPVFQVYPLLNCMEGIPGGSPYAGWAYGKTGLYPASTVCPTREDSPPQAVEDLDGKGSTSFLETLKTERLSPDLLTLGPALPSSLPVPNSAYGGPDFSSTFFSPTGSPLNSAAYSSPKLRGTLPLPPCEARECVNCGATATPLWRRDRTGHYLCNACGLYHKMNGQNRPLIRPKKRLIVSKRAGTQCTNCQTTTTTLWRRNASGDPVCNACGLYYKLHQVNRPLTMRKDGIQTRNRKASGKGKKKRGSSLGGTGAAEGPAGGFMVVAGGSGSGNCGEVASGLTLGPPGTAHLYQGLGPVVLSGPVSHLMPFPGPLLGSPTGSFPTGPMPPTTSTTVVAPLSS

SEQ ID NO: 15028 - protein, 480 aa, Homo sapiens
MEVAPEQPRWMAHPAVLNAQHPDSHHPGLAHNYMEPAQLLPPDEVDVFFNHLDSQGNPYYANPAHARARVSYSPAHARLTGGQMCRPHLLHSPGLPWLDGGKAALSAAAAHHHNPWTVSPFSKTPLHPSAAGGPGGPLSVYPGAGGGSGGGSGSSVASLTPTAAHSGSHLFGFPPTPPKEVSPDPSTTGAASPASSSAGGSAARGEDKDGVKYQVSLTESMKMESGSPLRPGLATMGTQPATHHPIPTYPSYVPAAAHDYSSGLFHPGGFLGGPASSFTPKQRSKARSCSEGRECVNCGATATPLWRRDGTGHYLCNACGLYHKMNGQNRPLIKPKRRLSAARRAGTCCANCQTTTTTLWRRNANGDPVCNACGLYYKLHNVNRPLTMKKEGIQTRNRKMSNKSKKSKKGAECFEELSKCMQEKSSPFSAAALAGHMAPVGHLPPFSHSGHILPTPTPIHPSSSLSFGHPHPSSMVTAMG

SEQ ID NO: 15029 - protein, 443 aa, Homo sapiens
MEVTADQPRWVSHHHPAVLNGQHPDTHHPGLSHSYMDAAQYPLPEEVDVLFNIDGQGNHVPPYYGNSVRATVQRYPPTHHGSQVCRPPLLHGSLPWLDGGKALGSHHTASPWNLSPFSKTSIHHGSPGPLSVYPPASSSSLSGGHASPHLFTFPPTPPKDVSPDPSLSTPGSAGSARQDEKECLKYQVPLPDSMKLESSHSRGSMTALGGASSSTHHPITTYPPYVPEYSSGLFPPSSLLGGSPTGFGCKSRPKARSSTGRECVNCGATSTPLWRRDGTGHYLCNACGLYHKMNGQNRPLIKPKRRLSAARRAGTSCANCQTTTTTLWRRNANGDPVCNACGLYYKLHNINRPLTMKKEGIQTRNRKMSSKSKKCKKVHDSLEDFPKNSSFNPAALSRHMSSLSHISPFSHSSHMLTTPTPMHPPSSLSFGPHHPSSMVTAMG

SEQ ID NO: 15030 - protein, 442 aa, Homo sapiens
MYQSLAMAANHGPPPGAYEAGGPGAFMHGAGAASSPVYVPTPRVPSSVLGLSYLQGGGAGSASGGASGGSSGGAASGAGPGTQQGSPGWSQAGADGAAYTPPPVSPRFSFPGTTGSLAAAAAAAAAREAAAYSSGGGAAGAGLAGREQYGRAGFAGSYSSPYPAYMADVGASWAAAAAASAGPFDSPVLHSLPGRANPAARHPNLDMFDDFSEGRECVNCGAMSTPLWRRDGTGHYLCNACGLYHKMNGINRPLIKPQRRLSASRRVGLSCANCQTTTTTLWRRNAEGEPVCNACGLYMKLHGVPRPLAMRKEGIQTRKRKPKNLNKSKTPAAPSGSESLPPASGASSNSSNATTSSSEEMRPIKTEPGLSSHYGHSSSVSQTFSVSAMSGHGPSIHPVLSALKLSPQGYASPVSQSPQTSSKQDSWNSLVLADSHGDIITA

SEQ ID NO: 15031 - protein, 397 aa, Homo sapiens
MYQSLALAASPRQAAYADSGSFLHAPGAGSPMFVPPARVPSMLSYLSGCEPSPQPPELAARPGWAQTATADSSAFGPGSPHPPAAHPPGATAFPFAHSPSGPGSGGSAGGRDGSAYQGALLPREQFAAPLGRPVGTSYSATYPAYVSPDVAQSWTAGPFDGSVLHGLPGRRPTFVSDFLEEFPGEGRECVNCGALSTPLWRRDGTGHYLCNACGLYHKMNGVNRPLVRPQKRLSSSRRAGLCCTNCHTTNTTLWRRNSEGEPVCNACGLYMKLHGVPRPLAMKKESIQTRKRKPKTIAKARGSSGSTRNASASPSAVASTDSSAATSKAKPSLASPVCPGPSMAPQASGQEDDSLAPGHLEFKFEPEDFAFPSTAPSPQAGLRGALRQEAWCALALA

SEQ ID NO: 15032 - protein, 595 aa, Homo sapiens
MALTDGGWCLPKRFGAAGADASDSRAFPAREPSTPPSPISSSSSSCSRGGERGPGGASNCGTPQLDTEAAAGPPARSLLLSSYASHPFGAPHGPSAPGVAGPGGNLSSWEDLLLFTDLDQAATASKLLWSSRGAKLSPFAPEQPEEMYQTLAALSSQGPAAYDGAPGGFVHSAAAAAAAAAAASSPVYVPTTRVGSMLPGLPYHLQGSGSGPANHAGGAGAHPGWPQASADSPPYGSGGGAAGGGAAGPGGAGSAAAHVSARFPYSPSPPMANGAAREPGGYAAAGSGGAGGVSGGGSSLAAMGGREPQYSSLSAARPLNGTYHHHHHHHHHHPSPYSPYVGAPLTPAWPAGPFETPVLHSLQSRAGAPLPVPRGPSADLLEDLSESRECVNCGSIQTPLWRRDGTGHYLCNACGLYSKMNGLSRPLIKPQKRVPSSRRLGLSCANCHTTTTTLWRRNAEGEPVCNACGLYMKLHGVPRPLAMKKEGIQTRKRKPKNINKSKTCSGNSNNSIPMTPTSTSSNSDDCSKNTSPTTQPTASGAGAPVMTGAGESTNPENSELKYSGQDGLYIGVSLASPAEVTSSVRPDSWCALALA

SEQ ID NO: 15033 - protein, 269 aa, Homo sapiens
MPLGLKPTCSVCKTTSSSMWKKGAQGEILCHHCTGRGGAGSGGAGSGAAGGTGGSGGGGFGAATFASTSATPPQSNGGGGGKQSKQEIHRRSARLRNTKYKSAPAAEKKVSTKGKGRRHIFKLKNPIKAPESVSTIITAESIFYKGVYYQIGDVVSVIDEQDGKPYYAQIRGFIQDQYCEKSAALTWLIPTLSSPRDQFDPASYIIGPEEDLPRKMEYLEFVCHAPSEYFKSRSSPFPTVPTRPEKGYIWTHVGPTPAITIKESVANHL

SEQ ID NO: 15034 - protein, 633 aa, Homo sapiens
MTEEACRTRSQKRALERDPTEDDVESKKIKMERGLLASDLNTDGDMRVTPEPGAGPTQGLLRATEATAMAMGRGEGLVGDGPVDMRTSHSDMKSERRPPSPDVIVLSDNEQPSSPRVNGLTTVALKETSTEALMKSSPEERERMIKQLKEELRLEEAKLVLLKKLRQSQIQKEATAQKPTGSVGSTVTTPPPLVRGTQNIPAGKPSLQTSSARMPGSVIPPPLVRGGQQASSKLGPQASSQVVMPPLVRGAQQIHSIRQHSSTGPPPLLLAPRASVPSVQIQGQRIIQQGLIRVANVPNTSLLVNIPQPTPASLKGTTATSAQANSTPTSVASVVTSAESPASRQAAAKLALRKQLEKTLLEIPPPKPPAPEMNFLPSAANNEFIYLVGLEEVVQNLLETQGRMSAATVLSREPYMCAQCKTDFTCRWREEKSGAIMCENCMTTNQKKALKVEHTSRLKAAFVKALQQEQEIEQRLLQQGTAPAQAKAEPTAAPHPVLKQVIKPRRKLAFRSGEARDWSNGAVLQASSQLSRGSATTPRGVLHTFSPSPKLQNSASATALVSRTGRHSERTVSAGKGSATSNWKKTPLSTGGTLAFVSPSLAVHKSSSAVDRQREYLLDMIPPRSIPQSATWK

SEQ ID NO: 15035 - protein, 593 aa, Homo sapiens
MDRMTEDALRLNLLKRSLDPADERDDVLAKRLKMEGHEAMERLKMLALLKRKDLANLEVPHELPTKQDGSGVKGYEEKLNGNLRPHGDNRTAGRPGKENINDEPVDMSARRSEPERGRLTPSPDIIVLSDNEASSPRSSSRMEERLKAANLEMFKGKGIEERQQLIKQLRDELRLEEARLVLLKKLRQSQLQKENVVQKTPVVQNAASIVQPSPAHVGQQGLSKLPSRPGAQGVEPQNLRTLQGHSVIRSATNTTLPHMLMSQRVIAPNPAQLQGQRGPPKPGLVRTTTPNMNPAINYQPQSSSSVPCQRTTSSAIYMNLASHIQPGTVNRVSSPLPSPSAMTDAANSQAAAKLALRKQLEKTLLEIPPPKPPAPLLHFLPSAANSEFIYMVGLEEVVQSVIDSQGKSCASLLRVEPFVCAQCRTDFTPHWKQEKNGKILCEQCMTSNQKKALKAEHTNRLKNAFVKALQQEQEIEQRLQQQAALSPTTAPAVSSVSKQETIMRHHTLRQAPQPQSSLQRGIPTSARSMLSNFAQAPQLSVPGGLLGMPGVNIAYLNTGIGGHKGPSLADRQREYLLDMIPPRSISQSISGQK

SEQ ID NO: 15036 - protein, 363 aa, Homo sapiens
MQRAGGGSAPGGNGGGGGGGPGTAFSIDSLIGPPPPRSGHLLYTGYPMFMPYRPLVLPQALAPAPLPAGLPPLAPLASFAGRLTNTFCAGLGQAVPSMVALTTALPSFAEPPDAFYGPQELAAAAAAAAATAARNNPEPGGRRPEGGLEADELLPAREKVAEPPPPPPPHFSETFPSLPAEGKVYSSDEEKLEASAGDPAGSEQEEEGSGGDSEDDGFLDSSAGGPGALLGPKPKLKGSLGTGAEEGAPVTAGVTAPGGKSRRRRTAFTSEQLLELEKEFHCKKYLSLTERSQIAHALKLSEVQVKIWFQNRRAKWKRIKAGNVSSRSGEPVRNPKIVVPIPVHVNRFAVRSQHQQMEQGARP

SEQ ID NO: 15037 - protein, 348 aa, Homo sapiens
MSAAFPPSLMMMQRPLGSSTAFSIDSLIGSPPQPSPGHFVYTGYPMFMPYRPVVLPPPPPPPPALPQAALQPALPPAHPHHQIPSLPTGFCSSLAQGMALTSTLMATLPGGFSASPQHQEAAAARKFAPQPLPGGGNFDKAEALQADAEDGKGFLAKEGSLLAFSAAETVQASLVGAVRGQGKDESKVEDDPKGKEESFSLESDVDYSSDDNLTGQAAHKEEDPGHALEETPPSSGAAGSTTSTGKNRRRRTAFTSEQLLELEKEFHCKKYLSLTERSQIAHALKLSEVQVKIWFQNRRAKWKRVKAGNANSKTGEPSRNPKIVVPIPVHVSRFAIRSQHQQLEQARP

SEQ ID NO: 15038 - protein, 781 aa, Homo sapiens
MAHRPKRTFRQRAADSSDSDGAEESPAEPGAPRELPVPGSAEEEPPSGGGRAQVAGLPHRVRGPRGRGRVWASSRRATKAAPRADEGSESRTLDVSTDEEDKIHHSSESKDDQGLSSDSSSSLGEKELSSTVKIPDAAFIQAARRKRELARAQDDYISLDVQHTSSISGMKRESEDDPESEPDDHEKRIPFTLRPQTLRQRMAEESISRNEETSEESQEDEKQDTWEQQQMRKAVKIIEERDIDLSCGNGSSKVKKFDTSISFPPVNLEIIKKQLNTRLTLLQETHRSHLREYEKYVQDVKSSKSTIQNLESSSNQALNCKFYKSMKIYVENLIDCLNEKIINIQEIESSMHALLLKQAMTFMKRRQDELKHESTYLQQLSRKDETSTSGNFSVDEKTQWILEEIESRRTKRRQARVLSGNCNHQEGTSSDDELPSAEMIDFQKSQGDILQKQKKVFEEVQDDFCNIQNILLKFQQWREKFPDSYYEAFISLCIPKLLNPLIRVQLIDWNPLKLESTGLKEMPWFKSVEEFMDSSVEDSKKESSSDKKVLSAIINKTIIPRLTDFVEFLWDPLSTSQTTSLITHCRVILEEHSTCENEVSKSRQDLLKSIVSRMKKAVEDDVFIPLYPKSAVENKTSPHSKFQERQFWSGLKLFRNILLWNGLLTDDTLQELGLGKLLNRYLIIALLNATPGPDVVKKCNQVAACLPEKWFENSAMRTSIPQLENFIQFLLQSAHKLSRSEFRDEVEEIILILVKIKALNQAESFIGEHHLDHLKSLIKED

SEQ ID NO: 15039 - protein, 436 aa, Homo sapiens
MEPDDFDSEDKEILSWDINDVKLPQNVKKTDWFQEWPDSYAKHIYSSEDKNAQRHLSSWAMRNTNNHNSRILKKSCLGVVVCGRDCLAEEGRKIYLRPAICDKARQKQQRKRCPNCDGPLKLIPCRGHGGFPVTNFWRHDGRFIFFQSKGEHDHPKPETKLEAEARRAMKKVNTAPSSVSLSLKGSTETRSLPGETQSQGSLPLTWSFQEGVQLPGSYSGHLIANTPQQNSLNDCFSFSKSYGLGGITDLTDQTSTVDPMKLYEKRKLSSSRTYSSGDLLPPSASGVYSDHGDLQAWSKNAALGRNHLADNCYSNYPFPLTSWPCSFSPSQNSSEPFYQQLPLEPPAAKTGCPPLWPNPAGNLYEEKVHVDFNSYVQSPAYHSPQEDPFLFTYASHPHQQYSLPSKSSKWDFEEEMTYLGLDHCNNDMLLNLCPLR

SEQ ID NO: 15040 - protein, 506 aa, Homo sapiens
MPAAAVQEAVGVCSYGMQLSWDINDPQMPQELALFDQFREWPDGYVRFIYSSDEKKAQRHLSGWAMRNTNNHNGHILKKSCLGVVVCTQACTLPDGSRLQLRPAICDKARLKQQKKACPNCHSALELIPCRGHSGYPVTNFWRLDGNAIFFQAKGVHDHPRPESKSETEARRSAIKRQMASFYQPQKKRIRESEAEENQDSSGHFSNIPPLENPEDFDIVTETSFPIPGQPCPSFPKSDVYKATCDLATFQGDKMPPFQKYSSPRIYLPRPPCSYELANPGYTNSSPYPTLYKDSTSIPNDTDWVHLNTLQCNVNSYSSYERSFDFTNKQHGWKPALGKPSLVERTNHGQFQAMATRPYYNPELPCRYLTTPPPGAPALQTVITTTTKVSYQAYQPPAMKYSDSVREVKSLSSCNYAPEDTGMSVYPEPWGPPVTVTRAASPSGPPPMKIAGDCRAIRPTVAIPHEPVSSRTDEAETWDVCLSGLGSAVSYSDRVGPFFTYNNEDF

SEQ ID NO: 15041 - protein, 422 aa, Homo sapiens
MPRSFLVKSKKAHSYHQPRSPGPDYSLRLENVPAPSRADSTSNAGGAKAEPRDRLSPESQLTEAPDRASASPDSCEGSVCERSSEFEDFWRPPSPSASPASEKSMCPSLDEAQPFPLPFKPYSWSGLAGSDLRHLVQSYRPCGALERGAGLGLFCEPAPEPGHPAALYGPKRAAGGAGAGAPGSCSAGAGATAGPGLGLYGDFGSAAAGLYERPTAAAGLLYPERGHGLHADKGAGVKVESELLCTRLLLGGGSYKCIKCSKVFSTPHGLEVHVRRSHSGTRPFACEMCGKTFGHAVSLEQHKAVHSQERSFDCKICGKSFKRSSTLSTHLLIHSDTRPYPCQYCGKRFHQKSDMKKHTFIHTGEKPHKCQVCGKAFSQSSNLITHSRKHTGFKPFGCDLCGKGFQRKVDLRRHRETQHGLK

SEQ ID NO: 15042 - protein, 330 aa, Homo sapiens
MPRSFLVKSKKAHTYHQPRVQEDEPLWPPALTPVPRDQAPSNSPVLSTLFPNQCLDWTNLKREPELEQDQNLARMAPAPEGPIVLSRPQDGDSPLSDSPPFYKPSFSWDTLATTYGHSYRQAPSTMQSAFLEHSVSLYGSPLVPSTEPALDFSLRYSPGMDAYHCVKCNKVFSTPHGLEVHVRRSHSGTRPFACDICGKTFGHAVSLEQHTHVHSQERSFECRMCGKAFKRSSTLSTHLLIHSDTRPYPCQFCGKRFHQKSDMKKHTYIHTGEKPHKCQVCGKAFSQSSNLITHSRKHTGFKPFSCELCTKGFQRKVDLRRHRESQHNLK

SEQ ID NO: 15043 - protein, 1106 aa, Homo sapiens
MFNSMTPPPISSYGEPCCLRPLPSQGAPSVGTEGLSGPPFCHQANLMSGPHSYGPARETNSCTEGPLFSSPRSAVKLTKKRALSISPLSDASLDLQTVIRTSPSSLVAFINSRCTSPGGSYGHLSIGTMSPSLGFPAQMNHQKGPSPSFGVQPCGPHDSARGGMIPHPQSRGPFPTCQLKSELDMLVGKCREEPLEGDMSSPNSTGIQDPLLGMLDGREDLEREEKREPESVYETDCRWDGCSQEFDSQEQLVHHINSEHIHGERKEFVCHWGGCSRELRPFKAQYMLVVHMRRHTGEKPHKCTFEGCRKSYSRLENLKTHLRSHTGEKPYMCEHEGCSKAFSNASDRAKHQNRTHSNEKPYVCKLPGCTKRYTDPSSLRKHVKTVHGPDAHVTKRHRGDGPLPRAPSISTVEPKREREGGPIREESRLTVPEGAMKPQPSPGAQSSCSSDHSPAGSAANTDSGVEMTGNAGGSTEDLSSLDEGPCIAGTGLSTLRRLENLRLDQLHQLRPIGTRGLKLPSLSHTGTTVSRRVGPPVSLERRSSSSSSISSAYTVSRRSSLASPFPPGSPPENGASSLPGLMPAQHYLLRARYASARGGGTSPTAASSLDRIGGLPMPPWRSRAEYPGYNPNAGVTRRASDPAQAADRPAPARVQRFKSLGCVHTPPTVAGGGQNFDPYLPTSVYSPQPPSITENAAMDARGLQEEPEVGTSMVGSGLNPYMDFPPTDTLGYGGPEGAAAEPYGARGPGSLPLGPGPPTNYGPNPCPQQASYPDPTQETWGEFPSHSGLYPGPKALGGTYSQCPRLEHYGQVQVKPEQGCPVGSDSTGLAPCLNAHPSEGPPHPQPLFSHYPQPSPPQYLQSGPYTQPPPDYLPSEPRPCLDFDSPTHSTGQLKAQLVCNYVQSQQELLWEGGGREDAPAQEPSYQSPKFLGGSQVSPSRAKAPVNTYGPGFGPNLPNHKSGSYPTPSPCHENFVVGANRASHRAAAPPRLLPPLPTCYGPLKVGGTNPSCGHPEVGRLGGGPALYPPPEGQVCNPLDSLDLDNTQLDFVAILDEPQGLSPPPSHDQRGSSGHTPPPSGPPNMAVGNMSVLLRSLPGETEFLNSSA

SEQ ID NO: 15044 - protein, 1586 aa, Homo sapiens
METSASATASEKQEAKSGILEAAGFPDPGKKASPLVVAAAAAAAVAAQGVPQHLLPPFHAPLPIDMRHQEGRYHYEPHSVHGVHGPPALSGSPVISDISLIRLSPHPAGPGESPFNAPHPYVNPHMEHYLRSVHSSPTLSMISAARGLSPADVAQEHLKERGLFGLPAPGTTPSDYYHQMTLVAGHPAPYGDLLMQSGGAASAPHLHDYLNPVDVSRFSSPRVTPRLSRKRALSISPLSDASLDLQRMIRTSPNSLVAYINNSRSSSAASGSYGHLSAGALSPAFTFPHPINPVAYQQILSQQRGLGSAFGHTPPLIQPSPTFLAQQPMALTSINATPTQLSSSSNCLSDTNQNKQSSESAVSSTVNPVAIHKRSKVKTEPEGLRPASPLALTQGQVSGHGSCGCALPLSQEQLADLKEDLDRDDCKQEAEVVIYETNCHWEDCTKEYDTQEQLVHHINNEHIHGEKKEFVCRWQACTREQKPFKAQYMLVVHMRRHTGEKPHKCTFEGCSKAYSRLENLKTHLRSHTGEKPYVCEHEGCNKAFSNASDRAKHQNRTHSNEKPYICKIPGCTKRYTDPSSLRKHVKTVHGPDAHVTKKQRNDVHLRTPLLKENGDSEAGTEPGGPESTEASSTSQAVEDCLHVRAIKTESSGLCQSSPGAQSSCSSEPSPLGSAPNNDSGVEMPGTGPGSLGDLTALDDTPPGADTSALAAPSAGGLQLRKHMTTMHRFEQLKKEKLKSLKDSCSWAGPTPHTRNTKLPPLPGSGSILENFSGSGGGGPAGLLPNPRLSELSASEVTMLSQLQERRDSSTSTVSSAYTVSRRSSGISPYFSSRRSSEASPLGAGRPHNASSADSYDPISTDASRRSSEASQCSGGSGLLNLTPAQQYSLRAKYAAATGGPPPTPLPGLERMSLRTRLALLDAPERTLPAGCPRPLGPRRGSDGPTYGHGHAGAAPAFPHEAPGGGARRASDPVRRPDALSLPRVQRFHSTHNVNPGPLPPCADRRGLRLQSHPSTDGGLARGAYSPRPPSISENVAMEAVAAGVDGAGPEADLGLPEDDLVLPDDVVQYIKAHASGALDEGTGQVYPTESTGFSDNPRLPSPGLHGQRRMVAADSNVGPSAPMLGGCQLGFGAPSSLNKNNMPVQWNEVSSGTVDALASQVKPPPFPQGNLAVVQQKPAFGQYPGYSPQGLQASPGGLDSTQPHLQPRSGAPSQGIPRVNYMQQLRQPVAGSQCPGMTTTMSPHACYGQVHPQLSPSTISGALNQFPQSCSNMPAKPGHLGHPQQTEVAPDPTTMGNRHRELGVPDSALAGVPPPHPVQSYPQQSHHLAASMSQEGYHQVPSLLPARQPGFMEPQTGPMGVATAGFGLVQPRPPLEPSPTGRHRGVRAVQQQLAYARATGHAMAAMPSSQETAEAVPKGAMGNMGSVPPQPPPQDAGGAPDHSMLYYYGQIHMYEQDGGLENLGSCQVMRSQPPQPQACQDSIQPQPLPSPGVNQVSSTVDSQLLEAPQIDFDAIMDDGDHSSLFSGALSPSLLHSLSQNSSRLTTPRNSLTLPSIPAGISNMAVGDMSSMLTSLAEESKFLNMMT

SEQ ID NO: 15045 - protein, 1580 aa, Homo sapiens
MEAQSHSSTTTEKKKVENSIVKCSTRTDVSEKAVASSTTSNEDESPGQTYHRERRNAITMQPQNVQGLSKVSEEPSTSSDERASLIKKEIHGSLPHVAEPSVPYRGTVFAMDPRNGYMEPHYHPPHLFPAFHPPVPIDARHHEGRYHYDPSPIPPLHMTSALSSSPTYPDLPFIRISPHRNPTAASESPFSPPHPYINPYMDYIRSLHSSPSLSMISATRGLSPTDAPHAGVSPAEYYHQMALLTGQRSPYADIIPSAATAGTGAIHMEYLHAMDSTRFSSPRLSARPSRKRTLSISPLSDHSFDLQTMIRTSPNSLVTILNNSRSSSSASGSYGHLSASAISPALSFTYSSAPVSLHMHQQILSRQQSLGSAFGHSPPLIHPAPTFPTQRPIPGIPTVLNPVQVSSGPSESSQNKPTSESAVSSTGDPMHNKRSKIKPDEDLPSPGARGQQEQPEGTTLVKEEGDKDESKQEPEVIYETNCHWEGCAREFDTQEQLVHHINNDHIHGEKKEFVCRWLDCSREQKPFKAQYMLVVHMRRHTGEKPHKCTFEGCTKAYSRLENLKTHLRSHTGEKPYVCEHEGCNKAFSNASDRAKHQNRTHSNEKPYVCKIPGCTKRYTDPSSLRKHVKTVHGPEAHVTKKQRGDIHPRPPPPRDSGSHSQSRSPGRPTQGALGEQQDLSNTTSKREECLQVKTVKAEKPMTSQPSPGGQSSCSSQQSPISNYSNSGLELPLTDGGSIGDLSAIDETPIMDSTISTATTALALQARRNPAGTKWMEHVKLERLKQVNGMFPRLNPILPPKAPAVSPLIGNGTQSNNTCSLGGPMTLLPGRSDLSGVDVTMLNMLNRRDSSASTISSAYLSSRRSSGISPCFSSRRSSEASQAEGRPQNVSVADSYDPISTDASRRSSEASQSDGLPSLLSLTPAQQYRLKAKYAAATGGPPPTPLPNMERMSLKTRLALLGDALEPGVALPPVHAPRRCSDGGAHGYGRRHLQPHDAPGHGVRRASDPVRTGSEGLALPRVPRFSSLSSCNPPAMATSAEKRSLVLQNYTRPEGGQSRNFHSSPCPPSITENVTLESLTMDADANLNDEDFLPDDVVQYLNSQNQAGYEQHFPSALPDDSKVPHGPGDFDAPGLPDSHAGQQFHALEQPCPEGSKTDLPIQWNEVSSGSADLSSSKLKCGPRPAVPQTRAFGFCNGMVVHPQNPLRSGPAGGYQTLGENSNPYGGPEHLMLHNSPGSGTSGNAFHEQPCKAPQYGNCLNRQPVAPGALDGACGAGIQASKLKSTPMQGSGGQLNFGLPVAPNESAGSMVNGMQNQDPVGQGYLAHQLLGDSMQHPGAGRPGQQMLGQISATSHINIYQGPESCLPGAHGMGSQPSSLAVVRGYQPCASFGGSRRQAMPRDSLALQSGQLSDTSQTCRVNGIKMEMKGQPHPLCSNLQNYSGQFYDQTVGFSQQDTKAGSFSISDASCLLQGTSAKNSELLSPGANQVTSTVDSLDSHDLEGVQIDFDAIIDDGDHSSLMSGALSPSIIQNLSHSSSRLTTPRASLPFPALSMSTTNMAIGDMSSLLTSLAEESKFLAVMQ

SEQ ID NO: 15046 - protein, 376 aa, Homo sapiens
MAALGDIQESPSVPSPVSLSSPGTPGTQHHEPQLHLHGHQHGSPGSSPKVLSQPSDLDLQDVEEVEIGRDTFWPDSEPKPEQAPRSPGSQAPDEGAGGALRSLLRSLPRRARCSAGFGPESSAERPAGQPPGAVPCAQPRGAWRVTLVQQAAAGPEGAPERAAELGVNFGRSRQGSARGAKPHRCEACGKSFKYNSLLLKHQRIHTGEKPYACHECGKRFRGWSGFIQHHRIHTGEKPYECGQCGRAFSHSSHFTQHLRIHNGEKPYKCGECGQAFSQSSNLVRHQRLHTGEKPYACSQCGKAFIWSSVLIEHQRIHTGEKPYECSDCGKAFRGRSHFFRHLRTHTGEKPFACGACGKAFGQSSQLIQHQRVHYRE

SEQ ID NO: 15047 - protein, 620 aa, Homo sapiens
MAEARTSLSAHCRGPLATGLHPDLDLPGRSLATPAPSCYLLGSEPSSGLGLQPETHLPEGSLKRCCVLGLPPTSPASSSPCASSDVTSIIRSSQTSLVTCVNGLRSPPLTGDLGGPSKRARPGPASTDSHEGSLQLEACRKASFLKQEPADEFSELFGPHQQGLPPPYPLSQLPPGPSLGGLGLGLAGRVVAGRQACRWVDCCAAYEQQEELVRHIEKSHIDQRKGEDFTCFWAGCVRRYKPFNARYKLLIHMRVHSGEKPNKCMFEGCSKAFSRLENLKIHLRSHTGEKPYLCQHPGCQKAFSNSSDRAKHQRTHLDTKPYACQIPGCSKRYTDPSSLRKHVKAHSAKEQQVRKKLHAGPDTEADVLTECLVLQQLHTSTQLAASDGKGGCGLGQELLPGVYPGSITPHNGLASGLLPPAHDVPSRHHPLDATTSSHHHLSPLPMAESTRDGLGPGLLSPIVSPLKGLGPPPLPPSSQSHSPGGQPFPTLPSKPSYPPFQSPPPPPLPSPQGYQGSFHSIQSCFPYGDCYRMAEPAAGGDGLVGETHGFNPLRPNGYHSLSTPLPATGYEALAEASCPTALPQQPSEDVVSSGPEDCGFFPNGAFDHCLGHIPSIYTDT

SEQ ID NO: 15048 - protein, 524 aa, Homo sapiens
MHSLDEPLDLKLSITKLRAAREKRERTLGVVRPRALHRELGLVDDSPTPGSPGSPPSGFLLNSKFPEKVEGRFSAAPLVDLSLSPPSGLDSPNGSSSLSPERQGNGDLPPVPSASDFQPLRYLDGVPSSFQFFLPLGSGGALHLPASSFLTPPKDKCLSPDLPLPKQLVCRWAKCNQLFELLQDLVDHVNDYHVKPEKDAGYCCHWEGCARHGRGFNARYKMLIHIRTHTNEKPHRCPTCSKSFSRLENLKIHNRSHTGEKPYVCPYEGCNKRYSNSSDRFKHTRTHYVDKPYYCKMPGCHKRYTDPSSLRKHIKAHGHFVSHEQQELLQLRPPPKPPLPAPDGGPYVSGAQIIIPNPAALFGGPGLPGLPLPLAPGPLDLSALACGNGGGSGGGGGMGPGLPGPVLPLNLAKNPLLPSPFGAGGLGLPVVSLLAGAAGGKAEGEKGRGSVPTRALGMEGHKTPLERTESSCSRPSPDGLPLLPGTVLDLSTGVNSAASSPEALAPGWVVIPPGSVLLKPAVVN

SEQ ID NO: 15049 - protein, 775 aa, Homo sapiens; identical to SEQ ID NO: 6017

SEQ ID NO: 15050 - protein, 573 aa, Homo sapiens
MANAEVSVPVGDVVVVPTEGNEGENPEDTKTQVILQLQPVQQGLFIDGHFYNRIYEAGSENNTAVVAVETHTIHKIEEGIDTGTIEANEDMEIAYPITCGESKAILLWKKFVCPGINVKCVKFNDQLISPKHFVHLAGKSTLKDWKRAIRLGGIMLRKMMDSGQIDFYQHDKVCSNTCRSTKFDLLISSARAPVPGQQTSVVQTPTSADGSITQIAISEESMEEAGLEWNSALTAAVTMATEEGVKKDSEEISEDTLMFWKGIADVGLMEEVVCNIQKEIEELLRGVQQRLIQAPFQVTDAAVLNNVAHTFGLMDTVKKVLDNRRNQVEQGEEQFLYTLTDLERQLEEQKKQGQDHRLKSQTVQNVVLMPVSTPKPPKRPRLQRPASTTVLSPSPPVQQPQFTVISPITITPVGQSFSMGNIPVATLSQGSSPVTVHTLPSGPQLFRYATVVSSAKSSSPDTVTIHPSSSLALLSSTAMQDGSTLGNMTTMVSPVELVAMESGLTSAIQAVESTSEDGQTIIEIDPAPDPEAEDTEGKAVILETELRTEEKVVAEMEEHQHQVHNVEIVVLED

SEQ ID NO: 15051 - protein, 530 aa, Homo sapiens
MATPDVSVHMEEVVVVTTPDTAVDGSGVEGVKTVLVTTNLAPHGGDLTEDNMETENAAAAAAAAFTASSQLKEAVLVKMAEEGENLEAEIVYPITCGDSRANLIWRKFVCPGINVKCVQYDEHVISPKEFVHLAGKSTLKDWKRAIRMNGIMLRKIMDSGELDFYQHDKVCSNTCRSTKIDLSGARVSLSSPTSAEYIPLTPAAADVNGSPATITIETCEDPGDWTAAIGDDTFTFWRGLKDAGLLDEVIQEFHQELVETMRGLQQRVQDPPLQLRDAVLLNNIVQNFGMLDLVKKVLASHKCQMDRSREQYARDLAALEQQCDEHRRRAKELKHKSQHLSNVLMTLTPVSLPPPVKRPRLARATSGPAAMASQVLTQSAQLALGPGVPVPQLTSVPLGKVVSTLPSTVLGKGSLQAPPASSPASPLLGGYTVLASSGSTYPSTVEIHPDASSLTVLSTAAVQDGSTVFKVVSPLQLLTLPGLGPTLQNVAQASPGSSTIVTVPAGAAPGPEEHTATIEVAAMAEDHERK

SEQ ID NO: 15052 - protein, 2241 aa, Homo sapiens
MLPCKKRRTTVTESLQHKGNQEENNVDLESAVKPESDQVKDLSSVSLSWDPSHGRVAGFEVQSLQDAGNQLGMEDTSLSSGMLTQNTNVPILEGVDVAISQGITLPSLESFHPLNIHIGKGKLHATGSKRGKKMTLRPGPVTQEDRCDHLTLKEPFSGEPSEEVKEEGGKPQMNSEGEIPSLPSGSQSAKPVSQPRKSTQPDVCASPQEKPLRTLFHQPEEEIEDGGLFIPMEEQDNEESEKRRKKKKGTKRKRDGRGQEGTLAYDLKLDDMLDRTLEDGAKQHNLTAVNVRNILHEVITNEHVVAMMKAAISETEDMPMFEPKMTRSKLKEVVEKGVVIPTWNISPIKKANEIKPPQFVDIHLEEDDSSDEEYQPDDEEEDETAEESLLESDVESTASSPRGAKKSRLRQSSEMTETDEESGILSEAEKVTTPAIRHISAEVVPMGPPPPPKPKQTRDSTFMEKLHAVDEELASSPVCMDSFQPMDDSLIAFRTRSKMPLKDVPLGQLEAELQAPDITPDMYDPNTADDEDWKMWLGGLMNDDVGNEDEADDDDDPEYNFLEDLDEPDTEDFRTDRAVRITKKEVNELMEELFETFQDEMGFSNMEDDGPEEEECVAEPRPNFNTPQALRFEEPLANLLNEQHRTVKELFEQLKMKKSSAKQLQEVEKVKPQSEKVHQTLILDPAQRKRLQQQMQQHVQLLTQIHLLATCNPNLNPEATTTRIFLKELGTFAQSSIALHHQYNPKFQTLFQPCNLMGAMQLIEDFSTHVSIDCSPHKTVKKTANEFPCLPKQVAWILATSKVFMYPELLPVCSLKAKNPQDKIVFTKAEDNLLALGLKHFEGTEFPNPLISKYLLTCKTAHQLTVRIKNLNMNRAPDNIIKFYKKTKQLPVLGKCCEEIQPHQWKPPIEREEHRLPFWLKASLPSIQEELRHMADGAREVGNMTGTTEINSDRSLEKDNLELGSESRYPLLLPKGVVLKLKPVATRFPRKAWRQKRSSVLKPLLIQPSPSLQPSFNPGKTPARSTHSEAPPSKMVLRIPHPIQPATVLQTVPGVPPLGVSGGESFESPAALPAVPPEARTSFPLSESQTLLSSAPVPKVMLPSLAPSKFRKPYVRRRPSKRRGVKASPCMKPAPVIHHPASVIFTVPATTVKIVSLGGGCNMIQPVNAAVAQSPQTIPITTLLVNPTSFPCPLNQSLVASSVSPLIVSGNSVNLPIPSTPEDKAHVNVDIACAVADGENAFQGLEPKLEPQELSPLSATVFPKVEHSPGPPLADAECQEGLSENSACRWTVVKTEEGRQALEPLPQGIQESLNNPTPGDLEEIVKMEPEEAREEISGSPERDICDDIKVEHAVELDTGAPSEELSSAGEVTKQTVLQKEEERSQPTKTPSSSQEPPDEGTSGTDVNKGSSKNALSSMDPEVRLSSPPGKPEDSSSVDGQSVGTPVGPETGGEKNGPEEEEEEDFDDLTQDEEDEMSSASEESVLSVPELQETMEKLTWLASERRMSQEGESEEENSQEENSEPEEEEEEEAEGMESLQKEDEMTDEAVGDSAEKPPTFASPETAPEVETSRTPPGESIKAAGKGRNNHRARNKRGSRARASKDTSKLLLLYDEDILERDPLREQKDLAFAQAYLTRVREALQHIPGKYEDFLQVIYEFESSTQRRTAVDLYKSLQILLQDWPQLLKDFAAFLLPEQALACGLFEEQQAFEKSRKFLRQLEICFAENPSHHQKIIKVLQGCADCLPQEITELKTQMWQLLKGHDHLQDEFSIFFDHLRPAASRMGDFEEINWTEEKEYEFDGFEEVALPDVEEEEEPPKIPTASKNKRKKEIGVQNHDKETEWPDGAKDCACSCHEGGPDSKLKKSKRRSCSHCSSKVCDSKSYKSKEPHELVGSSPHREASPMPGAKEAGQGKDMMEEEAPEERESTEATQSRTVRTTRKGEMPVSAGLAVGSTLPSPREVTVTERLLLDGPPPHSPETPQFPPTTGAVLYTVKRNQVGPEVRSCPKASPRLQKEREGQKAVSESEALMLVWDASETEKLPGTVEPPASFLSPVSSKTRDAGRRHVSGKPDTQERWLPSSRARVKTRDRTCPVHESPSGIDTSETSPKAPRGGLAKDSGTQAKGPEGEQQPKAAEATVCANNSKVSSTGEKVVLWTREADRVILTMCQEQGAQPQTFNIISQQLGNKTPAEVSHRFRELMQLFHTACEASSEDEDDATSTSNADQLSDHGDLLSEEELDE

SEQ ID NO: 15053 - protein, 618 aa, Homo sapiens
MTQEYDNKRPVLVLQNEALYPQRRSYTSEDEAWKSFLENPLTAATKAMMSINGDEDSAAALGLLYDYYKVPRERRSSTAKPEVEHPEPDHSKRNSIPIVTEQPLISAGENRVQVLKNVPFNIVLPHGNQLGIDKRGHLTAPDTTVTVSIATMPTHSIKTETQPHGFAVGIPPAVYHPEPTERVVVFDRNLNTDQFSSGAQAPNAQRRTPDSTFSETFKEGVQEVFFPSDLSLRMPGMNSEDYVFDSVSGNNFEYTLEASKSLRQKPGDSTMTYLNKGQFYPITLKEVSSSEGIHHPISKVRSVIMVVFAEDKSREDQLRHWKYWHSRQHTAKQRCIDIADYKESFNTISNIEEIAYNAISFTWDINDEAKVFISVNCLSTDFSSQKGVKGLPLNIQVDTYSYNNRSNKPVHRAYCQIKVFCDKGAERKIRDEERKQSKRKVSDVKVPLLPSHKRMDITVFKPFIDLDTQPVLFIPDVHFANLQRGTHVLPIASEELEGEGSVLKRGPYGTEDDFAVPPSTKLARIEEPKRVLLYVRKESEEVFDALMLKTPSLKGLMEAISDKYDVPHDKIGKIFKKCKKGILVNMDDNIVKHYSNEDTFQLQIEEAGGSYKLTLTEI

SEQ ID NO: 15054 - protein, 625 aa, Homo sapiens
MSQESDNNKRLVALVPMPSDPPFNTRRAYTSEDEAWKSYLENPLTAATKAMMSINGDEDSAAALGLLYDYYKVPRDKRLLSVSKASDSQEDQEKRNCLGTSEAQSNLSGGENRVQVLKTVPVNLSLNQDHLENSKREQYSISFPESSAIIPVSGITVVKAEDFTPVFMAPPVHYPRGDGEEQRVVIFEQTQYDVPSLATHSAYLKDDQRSTPDSTYSESFKDAATEKFRSASVGAEEYMYDQTSSGTFQYTLEATKSLRQKQGEGPMTYLNKGQFYAITLSETGDNKCFRHPISKVRSVVMVVFSEDKNRDEQLKYWKYWHSRQHTAKQRVLDIADYKESFNTIGNIEEIAYNAVSFTWDVNEEAKIFITVNCLSTDFSSQKGVKGLPLMIQIDTYSYNNRSNKPIHRAYCQIKVFCDKGAERKIRDEERKQNRKKGKGQASQTQCNSSSDGKLAAIPLQKKSDITYFKTMPDLHSQPVLFIPDVHFANLQRTGQVYYNTDDEREGGSVLVKRMFRPMEEEFGPVPSKQMKEEGTKRVLLYVRKETDDVFDALMLKSPTVKGLMEAISEKYGLPVEKIAKLYKKSKKGILVNMDDNIIEHYSNEDTFILNMESMVEGFKVTLMEI

SEQ ID NO: 15055 - protein, 626 aa, Homo sapiens; identical to SEQ ID NO: 6189

SEQ ID NO: 15056 - protein, 257 aa, Homo sapiens
MPASMFSIDNILAARPRCKDSVLPVAHSAAAPVVFPALHGDSLYGASGGASSDYGAFYPRPVAPGGAGLPAAVSGSRLGYNNYFYGQLHVQAAPVGPACCGAVPPLGAQQCSCVPTPPGYEGPGSVLVSPVPHQMLPYMNVGTLSRTELQLLNQLHCRRKRRHRTIFTDEQLEALENLFQETKYPDVGTREQLARKVHLREEKVEVWFKNRRAKWRRQKRSSSEESENAEKWNKTSSSKASPEKREEEGKSDLDSDS

SEQ ID NO: 15057 - protein, 205 aa, Homo sapiens
MAAAAGGAASRRGAGRPCPFSIEHILSSLPERSLPARAACPPQPAGRQSPAKPEEPGAPEAAPCACCCCCGPRAAPCGPPEAAAGLGARLAWPLRLGPAVPLSLGAPAGGSGALPGAVGPGSQRRTRRHRTIFSEEQLQALEALFVQNQYPDVSTRERLAGRIRLREERVEVWFKNRRAKWRHQKRASASARLLPGVKKSPKGSC

SEQ ID NO: 15058 - protein, 264 aa, Homo sapiens
MPRSFLVDSLVLREAGEKKAPEGSPPPLFPYAVPPPHALHGLSPGACHARKAGLLCVCPLCVTASQLHGPPGPPALPLLKASFPPFGSQYCHAPLGRQHSAVSPGVAHGPAAAAAAAALYQTSYPLPDPRQFHCISVDSSSNQLPSSKRMRTAFTSTQLLELEREFASNMYLSRLRRIEIATYLNLSEKQVKIWFQNRRVKHKKEGKGSNHRGGGGGGAGGGGSAPQGCKCASLSSAKCSEDDDELPMSPSSSGKDDRDLTVTP

SEQ ID NO: 15059 - protein, 304 aa, Homo sapiens
MSRSFYVDSLIIKDTSRPAPSLPEPHPGPDFFIPLGMPPPLVMSVSGPGCPSRKSGAFCVCPLCVTSHLHSSRGSVGAGSGGAGAGVTGAGGSGVAGAAGALPLLKGQFSSAPGDAQFCPRVNHAHHHHHPPQHHHHHHQPQQPGSAAAAAAAAAAAAAAAALGHPQHHAPVCTATTYNVADPRRFHCLTMGGSDASQVPNGKRMRTAFTSTQLLELEREFSSNMYLSRLRRIEIATYLNLSEKQVKIWFQNRRVKHKKEGKGTQRNSHAGCKCVGSQVHYARSEDEDSLSPASANDDKEISPL

SEQ ID NO: 15060 - protein, 998 aa, Homo sapiens
MAQVAMSTLPVEDEESSESRMVVTFLMSALESMCKELAKSKAEVACIAVYETDVFVVGTERGRAFVNTRKDFQKDFVKYCVEEEEKAAEMHKMKSTTQANRMSVDAVEIETLRKTVEDYFCFCYGKALGKSTVVPVPYEKMLRDQSAVVVQGLPEGVAFKHPENYDLATLKWILENKAGISFIIKRPFLEPKKHVGGRVMVTDADRSILSPGGSCGPIKVKTEPTEDSGISLEMAAVTVKEESEDPDYYQYNIQAGPSETDDVDEKQPLSKPLQGSHHSSEGNEGTEMEVPAEDSTQHVPSETSEDPEVEVTIEDDDYSPPSKRPKANELPQPPVPEPANAGKRKVREFNFEKWNARITDLRKQVEELFERKYAQAIKAKGPVTIPYPLFQSHVEDLYVEGLPEGIPFRRPSTYGIPRLERILLAKERIRFVIKKHELLNSTREDLQLDKPASGVKEEWYARITKLRKMVDQLFCKKFAEALGSTEAKAVPYQKFEAHPNDLYVEGLPENIPFRSPSWYGIPRLEKIIQVGNRIKFVIKRPELLTHSTTEVTQPRTNTPVKEDWNVRITKLRKQVEEIFNLKFAQALGLTEAVKVPYPVFESNPEFLYVEGLPEGIPFRSPTWFGIPRLERIVRGSNKIKFVVKKPELVISYLPPGMASKINTKALQSPKRPRSPGSNSKVPEIEVTVEGPNNNNPQTSAVRTPTQTNGSNVPFKPRGREFSFEAWNAKITDLKQKVENLFNEKCGEALGLKQAVKVPFALFESFPEDFYVEGLPEGVPFRRPSTFGIPRLEKILRNKAKIKFIIKKPEMFETAIKESTSSKSPPRKINSSPNVNTTASGVEDLNIIQVTIPDDDNERLSKVEKARQLREQVNDLFSRKFGEAIGMGFPVKVPYRKITINPGCVVVDGMPPGVSFKAPSYLEISSMRRILDSAEFIKFTVIRPFPGLVINNQLVDQSESEGPVIQESAEPSQLEVPATEEIKETDGSSQIKQEPDPTW

SEQ ID NO: 15061 - protein, 365 aa, Homo sapiens
MDPPAVVAESVSSLTIADAFIAAGESSAPTPPRPALPRRFICSFPDCSANYSKAWKLDAHLCKHTGERPFVCDYEGCGKAFIRDYHLSRHILTHTGEKPFVCAANGCDQKFNTKSNLKKHFERKHENQQKQYICSFEDCKKTFKKHQQLKIHQCQHTNEPLFKCTQEGCGKHFASPSKLKRHAKAHEGYVCQKGCSFVAKTWTELLKHVRETHKEEILCEVCRKTFKRKDYLKQHMKTHAPERDVCRCPREGCGRTYTTVFNLQSHILSFHEESRPFVCEHAGCGKTFAMKQSLTRHAVVHDPDKKKMKLKVKKSREKRSLASHLSGYIPPKRKQGQGLSLCQNGESPNCVEDKMLSTVAVLTLG

SEQ ID NO: 15062 - protein, 711 aa, Homo sapiens
MESGAVLLESKSSPFNLLHEMHELRLLGHLCDVTVSVEYQGVRKDFMAHKAVLAATSKFFKEVFLNEKSVDGTRTNVYLNEVQVADFASFLEFVYTAKVQVEEDRVQRMLEVAEKLKCLDLSETCFQLKKQMLESVLLELQNFSESQEVEVSSGSQVSAAPAPRASVATDGPHPSGLTDSLDYPGERASNGMSSDLPPKKSKDKLDKKKEVVKPPYPKIRRASGRLAGRKVFVEIPKKKYTRRLREQQKTAEGDVGDYRCPQDQSPDRVGTEMEQVSKNEGCQAGAELEELSKKAGPEEEEEEEEEDEEGEKKKSNFKCSICEKAFLYEKSFLKHSKHRHGVATEVVYRCDTCGQTFANRCNLKSHQRHVHSSERHFPCELCGKKFKRKKDVKRHVLQVHEGGGERHRCGQCGKGLSSKTALRLHERTHTGDRPYGCTECGARFSQPSALKTHMRIHTGEKPFVCDECGARFTQNHMLIYHKRCHTGERPFMCETCGKSFASKEYLKHHNRIHTGSKPFKCEVCFRTFAQRNSLYQHIKVHTGERPYCCDQCGKQFTQLNALQRHRRIHTGERPFMCNACGRTFTDKSTLRRHTSIHDKNTPWKSFLVIVDGSPKNDDGHKTEQPDEEYVSSKLSDKLLSFAENGHFHNLAAVQDTVPTMQENSSADTACKADDSVVSQDTLLATTISELSELTPQTDSMPTQLHSLSNME

SEQ ID NO: 15063 - protein, 215 aa, Homo sapiens
MNLVGSYAHHHHHHHPHPAHPMLHEPFLFGPASRCHQERPYFQSWLLSPADAAPDFPAGGPPPAAAAAATAYGPDARPGQSPGRLEALGGRLGRRKGSGPKKERRRTESINSAFAELRECIPNVPADTKLSKIKTLRLATSYIAYLMDVLAKDAQSGDPEAFKAELKKADGGRESKRKRELQQHEGFPPALGPVEKRIKGRTGWPQQVWALELNQ

SEQ ID NO: 15064 - protein, 217 aa, Homo sapiens
MSLVGGFPHHPVVHHEGYPFAAAAAAAAAAAASRCSHEENPYFHGWLIGHPEMSPPDYSMALSYSPEYASGAAGLDHSHYGGVPPGAGPPGLGGPRPVKRRGTANRKERRRTQSINSAFAELRECIPNVPADTKLSKIKTLRLATSYIAYLMDLLAKDDQNGEAEAFKAEIKKTDVKEEKRKKELNEILKSTVSSNDKKTKGRTGWPQHVWALELKQ

SEQ ID NO: 15065 - protein, 514 aa, Homo sapiens
MVWEVKTNQMPNAVQKLLLVMDKRASGMNDSLELLQCNENLPSSPGYNSCDEHMELDDLPELQAVQSDPTQSGMYQLSSDVSHQEYPRSSWNQNTSDIPETTYRENEVDWLTELANIATSPQSPLMQCSFYNRSSPVHIIATSKSLHSYARPPPVSSSSKSEPAFPHHHWKEETPVRHERANSESESGIFCMSSLSDDDDLGWCNSWPSTVWHCFLKGTRLCFHKGSNKEWQDVEDFARAEGCDNEEDLQMGIHKGYGSDGLKLLSHEESVSFGESVLKLTFDPGTVEDGLLTVECKLDHPFYVKNKGWSSFYPSLTVVQHGIPCCEVHIGDVCLPPGHPDAINFDDSGVFDTFKSYDFTPMDSSAVYVLSSMARQRRASLSCGGPGGQDFARSGFSKNCGSPGSSQLSSNSLYAKAVKNHSSGTVSATSPNKCKRPMNAFMLFAKKYRVEYTQMYPGKDNRAISVILGDRWKKMKNEERRMYTLEAKALAEEQKRLNPDCWKRKRTNSGSQQH

SEQ ID NO: 15066 - protein, 184 aa, Homo sapiens
MKALGAVLLALLLCGRPGRGQTQQEEEEEDEDHGPDDYDEEDEDEVEEEETNRLPGGRSRVLLRCYTCKSLPRDERCNLTQNCSHGQTCTTLIAHGNTESGLLTTHSTWCTDSCQPITKTVEGTQVTMTCCQSSLCNVPPWQSSRVQDPTGKGAGGPRGSSETVGAALLLNLLAGLGAMGARRP

SEQ ID NO: 15067 - protein, 690 aa, Homo sapiens
MNLRSVFTVEQQRILQRYYENGMTNQSKNCFQLILQCAQETKLDFSVVRTWVGNKRRKMSSKNSESGTATTGTSLSAPDITVRNVVNIARPSSQQSSWTSANNDVIVTGIYSPASSSSRQGTNKHTDTQITEAHKIPIQKTATKNDTEFQLHIPVQRQVAHCKNASLLLGEKTIILSRQTSVLNAGNSVFNHAKKNYGNSSVQASEMTVPQKPSVCHRPCKIEPVGIQRSYKPEHTGPALHNLCGQKPTIRDPYCRTQNLEIREVFSLAVSDYPQRILGGNAPQKPSSAEGNCLSIAMETGDAEDEYAREEELASMRAQIPSYSRFYESGSSLRAENQSTTLPGPGRNMPNSQMVNIRDMSDNVLYQNRNYHLTPRTSLHTASSTMYSNTNPLRSNFSPHFASSNQLRLSQNQNNYQISGNLTVPWITGCSRKRALQDRTQFSDRDLATLKKYWDNGMTSLGSVCREKIEAVATELNVDCEIVRTWIGNRRRKYRLMGIEVPPPRGGPADFSEQPESGSLSALTPGEEAGPEVGEDNDRNDEVSICLSEGSSQEEPNEVVPNDARAHKEEDHHAVTTDNVKIEIIDDEESDMISNSEVEQVNSFLDYKNEEVKFIENELEIQKQKYFKLQTFVRSLILAMKADDKEQQQALLSDLPPELEEMDFNHASLEPDDTSFSVSSLSEKNVSESL

SEQ ID NO: 15068 - protein, 242 aa, Homo sapiens
MSDKLKERKRTPVSHKVIEKRRRDRINRCLNELGKTVPMALAKQSSGKLEKAEILEMTVQYLRALHSADFPRGREKAELLAEFANYFHYGYHECMKNLVHYLTTVERMETKDTKYARILAFLQSKARLGAEPAFPPLGSLPEPDFSYQLHPAGPEFAGHSPGEAAVFPQGSGAGPFPWPPGAARSPALPYLPSAPVPLASPAQQHSPFLTPVQGLDRHYLNLIGHAHPNALNLHTPQHPPVL

SEQ ID NO: 15069 - protein, 268 aa, Homo sapiens; identical to SEQ ID NO: 5534

SEQ ID NO: 15070 - protein, 280 aa, Homo sapiens
MPADIMEKNSSSPVAATPASVNTTPDKPKTASEHRKSSKPIMEKRRRARINESLSQLKTLILDALKKDSSRHSKLEKADILEMTVKHLRNLQRAQMTAALSTDPSVLGKYRAGFSECMNEVTRFLSTCEGVNTEVRTRLLGHLANCMTQINAMTYPGQPHPALQAPPPPPPGPGGPQHAPFAPPPPLVPIPGGAAPPPGGAPCKLGSQAGEAAKVFGGFQVVPAPDGQFAFLIPNGAFAHSGPVIPVYTSNSGTSVGPNAVSPSSGPSLTADSMWRPWRN

SEQ ID NO: 15071 - protein, 173 aa, Homo sapiens
MGLPRRAGDAAELRKSLKPLLEKRRRARINQSLSQLKGLILPLLGRENSNCSKLEKADVLEMTVRFLQELPASSWPTAAPLPCDSYREGYSACVARLARVLPACRVLEPAVSARLLEHLWRRAASATLDGGRAGDSSGPSAPAPAPASAPEPASAPVPSPPSPPCGPGLWRPW

SEQ ID NO: 15072 - protein, 186 aa, Homo sapiens
MEKKRRARINVSLEQLKSLLEKHYSHQIRKRKLEKADILELSVKYMRSLQNSLQGLWPVPRGAEQPSGFRSCLPGVSQLLRRGDEVGSGLRCPLVPESAAGSTMDSAGLGQEAPALFRPCTPAVWAPAPAAGGPRSPPPLLLLPESLPGSSASVPPPQPASSRCAESPGLGLRVWRPWGSPGDDLN

SEQ ID NO: 15073 - protein, 221 aa, Homo sapiens
MAADTPGKPSASPMAGAPASASRTPDKPRSAAEHRKSSKPVMEKRRRARINESLAQLKTLILDALRKESSRHSKLEKADILEMTVRHLRSLRRVQVTAALSADPAVLGKYRAGFHECLAEVNRFLAGCEGVPADVRSRLLGHLAACLRQLGPSRRPASLSPAAPAEAPAPEVYAGRPLLPSLGGPFPLLAPPLLPGLTRALPAAPRAGPQGPGGPWRPWLR

SEQ ID NO: 15074 - protein, 166 aa, Homo sapiens
MAPSTVAVELLSPKEKNRLRKPVVEKMRRDRINSSIEQLKLLLEQEFARHQPNSKLEKADILEMAVSYLKHSKAFVAAAGPKSLHQDYSEGYSWCLQEAVQFLTLHAASDTQMKLLYHFQRPPAAPAAPAKEPKAPGAAPPPALSAKATAAAAAAHQPACGLWRPW

SEQ ID NO: 15075 - protein, 224 aa, Homo sapiens
MAPPAAPGRDRVGREDEDGWETRGDRKARKPLVEKKRRARINESLQELRLLLAGAEVQAKLENAEVLELTVRRVQGVLRGRAREREQLQAEASERFAAGYIQCMHEVHTFVSTCQAIDATVAAELLNHLLESMPLREGSSFQDLLGDALAGPPRAPGRSGWPAGGAPGSPIPSPPGPGDDLCSDLEEAPEAELSQAPAEGPDLVPAALGSLTTAQIARSVWRPW

SEQ ID NO: 15076 - protein, 225 aa, Homo sapiens
MVTRDRAENRDGPKMLKPLVEKRRRDRINRSLEELRLLLLERTRDQNLRNPKLEKAEILEFAVGYLRERSRVEPPGVPRSPVQDAEALASCYLSGFRECLLRLAAFAHDASPAARAQLFSALHGYLRPKPPRPKPVDPRPPAPRPSLDPAAPALGPALHQRPPVHQGHPSPRCAWSPSLCSPRAGDSGAPAPLTGLLPPPPPPHRQDGAPKAPLPPPPAFWRPWP

SEQ ID NO: 15077 - protein, 185 aa, Homo sapiens
MSPSLQEGAQLGENKPSTCSFSIERILGLDQKKDCVPLMKPHRPWADTCSSSGKDGNLCLHVPNPPSGISFPSVVDHPMPEERASKYENYFSASERLSLKRELSWYRGRRPRTAFTQNQIEVLENVFRVNCYPGIDIREDLAQKLNLEEDRIQIWFQNRRAKLKRSHRESQFLMAKKNFNTNLLE

SEQ ID NO: 15078 - protein, 304 aa, Homo sapiens
MKRAHPEYSSSDSELDETIEVEKESADENGNLSSALGSMSPTTSSQILARKRRRGIIEKRRRDRINNSLSELRRLVPSAFEKQGSAKLEKAEILQMTVDHLKMLHTAGGKGYFDAHALAMDYRSLGFRECLAEVARYLSIIEGLDASDPLRVRLVSHLNNYASQREAASGAHAGLGHIPWGTVFGHHPHIAHPLLLPQNGHGNAGTTASPTEPHHQGRLGSAHPEAPALRAPPSGSLGPVLPVVTSASKLSPPLLSSVASLSAFPFSFGSFHLLSPNALSPSAPTQAANLGKPYRPWGTEIGAF

SEQ ID NO: 15079 - protein, 337 aa, Homo sapiens
MKRPCEETTSESDMDETIDVGSENNYSGQSTSSVIRLNSPTTTSQIMARKKRRGIIEKRRRDRINNSLSELRRLVPTAFEKQGSAKLEKAEILQMTVDHLKMLQATGGKGYFDAHALAMDFMSIGFRECLTEVARYLSSVEGLDSSDPLRVRLVSHLSTCATQREAAAMTSSMAHHHHPLHPHHWAAAFHHLPAALLQPNGLHASESTPCRLSTTSEVPPAHGSALLTATFAHADSALRMPSTGSVAPCVPPLSTSLLSLSATVHAAAAAATAAAHSFPLSFAGAFPMLPPNAAAAVAAATAISPPLSVSATSSPQQTSSGTNNKPYRPWGTEVGAF

SEQ ID NO: 15080 - protein, 328 aa, Homo sapiens
MKRPKEPSGSDGESDGPIDVGQEGQLSQMARPLSTPSSSQMQARKKHRGIIEKRRRDRINSSLSELRRLVPTAFEKQGSSKLEKAEVLQMTVDHLKMLHATGGTGFFDARALAVDFRSIGFRECLTEVIRYLGVLEGPSSRADPVRIRLLSHLNSYAAEMEPSPTPTGPLAFPAWPWSFFHSCPGLPALSNQLAILGRVPSPVLPGVSSPAYPIPALRTAPLRRATGIILPARRNVLPSRGASSTRRARPLERPATPVPVAPSSRAARSSHIAPLLQSSSPTPPGPTGSAAYVAVPTPNSSSPGPAGRPAGAMLYHSWVSEITEIGAF

SEQ ID NO: 15081 - protein, 270 aa, Homo sapiens
MQYPHPGPAAGAVGVPLYAPTPLLQPAHPTPFYIEDILGRGPAAPTPAPTLPSPNSSFTSLVSPYRTPVYEPTPIHPAFSHHSAAALAAAYGPGGFGGPLYPFPRTVNDYTHALLRHDPLGKPLLWSPFLQRPLHKRKGGQVRFSNDQTIELEKKFETQKYLSPPERKRLAKMLQLSERQVKTWFQNRRAKWRRLKQENPQSNKKEELESLDSSCDQRQDLPSEQNKGASLDSSQCSPSPASQEDLESEISEDSDQEVDIEGDKSYFNAG

SEQ ID NO: 15082 - protein, 733 aa, Homo sapiens
MTFPEADILLKSGECAGQTMLDTMEAPGHSRQLLLQLNNQRTKGFLCDVIIVVQNALFRAHKNVLAASSAYLKSLVVHDNLLNLDHDMVSPAVFRLVLDFIYTGRLADGAEAAAAAAVAPGAEPSLGAVLAAASYLQIPDLVALCKKRLKRHGKYCHLRGGGGGGGGYAPYGRPGRGLRAATPVIQACYPSPVGPPPPPAAEPPSGPEAAVNTHCAELYASGPGPAAALCASERRCSPLCGLDLSKKSPPGSAAPERPLAERELPPRPDSPPSAGPAAYKEPPLALPSLPPLPFQKLEEAAPPSDPFRGGSGSPGPEPPGRPDGPSLLYRWMKHEPGLGSYGDELGRERGSPSERCEERGGDAAVSPGGPPLGLAPPPRYPGSLDGPGAGGDGDDYKSSSEETGSSEDPSPPGGHLEGYPCPHLAYGEPESFGDNLYVCIPCGKGFPSSEQLNAHVEAHVEEEEALYGRAEAAEVAAGAAGLGPPFGGGGDKVAGAPGGLGELLRPYRCASCDKSYKDPATLRQHEKTHWLTRPYPCTICGKKFTQRGTMTRHMRSHLGLKPFACDACGMRFTRQYRLTEHMRIHSGEKPYECQVCGGKFAQQRNLISHMKMHAVGGAAGAAGALAGLGGLPGVPGPDGKGKLDFPEGVFAVARLTAEQLSLKQQDKAAAAELLAQTTHFLHDPKVALESLYPLAKFTAELGLSPDKAAEVLSQGAHLAAGPDGRTIDRFSPT

SEQ ID NO: 15083 - protein, 615 aa, Homo sapiens
MVSGPLALRWCAWAGRGDMGPDMELPSHSKQLLLQLNQQRTKGFLCDVIIMVENSIFRAHKNVLAASSIYFKSLVLHDNLINLDTDMVSSTVFQQILDFIYTGKLLPSDQPAEPNFSTLLTAASYLQLPELAALCRRKLKRAGKPFGSGRAGSTGMGRPPRSQRLSTASVIQARYQGLVDGRKGAHAPQELPQAKGSDDELFLGGSNQDSVQGLGRAVCPAGGEAGLGGCSSSTNGSSGGCEQELGLDLSKKSPPLPPATPGPHLTPDDAAQLSDSQHGSPPAASAPPVANSASYSELGGTPDEPMDLEGAEDNHLSLLEAPGGQPRKSLRHSTRKKEWGKKEPVAGSPFERREAGPKGPCPGEEGEGVGDRVPNGILASGAGPSGPYGEPPYPCKEEEENGKDASEDSAQSGSEGGSGHASAHYMYRQEGYETVSYGDNLYVCIPCAKGFPSSEQLNAHVETHTEEELFIKEEGAYETGSGGAEEEAEDLSAPSAAYTAEPRPFKCSVCEKTYKDPATLRQHEKTHWLTRPFPCNICGKMFTQRGTMTRHMRSHLGLKPFACDECGMRFTRQYRLTEHMRVHSGEKPYECQLCGGKFTQQRNLISHLRMHTSPS

SEQ ID NO: 15084 - protein, 826 aa, Homo sapiens
MEGAGGANDKKKISSERRKEKSRDAARSRRSKESEVFYELAHQLPLPHNVSSHLDKASVMRLTISYLRVRKLLDAGDLDIEDDMKAQMNCFYLKALDGFVMVLTDDGDMIYISDNVNKYMGLTQFELTGHSVFDFTHPCDHEEMREMLTHRNGLVKKGKEQNTQRSFFLRMKCTLTSRGRTMNIKSATWKVLHCTGHIHVYDTNSNQPQCGYKKPPMTCLVLICEPIPHPSNIEIPLDSKTFLSRHSLDMKFSYCDERITELMGYEPEELLGRSIYEYYHALDSDHLTKTHHDMFTKGQVTTGQYRMLAKRGGYVWVETQATVIYNTKNSQPQCIVCVNYVVSGIIQHDLIFSLQQTECVLKPVESSDMKMTQLFTKVESEDTSSLFDKLKKEPDALTLLAPAAGDTIISLDFGSNDTETDDQQLEEVPLYNDVMLPSPNEKLQNINLAMSPLPTAETPKPLRSSADPALNQEVALKLEPNPESLELSFTMPQIQDQTPSPSDGSTRQSSPEPNSPSEYCFYVDSDMVNEFKLELVEKLFAEDTEAKNPFSTQDTDLDLEMLAPYIPMDDDFQLRSFDQLSPLESSSASPESASPQSTVTVFQQTQIQEPTANATTTTATTDELKTVTKDRMEDIKILIASPSPTHIHKETTSATSSPYRDTQSRTASPNRAGKGVIEQTEKSHPRSPNVLSVALSQRTTVPEEELNPKILALQNAQRKRKMEHDGSLFQAVGIGTLLQQPDDHAATTSLSWKRVKGCKSSEQNGMEQKTIILIPSDLACRLLGQSMDESGLPQLTSYDCEVNAPIQGSRNLLQGEELLRALDQVN

SEQ ID NO: 15085 - protein, 669 aa, Homo sapiens
MALGLQRARSTTELRKEKSRDAARSRRSQETEVLYQLAHTLPFARGVSAHLDKASIMRLTISYLRMHRLCAAGEWNQVGAGGEPLDACYLKALEGFVMVLTAEGDMAYLSENVSKHLGLSQLELIGHSIFDFIHPCDQEELQDALTPQQTLSRRKVEAPTERCFSLRMKSTLTSRGRTLNLKAATWKVLNCSGHMRAYKPPAQTSPAGSPDSEPPLQCLVLICEAIPHPGSLEPPLGRGAFLSRHSLDMKFTYCDDRIAEVAGYSPDDLIGCSAYEYIHALDSDAVSKSIHTLLSKGQAVTGQYRFLARSGGYLWTQTQATVVSGGRGPQSESIVCVHFLISQVEETGVVLSLEQTEQHSRRPIQRGAPSQKDTPNPGDSLDTPGPRILAFLHPPSLSEAALAADPRRFCSPDLRRLLGPILDGASVAATPSTPLATRHPQSPLSADLPDELPVGTENVHRLFTSGKDTEAVETDLDIAQDADALDLEMLAPYISMDDDFQLNASEQLPRAYHRPLGAVPRPRARSFHGLSPPALEPSLLPRWGSDPRLSCSSPSRGDPSASSPMAGARKRTLAQSSEDEDEGVELLGVRPPKRSPSPEHENFLLFPLSLSFLLTGGPAPGSLQDPSTPLLNLNEPLGLGPSLLSPYSDEDTTQPGGPFQPRAGSAQAD

SEQ ID NO: 15086 - protein, 517 aa, Homo sapiens
MPPPGKVPRKENLWLQCEWGSCSFVCSTMEKFFEHVTQHLQQHLHGSGEEEEEEEEDDPLEEEFSCLWQECGFCSLDSSADLIRHVYFHCYHTKLKQWGLQALQSQADLGPCILDFQSRNVIPDIPDHFLCLWEHCENSFDNPEWFYRHVEAHSLCCEYEAVGKDNPVVLCGWKGCTCTFKDRSKLREHLRSHTQEKVVACPTCGGMFANNTKFLDHIRRQTSLDQQHFQCSHCSKRFATERLLRDHMRNHVNHYKCPLCDMTCPLPSSLRNHMRFRHSEDRPFKCDCCDYSCKNLIDLQKHLDTHSEEPAYRCDFENCTFSARSLCSIKSHYRKVHEGDSEPRYKCHVCDKCFTRGNNLTVHLRKKHQFKWPSGHPRFRYKEHEDGYMRLQLVRYESVELTQQLLRQPQEGSGLGTSLNESSLQGIILETVPGEPGRKEEEEEGKGSEGTALSASQDNPSSVIHVVNQTNAQGQQEIVYYVLSEAPGEPPPAPEPPSGGIMEKLQGIAEEPEIQMV

SEQ ID NO: 15087 - protein, 2718 aa, Homo sapiens
MPRTKQIHPRNLRDKIEEAQKELNGAEVSKKEILQAGVKGTSESLKGVKRKKIVAENHLKKIPKSPLRNPLQAKHKQNTEESSFAVLHSASESHKKQNYIPVKNGKQFTKQNGETPGIIAEASKSEESVSPKKPLFLQQPSELRRWRSEGADPAKFSDLDEQCDSSSLSSKTRTDNSECISSHCGTTSPSYTNTAFDVLLKAMEPELSTLSQKGSPCAIKTEKLRPNKTARSPPKLKNSSMDAPNQTSQELVAESQSSCTSYTVHMSAAQKNEQGAMQSASHLYHQHEHFVPKSNQHNQQLPGCSGFTGSLTNLQNQENAKLEQVYNIAVTSSVGLTSPSSRSQVTPQNQQMDSASPLSISPANSTQSPPMPIYNSTHVASVVNQSVEQMCNLLLKDQKPKKQGKYICEYCNRACAKPSVLLKHIRSHTGERPYPCVTCGFSFKTKSNLYKHKKSHAHTIKLGLVLQPDAGGLFLSHESPKALSIHSDVEDSGESEEEGATDERQHDLGAMELQPVHIIKRMSNAETLLKSSFTPSSPENVIGDFLLQDRSAESQAVTELPKVVVHHVTVSPLRTDSPKAMDPKPELSSAQKQKDLQVTNVQPLSANMSQGGVSRLETNENSHQKGDMNPLEGKQDSHVGTVHAQLQRQQATDYSQEQQGKLLSPRSLGSTDSGYFSRSESADQTVSPPTPFARRLPSTEQDSGRSNGPSAALVTTSTPSALPTGEKALLLPGQMRPPLATKTLEERISKLISDNEALVDDKQLDSVKPRRTSLSRRGSIDSPKSYIFKDSFQFDLKPVGRRTSSSSDIPKSPFTPTEKSKQVFLLSVPSLDCLPITRSNSMPTTGYSAVPANIIPPPHPLRGSQSFDDKIGTFYDDVFVSGPNAPVPQSGHPRTLVRQAAIEDSSANESHVLGTGQSLDESHQGCHAAGEAMSVRSKALAQGPHIEKKKSHQGRGTMFECETCRNRYRKLENFENHKKFYCSELHGPKTKVAMREPEHSPVPGGLQPQILHYRVAGSSGIWEQTPQIRKRRKMKSVGDDEELQQNESGTSPKSSEGLQFQNALGCNPSLPKHNVTIRSDQQHKNIQLQNSHIHLVARGPEQTMDPKLSTIMEQQISSAAQDKIELQRHGTGISVIQHTNSLSRPNSFDKPEPFERASPVSFQELNRTGKSGSLKVIGISQEESHPSRDGSHPHQLALSDALRGELQESSRKSPSERHVLGQPSRLVRQHNIQVPEILVTEEPDRDLEAQCHDQEKSEKFSWPQRSETLSKLPTEKLPPKKKRLRLAEIEHSSTESSFDSTLSRSLSRESSLSHTSSFSASLDIEDVSKTEASPKIDFLNKAEFLMIPAGLNTLNVPGCHREMRRTASEQINCTQTSMEVSDLRSKSFDCGSITPPQTTPLTELQPPSSPSRVGVTGHVPLLERRRGPLVRQISLNIAPDSHLSPVHPTSFQNTALPSVNAVPYQGPQLTSTSLAEFSANTLHSQTQVKDLQAETSNSSSTNVFPVQQLCDINLLNQIHAPPSHQSTQLSLQVSTQGSKPDKNSVLSGSSKSEDCFAPKYQLHCQVFTSGPSCSSNPVHSLPNQVISDPVGTDHCVTSATLPTKLIDSMSNSHPLLPPELRPLGSQVQKVPSSFMLPIRLQSSVPAYCFATLTSLPQILVTQDLPNQPICQTNHSVVPISEEQNSVPTLQKGHQNALPNPEKEFLCENVFSEMSQNSSLSESLPITQKISVGRLSPQQESSASSKRMLSPANSLDIAMEKHQKRAKDENGAVCATDVRPLEALSSRVNEASKQKKPILVRQVCTTEPLDGVMLEKDVFSQPEISNEAVNLTNVLPADNSSTGCSKFVVIEPISELQEFENIKSSTSLTLTVRSSPAPSENTHISPLKCTDNNQERKSPGVKNQGDKVNIQEQSQQPVTSLSLFNIKDTQQLAFPSLKTTTNFTWCYLLRQKSLHLPQKDQKTSAYTDWTVSASNPNPLGLPTKVALALLNSKQNTGKSLYCQAITTHSKSDLLVYSSKWKSSLSKRALGNQKSTVVEFSNKDASEINSEQDKENSLIKSEPRRIKIFDGGYKSNEEYVYVRGRGRGKYICEECGIRCKKPSMLKKHIRTHTDVRPYHCTYCNFSFKTKGNLTKHMKSKAHSKKCVDLGVSVGLIDEQDTEESDEKQRFSYERSGYDLEESDGPDEDDNENEDDDEDSQAESVLSATPSVTASPQHLPSRSSLQDPVSTDEDVRITDCFSGVHTDPMDVLPRALLTRMTVLSTAQSDYNRKTLSPGKARQRAARDENDTIPSVDTSRSPCHQMSVDYPESEEILRSSMAGKAVAITQSPSSVRLPPAAAEHSPQTAAGMPSVASPHPDPQEQKQQITLQPTPGLPSPHTHLFSHLPLHSQQQSRTPYNMVPVGGIHVVPAGLTYSTFVPLQAGPVQLTIPAVSVVHRTLGTHRNTVTEVSGTTNPAGVAELSSVVPCIPIGQIRVPGLQNLSTPGLQSLPSLSMETVNIVGLANTNMAPQVHPPGLALNAVGLQVLTANPSSQSSPAPQAHIPGLQILNIALPTLIPSVSQVAVDAQGAPEMPASQSKACETQPKQTSVASANQVSRTESPQGLPTVQRENAKKVLNPPAPAGDHARLDGLSKMDTEKAASANHVKPKPELTSIQGQPASTSQPLLKAHSEVFTKPSGQQTLSPDRQVPRPTALPRRQPTVHFSDVSSDDDEDRLVIAT

SEQ ID NO: 15088 - protein, 2446 aa, Homo sapiens
MDTGDTALGQKATSRSGETDKASGRWRQEQSAVIKMSTFGSHEGQRQPQIEPEQIGNTASAQLFGSGKLASPSEVVQQVAEKQYPPHRPSPYSCQHSLSFPQHSLPQGVMHSTKPHQSLEGPPWLFPGPLPSVASEDLFPFPIHGHSGGYPRKKISSLNPAYSQYSQKSIEQAEEAHKKEHKPKKPGKYICPYCSRACAKPSVLKKHIRSHTGERPYPCIPCGFSFKTKSNLYKHRKSHAHAIKAGLVPFTESAVSKLDLEAGFIDVEAEIHSDGEQSTDTDEESSLFAEASDKMSPGPPIPLDIASRGGYHGSLEESLGGPMKVPILIIPKSGIPLPNESSQYIGPDMLPNPSLNTKADDSHTVKQKLALRLSEKKGQDSEPSLNLLSPHSKGSTDSGYFSRSESAEQQISPPNTNAKSYEEIIFGKYCRLSPRNALSVTTTSQERAAMGRKGIMEPLPHVNTRLDVKMFEDPVSQLIPSKGDVDPSQTSMLKSTKFNSESRQPQIIPSSIRNEGKLYPANFQGSNPVLLEAPVDSSPLIRSNSVPTSSATNLTIPPSLRGSHSFDERMTGSDDVFYPGTVGIPPQRMLRRQAAFELPSVQEGHVEVEHHGRMLKGISSSSLKEKKLSPGDRVGYDYDVCRKPYKKWEDSETPKQNYRDISCLSSLKHGGEYFMDPVVPLQGVPSMFGTTCENRKRRKEKSVGDEEDTPMICSSIVSTPVGIMASDYDPKLQMQEGVRSGFAMAGHENLSHGHTERFDPCRPQLQPGSPSLVSEESPSAIDSDKMSDLGGRKPPGNVISVIQHTNSLSRPNSFERSESAELVACTQDKAPSPSETCDSEISEAPVSPEWAPPGDGAESGGKPSPSQQVQQQSYHTQPRLVRQHNIQVPEIRVTEEPDKPEKEKEAQSKEPEKPVEEFQWPQRSETLSQLPAEKLPPKKKRLRLADMEHSSGESSFESTGTGLSRSPSQESNLSHSSSFSMSFEREETSKLSALPKQDEFGKHSEFLTVPAGSYSLSVPGHHHQKEMRRCSSEQMPCPHPAEVPEVRSKSFDYGNLSHAPVSGAAASTVSPSRERKKCFLVRQASFSGSPEISQGEVGMDQSVKQEQLEHLHAGLRSGWHHGPPAVLPPLQQEDPGKQVAGPCPPLSSGPLHLAQPQIMHMDSQESLRNPLIQPTSYMTSKHLPEQPHLFPHQETIPFSPIQNALFQFQYPTVCMVHLPAQQPPWWQAHFPHPFAQHPQKSYGKPSFQTEIHSSYPLEHVAEHTGKKPAEYAHTKEQTYPCYSGASGLHPKNLLPKFPSDQSSKSTETPSEQVLQEDFASANAGSLQSLPGTVVPVRIQTHVPSYGSVMYTSISQILGQNSPAIVICKVDENMTQRTLVTNAAMQGIGFNIAQVLGQHAGLEKYPIWKAPQTLPLGLESSIPLCLPSTSDSVATLGGSKRMLSPASSLELFMETKQQKRVKEEKMYGQIVEELSAVELTNSDIKKDLSRPQKPQLVRQGCASEPKDGLQSGSSSFSSLSPSSSQDYPSVSPSSREPFLPSKEMLSGSRAPLPGQKSSGPSESKESSDELDIDETASDMSMSPQSSSLPAGDGQLEEEGKGHKRPVGMLVRMASAPSGNVADSTLLLTDMADFQQILQFPSLRTTTTVSWCFLNYTKPNYVQQATFKSSVYASWCISSCNPNPSGLNTKTTLALLRSKQKITAEIYTLAAMHRPGTGKLTSSSAWKQFTQMKPDASFLFGSKLERKLVGNILKERGKGDIHGDKDIGSKQTEPIRIKIFEGGYKSNEDYVYVRGRGRGKYICEECGIRCKKPSMLKKHIRTHTDVRPYVCKLCNFAFKTKGNLTKHMKSKAHMKKCLELGVSMTSVDDTETEEAENLEDLHKAAEKHSMSSISTDHQFSDAEESDGEDGDDNDDDDEDEDDFDDQGDLTPKTRSRSTSPQPPRFSSLPVNVGAVPHGVPSDSSLGHSSLISYLVTLPSIRVTQLMTPSDSCEDTQMTEYQRLFQSKSTDSEPDKDRLDIPSCMDEECMLPSEPSSSPRDFSPSSHHSSPGYDSSPCRDNSPKRYLIPKGDLSPRRHLSPRRDLSPMRHLSPRKEAALRREMSQRDVSPRRHLSPRRPVSPGKDITARRDLSPRRERRYMTTIRAPSPRRALYHNPPLSMGQYLQAEPIVLGPPNLRRGLPQVPYFSLYGDQEGAYEHPGSSLFPEGPNDYVFSHLPLHSQQQVRAPIPMVPVGGIQMVHSMPPALSSLHPSPTLPLPMEGFEEKKGASGESFSKDPYVLSKQHEKRGPHALQSSGPPSTPSSPRLLMKQSTSEDSLNATEREQEENIQTCTKAIASLRIATEEAALLGPDQPARVQEPHQNPLGSAHVSIRHFSRPEPGQPCTSATHPDLHDGEKDNFGTSQTPLAHSTFYSKSCVDDKQLDFHSSKELSSSTEESKDPSSEKSQLH

SEQ ID NO: 15089 - protein, 2406 aa, Homo sapiens
MDPEQSVKGTKKAEGSPRKRLTKGEAIQTSVSSSVPYPGSGTAATQESPAQELLAPQPFPGPSSVLREGSQEKTGQQQKPPKRPPIEASVHISQLPQHPLTPAFMSPGKPEHLLEGSTWQLVDPMRPGPSGSFVAPGLHPQSQLLPSHASIIPPEDLPGVPKVFVPRPSQVSLKPTEEAHKKERKPQKPGKYICQYCSRPCAKPSVLQKHIRSHTGERPYPCGPCGFSFKTKSNLYKHRKSHAHRIKAGLASGMGGEMYPHGLEMERIPGEEFEEPTEGESTDSEEETSATSGHPAELSPRPKQPLLSSGLYSSGSHSSSHERCSLSQSSTAQSLEDPPPFVEPSSEHPLSHKPEDTHTIKQKLALRLSERKKVIDEQAFLSPGSKGSTESGYFSRSESAEQQVSPPNTNAKSYAEIIFGKCGRIGQRTAMLTATSTQPLLPLSTEDKPSLVPLSVPRTQVIEHITKLITINEAVVDTSEIDSVKPRRSSLSRRSSMESPKSSLYREPLSSHSEKTKPEQSLLSLQHPPSTAPPVPLLRSHSMPSAACTISTPHHPFRGSYSFDDHITDSEALSHSSHVFTSHPRMLKRQPAIELPLGGEYSSEEPGPSSKDTASKPSDEVEPKESELTKKTKKGLKTKGVIYECNICGARYKKRDNYEAHKKYYCSELQIAKPISAGTHTSPEAEKSQIEHEPWSQMMHYKLGTTLELTPLRKRRKEKSLGDEEEPPAFESTKSQFGSPGPSDAARNLPLESTKSPAEPSKSVPSLEGPTGFQPRTPKPGSGSESGKERRTTSKEISVIQHTSSFEKSDSLEQPSGLEGEDKPLAQFPSPPPAPHGRSAHSLQPKLVRQPNIQVPEILVTEEPDRPDTEPEPPPKEPEKTEEFQWPQRSQTLAQLPAEKLPPKKKRLRLAEMAQSSGESSFESSVPLSRSPSQESNVSLSGSSRSASFERDDHGKAEAPSPSSDMRPKPLGTHMLTVPSHHPHAREMRRSASEQSPNVSHSAHMTETRSKSFDYGSLSLTGPSAPAPVAPPARVAPPERRKCFLVRQASLSRPPESELEVAPKGRQESEEPQPSSSKPSAKSSLSQISSAATSHGGPPGGKGPGQDRPPLGPTVPYTEALQVFHHPVAQTPLHEKPYLPPPVSLFSFQHLVQHEPGQSPEFFSTQAMSSLLSSPYSMPPLPPSLFQAPPLPLQPTVLHPGQLHLPQLMPHPANIPFRQPPSFLPMPYPTSSALSSGFFLPLQSQFALQLPGDVESHLPQIKTSLAPLATGSAGLSPSTEYSSDIRLPPVAPPASSSAPTSAPPLALPACPDTMVSLVVPVRVQTNMPSYGSAMYTTLSQILVTQSQGSSATVALPKFEEPPSKGTTVCGADVHEVGPGPSGLSEEQSRAFPTPYLRVPVTLPERKGTSLSSESILSLEGSSSTAGGSKRVLSPAGSLELTMETQQQKRVKEEEASKADEKLELVKPCSVVLTSTEDGKRPEKSHLGNQGQGRRELEMLSSLSSDPSDTKEIPPLPHPALSHGTAPGSEALKEYPQPSGKPHRRGLTPLSVKKEDSKEQPDLPSLAPPSSLPLSETSSRPAKSQEGTDSKKVLQFPSLHTTTNVSWCYLNYIKPNHIQHADRRSSVYAGWCISLYNPNLPGVSTKAALSLLRSKQKVSKETYTMATAPHPEAGRLVPSSSRKPRMTEVHLPSLVSPEGQKDLARVEKEEERRGEPEEDAPASQRGEPARIKIFEGGYKSNEEYVYVRGRGRGKYVCEECGIRCKKPSMLKKHIRTHTDVRPYVCKHCHFAFKTKGNLTKHMKSKAHSKKCQETGVLEELEAEEGTSDDLFQDSEGREGSEAVEEHQFSDLEDSDSDSDLDEDEDEDEEESQDELSRPSSEAPPPGPPHALRADSSPILGPQPPDAPASGTEATRGSSVSEAERLTASSCSMSSQSMPGLPWLGPAPLGSVEKDTGSALSYKPVSPRRPWSPSKEAGSRPPLARKHSLTKNDSSPQRCSPAREPQASAPSPPGLHVDPGRGMGALPCGSPRLQLSPLTLCPLGRELAPRAHVLSKLEGTTDPGLPRYSPTRRWSPGQAESPPRSAPPGKWALAGPGSPSAGEHGPGLGLDPRVLFPPAPLPHKLLSRSPETCASPWQKAESRSPSCSPGPAHPLSSRPFSALHDFHGHILARTEENIFSHLPLHSQHLTRAPCPLIPIGGIQMVQARPGAHPTLLPGPTAAWVSGFSGGGSDLTGAREAQERGRWSPTESSSASVSPVAKVSKFTLSSELEGGDYPKERERTGGGPGRPPDWTPHGTGAPAEPTPTHSPCTPPDTLPRPPQGRRAAQSWSPRLESPRAPTNPEPSATPPLDRSSSVGCLAEASARFPARTRNLSGEPRTRQDSPKPSGSGEPRAHPHQPEDRVPPNA

SEQ ID NO: 15090 - protein, 659 aa, Homo sapiens
MRVNHTVSTMLPTCMVHRQTMSCSGAGGITAFVAFRDVAVYFTQEEWRLLSPAQRTLHREVMLETYNHLVSLEIPSSKPKLIAQLERGEAPWREERKCPLDLCPESKPEIQLSPSCPLIFSSQQALSQHVWLSHLSQLFSSLWAGNPLHLGKHYPEDQKQQQDPFCFSGKAEWIQEGEDSRLLFGRVSKNGTSKALSSPPEEQQPAQSKEDNTVVDIGSSPERRADLEETDKVLHGLEVSGFGEIKYEEFGPGFIKESNLLSLQKTQTGETPYMYTEWGDSFGSMSVLIKNPRTHSGGKPYVCRECGRGFTWKSNLITHQRTHSGEKPYVCKDCGRGFTWKSNLFTHQRTHSGLKPYVCKECGQSFSLKSNLITHQRAHTGEKPYVCRECGRGFRQHSHLVRHKRTHSGEKPYICRECEQGFSQKSHLIRHLRTHTGEKPYVCTECGRHFSWKSNLKTHQRTHSGVKPYVCLECGQCFSLKSNLNKHQRSHTGEKPFVCTECGRGFTRKSTLSTHQRTHSGEKPFVCAECGRGFNDKSTLISHQRTHSGEKPFMCRECGRRFRQKPNLFRHKRAHSGAFVCRECGQGFCAKLTLIKHQRAHAGGKPHVCRECGQGFSRQSHLIRHQRTHSGEKPYICRKCGRGFSRKSNLIRHQRTHSG

SEQ ID NO: 15091 - protein, 295 aa, Homo sapiens
MEKMSRPLPLNPTFIPPPYGVLRSLLENPLKLPLHHEDAFSKDKDKEKKLDDESNSPTVPQSAFLGPTLWDKTLPYDGDTFQLEYMDLEEFLSENGIPPSPSQHDHSPHPPGLQPASSAAPSVMDLSSRASAPLHPGIPSPNCMQSPIRPGQLLPANRNTPSPIDPDTIQVPVGYEPDPADLALSSIPGQEMFDPRKRKFSEEELKPQPMIKKARKVFIPDDLKDDKYWARRRKNNMAAKRSRDARRLKENQIAIRASFLEKENSALRQEVADLRKELGKCKNILAKYEARHGPL

SEQ ID NO: 15092 - protein, 1009 aa, Homo sapiens
MSWMFKRDPVWKYLQTVQYGVHGNFPRLSYPTFFPRFEFQDVIPPDDFLTSDEEVDSVLFGSLRGHVVGLRYYTGVVNNNEMVALQRDPNNPYDKNAIKVNNVNGNQVGHLKKELAGALAYIMDNKLAQIEGVVPFGANNAFTMPLHMTFWGKEENRKAVSDQLKKHGFKLGPAPKTLGFNLESGWGSGRAGPSYSMPVHAAVQMTTEQLKTEFDKLFEDLKEDDKTHEMEPAEAIETPLLPHQKQALAWMVSRENSKELPPFWEQRNDLYYNTITNFSEKDRPENVHGGILADDMGLGKTLTAIAVILTNFHDGRPLPIERVKKNLLKKEYNVNDDSMKLGGNNTSEKADGLSKDASRCSEQPSISDIKEKSKFRMSELSSSRPKRRKTAVQYIESSDSEEIETSELPQKMKGKLKNVQSETKGRAKAGSSKVIEDVAFACALTSSVPTTKKKMLKKGACAVEGSKKTDVEERPRTTLIICPLSVLSNWIDQFGQHIKSDVHLNFYVYYGPDRIREPALLSKQDIVLTTYNILTHDYGTKGDSPLHSIRWLRVILDEGHAIRNPNAQQTKAVLDLESERRWVLTGTPIQNSLKDLWSLLSFLKLKPFIDREWWHRTIQRPVTMGDEGGLRRLQSLIKNITLRRTKTSKIKGKPVLELPERKVFIQHITLSDEERKIYQSVKNEGRATIGRYFNEGTVLAHYADVLGLLLRLRQICCHTYLLTNAVSSNGPSGNDTPEELRKKLIRKMKLILSSGSDEECAICLDSLTVPVITHCAHVFCKPCICQVIQNEQPHAKCPLCRNDIHEDNLLECPPEELARDSEKKSDMEWTSSSKINALMHALTDLRKKNPNIKSLVVSQFTTFLSLIEIPLKASGFVFTRLDGSMAQKKRVESIQCFQNTEAGSPTIMLLSLKAGGVGLNLSAASRVFLMDPAWNPAAEDQCFDRCHRLGQKQEVIITKFIVKDSVEENMLKIQNKKRELAAGAFGTKKPNADEMKQAKINEIRTLIDL

SEQ ID NO: 15093 - protein, 488 aa, Homo sapiens
MFAAGLAPFYASNFSLWSAAYCSSAGPGGCSFPLDPAAVKKPSFCIADILHAGVGDLGAAPEGLAGASAAALTAHLGSVHPHASFQAAARSPLRPTPVVAPSEVPAGFPQRLSPLSAAYHHHHPQQQQQQQQPQQQQPPPPPRAGALQPPASGTRVVPNPHHSGSAPAPSSKDLKFGIDRILSAEFDPKVKEGNTLRDLTSLLTGGRPAGVHLSGLQPSAGQFFASLDPINEASAILSPLNSNPRNSVQHQFQDTFPGPYAVLTKDTMPQTYKRKRSWSRAVFSNLQRKGLEKRFEIQKYVTKPDRKQLAAMLGLTDAQVKVWFQNRRMKWRHSKEAQAQKDKDKEAGEKPSGGAPAADGEQDERSPSRSEGEAESESSDSESLDMAPSDTERTEGSERSLHQTTVIKAPVTGALITASSAGSGGSSGGGGNSFSFSSASSLSSSSTSAGCASSLGGGGASELLPATQPTASSAPKSPEPAQGALGCL

SEQ ID NO: 15094 - protein, 420 aa, Homo sapiens
MLSSFPVVLLETMSHYTDEPRFTIEQIDLLQRLRRTGMTKHEILHALETLDRLDQEHSDKFGRRSSYGGSSYGNSTNNVPASSSTATASTQTQHSGMSPSPSNSYDTSPQPCTTNQNGRENNERLSTSNGKMSPTRYHANSMGQRSYSFEASEEDLDVDDKVEELMRRDSSVIKEEIKAFLANRRISQAVVAQVTGISQSRISHWLLQQGSDLSEQKKRAFYRWYQLEKTNPGATLSMRPAPIPIEDPEWRQTPPPVSATSGTFRLRRGSRFTWRKECLAVMESYFNENQYPDEAKREEIANACNAVIQKPGKKLSDLERVTSLKVYNWFANRRKEIKRRANIEAAILESHGIDVQSPGGHSNSDDVDGNDYSEQDDSTSHSDHQDPISLAVEMAAVNHTILALARQGANEIKTEALDDD

SEQ ID NO: 15095 - protein, 347 aa, Homo sapiens
MENLMTSSTLPPLFADEDGSKESNDLATTGLNHPEVPYSSGATSSTNNPEFVEDLSQGQLLQSESSNAAEGNEQRHEDEQRSKRGGWSKGRKRKKPLRDSNAPKSPLTGYVRFMNERREQLRAKRPEVPFPEITRMLGNEWSKLPPEEKQRYLDEADRDKERYMKELEQYQKTEAYKVFSRKTQDRQKGKSHRQDAARQATHDHEKETEVKERSVFDIPIFTEEFLNHSKAREAELRQLRKSNMEFEERNAALQKHVESMRTAVEKLEVDVIQERSRNTVLQQHLETLRQVLTSSFASMPLPGSGETPTVDTIDSYMNRLHSIILANPQDNENFIATVREVVNRLDR

SEQ ID NO: 15096 - protein, 317 aa, Homo sapiens
MSHGPKQPGAAAAPAGGKAPGQHGGFVVTVKQERGEGPRAGEKGSHEEEPVKKRGWPKGKKRKKILPNGPKAPVTGYVRFLNERREQIRTRHPDLPFPEITKMLGAEWSKLQPTEKQRYLDEAEREKQQYMKELRAYQQSEAYKMCTEKIQEKKIKKEDSSSGLMNTLLNGHKGGDCDGFSTFDVPIFTEEFLDQNKAREAELRRLRKMNVAFEEQNAVLQRHTQSMSSARERLEQELALEERRTLALQQQLQAVRQALTASFASLPVPGTGETPTLGTLDFYMARLHGAIERDPAQHEKLIVRIKEILAQVASEHL

SEQ ID NO: 15097 - protein, 107 aa, Homo sapiens
MSESSSKSSQPLASKQEKDGTEKRGRGRPRKQPPVSPGTALVGSQKEPSEVPTPKRPRGRPKGSKNKGAAKTRKTTTTPGRKPRGRPKKLEKEEEEGISQESSEEEQ

SEQ ID NO: 15098 - protein, 109 aa, Homo sapiens
MSARGEGAGQPSTSAQGQPAAPAPQKRGRGRPRKQQQEPTGEPSPKRPRGRPKGSKNKSPSKAAQKKAEATGEKRPRGRPRKWPQQVVQKKPAQEETEETSSQESAEED

SEQ ID NO: 15099 - protein, 1538 aa, Homo sapiens
MQRTQPRPCYLNAPQQCPGAERPGRPTAGSHSFLLRPGPLAGSSPFALLDPLQAFEQFVWVRSQARAGLLRLRQGSHAVTRCRPLPVRREGRRDGSPWRSVVCRYCRCSRQTGASVTTVSLPSSSSSPGLDPRGPRQASVRSLRSEPVLLFLPFRTPYRDSEEGKREGLSRLRAVCRRAGPRGRGSFSPRDARASPRLHFLVAAVTTGAASRRQRGARVRQPSPSSSRRAKRLRECERRSLHAPPAMDASYDGTEVTVVMEEIEEAYCYTSPGPPKKKKKYKIHGEKTKKPRSAYLLYYYDIYLKVQQELPHLPQSEINKKISESWRLLSVAERSYYLEKAKLEKEGLDPNSKLSALTAVVPDIPGFRKILPRSDYIIIPKSSLQEDRSCPQLELCVAQNQMSPKGPPLVSNTAPETVPSHAGMAEQCLAVEALAEEVGALTQSGAVQEIATSEILSQDVLLEDASLEVGESHQPYQTSLVIEETLVNGSPDLPTGSLAVPHPQVGESVSVVTVMRDSSESSSSAPATQFIMLPLPAYSVVENPTSIKLTTTYTRRGHGTCTSPGCSFTYVTRHKPPKCPTCGNFLGGKWIPKEKPAKVKVELASGVSSKGSVVKRNQQPVTTEQNSSKENASKLTLENSEAVSQLLNVAPPREVGEESEWEEVIISDAHVLVKEAPGNCGTAVTKTPVVKSGVQPEVTLGTTDNDSPGADVPTPSEGTSTSSPLPAPKKPTGADLLTPGSRAPELKGRARGKPSLLAAARPMRAILPAPVNVGRGSSMGLPRARQAFSLSDKTPSVRTCGLKPSTLKQLGQPIQQPSGPGEVKLPSGPSNRTSQVKVVEVKPDMFPPYKYSCTVTLDLGLATSRGRGKCKNPSCSYVYTNRHKPRICPSCGVNLAKDRTEKTTKAIEVSSPLPDVLNATEPLSTAQREIQRQSTLQLLRKVLQIPENESELAEVFALIHELNSSRLILSNVSEETVTIEQTSWSNYYESPSTQCLLCSSPLFKGGQNSLAGPQECWLLTASRLQTVTAQVKMCLNPHCLALHSFIDIYTGLFNVGNKLLVSLDLLFAIRNQIKLGEDPRVSINVVLKSVQEQTEKTLTSEELSQLQELLCNGYWAFECLTVRDYNDMICGICGVAPKVEMAQRSEENVLALKSVEFTWPEFLGSNEVNVEDFWATMETEVIEQVAFPASIPITKFDASVIAPFFPPLMRGAVVVNTEKDKNLDVQPVPGSGSALVRLLQEGTCKLDEIGSYSEEKLQHLLRQCGIPFGAEDSKDQLCFSLLALYESVQNGARAIRPPRHFTGGKIYKVCPHQVVCGSKYLVRGESARDHVDLLASSRHWPPVYVVDMATSVALCADLCYPELTNQMWGRNQGCFSSPTEPPVSVSCPELLDQHYTVDMTETEHSIQHPVTKTATRRIVHAGLQPNPGDPSAGHHSLALCPELAPYATILASIVDSKPNGVRQRPIAFDNATHYYLYNRLMDFLTSREIVNRQIHDIVQSCQPGEVVIRDTLYRLGVAQIKTETEEEGEEEEVAAVAE

SEQ ID NO: 15100 - protein, 601 aa, Homo sapiens
MAYDDSVKKEDCFDGDHTFEDIGLAAGRSQREKKRSYKDFLREEEEIAAQVRNSSKKKLKDSELYFLGTDTHKKKRKHSSDDYYYGDISSLESSQKKKKKSSPQSTDTAMDLLKAITSPLAAGSKPSKKTGEKSSGSSSHSESKKEHHRKKVSGSSGELPLEDGGSHKSKKMKPLYVNTETLTLREPDGLKMKLILSPKEKGSSSVDEESFQYPSQQATVKKSSKKSARDEQGALLLGHELQSFLKTARKKHKSSSDAHSSPGPEGCGSDASQFAESHSANLDLSGLEPILVESDSSSGGELEAGELVIDDSYREIKKKKKSKKSKKKKDKEKHKEKRHSKSKRSLGLSAVPVGEVTVTSGPPPSIPYAGAAAPPLPLPGLHTDGHSEKKKKKEEKDKERERGEKPKKKNMSAYQVFCKEYRVTIVADHPGIDFGELSKKLAEVWKQLPEKDKLIWKQKAQYLQHKQNKAEATTVKRKASSSEGSMKVKASSVGVLSPQKKSPPTTMLLPASPAKAPETEPIDVAAHLQLLGESLSLIGHRLQETEGMVAVSGSLSVLLDSIICALGPLACLTTQLPELNGCPKQVLSNTLDNIAYIMPGL

SEQ ID NO: 15101 - protein, 348 aa, Homo sapiens
MPDELTEPGRATPARASSFLIENLLAAEAKGAGRATQGDGSREDEEEDDDDPEDEDAEQARRRRLQRRRQLLAGTGPGGEARARALLGPGALGLGPRPPPGPGPPFALGCGGAARWYPRAHGGYGGGLSPDTSDRDSPETGEEMGRAEGAWPRGPGPGAVQREAAELAARGPAAGTEEASELAEVPAAAGETRGGVGVGGGRKKKTRTVFSRSQVFQLESTFDLKRYLSSAERAGLAASLQLTETQVKIWFQNRRNKWKRQLAAELEAASLSPPGAQRLVRVPVLYHESPPAAAAAGPPATLPFPLAPAAPAPPPPLLGFSGALAYPLAAFPAAASVPFLRAQMPGLV

SEQ ID NO: 15102 - protein, 273 aa, Homo sapiens
MGSKEDAGKGCPAAGGVSSFTIQSILGGGPSEAPREPVGWPARKRSLSVSSEEEEPDDGWKAPACFCPDQHGPKEQGPKHHPPIPFPCLGTPKGSGGSGPGGLERTPFLSPSHSDFKEEKERLLPAGSPSPGSERPRDGGAERQAGAAKKKTRTVFSRSQVYQLESTFDMKRYLSSSERACLASSLQLTETQVKTWFQNRRNKWKRQLSAELEAANMAHASAQTLVSMPLVFRDSSLLRVPVPRSLAFPAPLYYPGSNLSALPLYNLYNKLDY

SEQ ID NO: 15103 - protein, 357 aa, Homo sapiens
MPEPGPDAAGTASAQPQPPPPPPPAPKESPFSIKNLLNGDHHRPPPKPQPPPRTLFAPASAAAAAAAAAAAAAKGALEGAAGFALSQVGDLAFPRFEIPAQRFALPAHYLERSPAWWYPYTLTPAGGHLPRPEASEKALLRDSSPASGTDRDSPEPLLKADPDHKELDSKSPDEIILEESDSEESKKEGEAAPGAAGASVGAAAATPGAEDWKKGAESPEKKPACRKKKTRTVFSRSQVFQLESTFDMKRYLSSSERAGLAASLHLTETQVKIWFQNRRNKWKRQLAAELEAANLSHAAAQRIVRVPILYHENSAAEGAAAAAAGAPVPVSQPLLTFPHPVYYSHPVVSSVPLLRPV

SEQ ID NO: 15104 - protein, 1130 aa, Homo sapiens
MAAAVLSGPSAGSAAGVPGGTGGLSAVSSGPRLRLLLLESVSGLLQPRTGSAVAPVHPPNRSAPHLPGLMCLLRLHGSVGGAQNLSALGALVSLSNARLSSIKTRFEGLCLLSLLVGESPTELFQQHCVSWLRSIQQVLQTQDPPATMELAVAVLRDLLRYAAQLPALFRDISMNHLPGLLTSLLGLRPECEQSALEGMKACMTYFPRACGSLKGKLASFFLSRVDALSPQLQQLACECYSRLPSLGAGFSQGLKHTESWEQELHSLLASLHTLLGALYEGAETAPVQNEGPGVEMLLSSEDGDAHVLLQLRQRFSGLARCLGLMLSSEFGAPVSVPVQEILDFICRTLSVSSKNISLHGDGPLRLLLLPSIHLEALDLLSALILACGSRLLRFGILIGRLLPQVLNSWSIGRDSLSPGQERPYSTVRTKVYAILELWVQVCGASAGMLQGGASGEALLTHLLSDISPPADALKLRSPRGSPDGSLQTGKPSAPKKLKLDVGEAMAPPSHRKGDSNANSDVCAAALRGLSRTILMCGPLIKEETHRRLHDLVLPLVMGVQQGEVLGSSPYTSSRCRRELYCLLLALLLAPSPRCPPPLACALQAFSLGQREDSLEVSSFCSEALVTCAALTHPRVPPLQPMGPTCPTPAPVPPPEAPSPFRAPPFHPPGPMPSVGSMPSAGPMPSAGPMPSAGPVPSARPGPPTTANHLGLSVPGLVSVPPRLLPGPENHRAGSNEDPILAPSGTPPPTIPPDETFGGRVPRPAFVHYDKEEASDVEISLESDSDDSVVIVPEGLPPLPPPPPSGATPPPIAPTGPPTASPPVPAKEEPEELPAAPGPLPPPPPPPPPVPGPVTLPPPQLVPEGTPGGGGPPALEEDLTVININSSDEEEEEEEEEEEEEEEEEEEEEDFEEEEEDEEEYFEEEEEEEEEFEEEFEEEEGELEEEEEEEDEEEEEELEEVEDLEFGTAGGEVEEGAPPPPTLPPALPPPESPPKVQPEPEPEPGLLLEVEEPGTEEERGADTAPTLAPEALPSQGEVEREGESPAAGPPPQELVEEEPSAPPTLLEEETEDGSDKVQPPPETPAEEEMETETEAEALQEKEQDDTAAMLADFIDCPPDDEKPPPPTEPDS

SEQ ID NO: 15105 - protein, 631 aa, Homo sapiens
MVSKLSQLQTELLAALLESGLSKEALIQALGEPGPYLLAGEGPLDKGESCGGGRGELAELPNGLGETRGSEDETDDDGEDFTPPILKELENLSPEEAAHQKAVVETLLQEDPWRVAKMVKSYLQQHNIPQREVVDTTGLNQSHLSQHLNKGTPMKTQKRAALYTWYVRKQREVAQQFTHAGQGGLIEEPTGDELPTKKGRRNRFKWGPASQQILFQAYERQKNPSKEERETLVEECNRAECIQRGVSPSQAQGLGSNLVTEVRVYNWFANRRKEEAFRHKLAMDTYSGPPPGPGPGPALPAHSSPGLPPPALSPSKVHGVRYGQPATSETAEVPSSSGGPLVTVSTPLHQVSPTGLEPSHSLLSTEAKLVSAAGGPLPPVSTLTALHSLEQTSPGLNQQPQNLIMASLPGVMTIGPGEPASLGPTFTNTGASTLVIGLASTQAQSVPVINSMGSSLTTLQPVQFSQPLHPSYQQPLMPPVQSHVTQSPFMATMAQLQSPHALYSHKPEVAQYTHTGLLPQTMLITDTTNLSALASLTPTKQVFTSDTEASSESGLHTPASQATTLHVPSQDPAGIQHLQPAHRLSASPTVSSSSLVLYQSSDSSNGQSHLLPSNHSVIETFISTQMASSSQ

SEQ ID NO: 15106 - protein, 557 aa, Homo sapiens
MVSKLTSLQQELLSALLSSGVTKEVLVQALEELLPSPNFGVKLETLPLSPGSGAEPDTKPVFHTLTNGHAKGRLSGDEGSEDGDDYDTPPILKELQALNTEEAAEQRAEVDRMLSEDPWRAAKMIKGYMQQHNIPQREVVDVTGLNQSHLSQHLNKGTPMKTQKRAALYTWYVRKQREILRQFNQTVQSSGNMTDKSSQDQLLFLFPEFSQQSHGPGQSDDACSEPTNKKMRRNRFKWGPASQQILYQAYDRQKNPSKEEREALVEECNRAECLQRGVSPSKAHGLGSNLVTEVRVYNWFANRRKEEAFRQKLAMDAYSSNQTHSLNPLLSHGSPHHQPSSSPPNKLSGVRYSQQGNNEITSSSTISHHGNSAMVTSQSVLQQVSPASLDPGHNLLSPDGKMISVSGGGLPPVSTLTNIHSLSHHNPQQSQNLIMTPLSGVMAIAQSLNTSQAQSVPVINSVAGSLAALQPVQFSQQLHSPHQQPLMQQSPGSHMAQQPFMAAVTQLQNSHMYAHKQEPPQYSHTSRFPSAMVVTDTSSISTLTNMSSSKQCPLQAW

SEQ ID NO: 15107 - protein, 474 aa, Homo sapiens
MRLSKTLVDMDMADYSAALDPAYTTLEFENVQVLTMGNDTSPSEGTNLNAPNSLGVSALCAICGDRATGKHYGASSCDGCKGFFRRSVRKNHMYSCRFSRQCVVDKDKRNQCRYCRLKKCFRAGMKKEAVQNERDRISTRRSSYEDSSLPSINALLQAEVLSRQITSPVSGINGDIRAKKIASIADVCESMKEQLLVLVEWAKYIPAFCELPLDDQVALLRAHAGEHLLLGATKRSMVFKDVLLLGNDYIVPRHCPELAEMSRVSIRILDELVLPFQELQIDDNEYAYLKAIIFFDPDAKGLSDPGKIKRLRSQVQVSLEDYINDRQYDSRGRFGELLLLLPTLQSITWQMIEQIQFIKLFGMAKIDNLLQEMLLGGSPSDAPHAHHPLHPHLMQEHMGTNVIVANTMPTHLSNGQMCEWPRPRGQAATPETPQPSPPGGSGSEPYKLLPGAVATIVKPLSAIPQPTITKQEVI

SEQ ID NO: 15108 - protein, 408 aa, Homo sapiens
MNTTDNGVNCLCAICGDRATGKHYGASSCDGCKGFFRRSIRKSHVYSCRFSRQCVVDKDKRNQCRYCRLRKCFRAGMKKEAVQNERDRISTRRSTFDGSNIPSINTLAQAEVRSRQISVSSPGSSTDINVKKIASIGDVCESMKQQLLVLVEWAKYIPAFCELPLDDQVALLRAHAGEHLLLGATKRSMMYKDILLLGNNYVIHRNSCEVEISRVANRVLDELVRPFQEIQIDDNEYACLKAIVFFDPDAKGLSDPVKIKNMRFQVQIGLEDYINDRQYDSRGRFGELLLLLPTLQSITWQMIEQIQFVKLFGMVKIDNLLQEMLLGGASNDGSHLHHPMHPHLSQDPLTGQTILLGPMSTLVHADQISTPETPLPSPPQGSGQEQYKIAANQASVISHQHLSKQKQL

SEQ ID NO: 15109 - protein, 463 aa, Homo sapiens
METEQPEETFPNTETNGEFGKRPAEDMEEEQAFKRSRNTDEMVELRILLQSKNAGAVIGKGGKNIKALRTDYNASVSVPDSSGPERILSISADIETIGEILKKIIPTLEEGLQLPSPTATSQLPLESDAVECLNYQHYKGSDFDCELRLLIHQSLAGGIIGVKGAKIKELRENTQTTIKLFQECCPHSTDRVVLIGGKPDRVVECIKIILDLISESPIKGRAQPYDPNFYDETYDYGGFTMMFDDRRGRPVGFPMRGRGGFDRMPPGRGGRPMPPSRRDYDDMSPRRGPPPPPPGRGGRGGSRARNLPLPPPPPPRGGDLMAYDRRGRPGDRYDGMVGFSADETWDSAIDTWSPSEWQMAYEPQGGSGYDYSYAGGRGSYGDLGGPIITTQVTIPKDLAGSIIGKGGQRIKQIRHESGASIKIDEPLEGSEDRIITITGTQDQIQNAQYLLQNSVKQYSGKFF

SEQ ID NO: 15110 - protein, 550 aa, Homo sapiens
MVRGWEPPPGLDCAISEGHKSEGTMPPNKEASGLSSSPAGLICLPPISEELQLVWTQAAQTSELDSNEHLLKTFSYFPYPSLADIALLCLRYGLQMEKVKTWFMAQRLRCGISWSSEEIEETRARVVYRRDQLHFKSLLSFTHHAGRPPEEVPPPPVPAPEQVGIGIGPPTLSKPTQTKGLKVEPEEPSQMPPLPQSHQKLKESLMTPGSGAFPYQSDFWQHLQSSGLSKEQAGRGPNQSHGIGTASWNHSTTVPQPQARDKPPPIALIASSCKEESASSVTPSSSSTSSSFQVLANGATAASKPLQPLGCVPQSVSPSEQALPPHLEPAWPQGLRHNSVPGRVGPTEYLSPDMQRQRKTKRKTKEQLAILKSFFLQCQWARREDYQKLEQITGLPRPEIIQWFGDTRYALKHGQLKWFRDNAVPGAPSFQDPAIPTPPPSTRSLNERAETPPLPIPPPPPDIQPLERYWAAHQQLRETDIPQLSQASRLSTQQVLDWFDSRLPQPAEVVVCLDEEEEEEEEELPEDDEEEEEEEEEDDDDDDDDVIIQD

SEQ ID NO: 15111 - protein, 73 aa, Homo sapiens
MSAETASGPTEDQVEILEYNFNKVDKHPDSTTLCLIAAEAGLSEEETQKWFKQRLAKWRRSEGLPSECRSVTD

SEQ ID NO: 15112 - protein, 335 aa, Homo sapiens
MDNARMNSFLEYPILSSGDSGTCSARAYPSDHRITTFQSCAVSANSCGGDDRFLVGRGVQIGSPHHHHHHHHHHPQPATYQTSGNLGVSYSHSSCGPSYGSQNFSAPYSPYALNQEADVSGGYPQCAPAVYSGNLSSPMVQHHHHHQGYAGGAVGSPQYIHHSYGQEHQSLALATYNNSLSPLHASHQEACRSPASETSSPAQTFDWMKVKRNPPKTGKVGEYGYLGQPNAVRTNFTTKQLTELEKEFHFNKYLTRARRVEIAASLQLNETQVKIWFQNRRMKQKKREKEGLLPISPATPPGNDEKAEESSEKSSSSPCVPSPGSSTSDTLTTSH

SEQ ID NO: 15113 - protein, 410 aa, Homo sapiens
MSARKGYLLPSPNYPTTMSCSESPAANSFLVDSLISSGRGEAGGGGGGAGGGGGGGYYAHGGVYLPPAADLPYGLQSCGLFPTLGGKRNEAASPGSGGGGGGLGPGAHGYGPSPIDLWLDAPRSCRMEPPDGPPPPPQQQPPPPPQPPQPAPQATSCSFAQNIKEESSYCLYDSADKCPKVSATAAELAPFPRGPPPDGCALGTSSGVPVPGYFRLSQAYGTAKGYGSGGGGAQQLGAGPFPAQPPGRGFDLPPALASGSADAARKERALDSPPPPTLACGSGGGSQGDEEAHASSSAAEELSPAPSESSKASPEKDSLGNSKGENAANWLTAKSGRKKRCPYTKHQTLELEKEFLFNMYLTRERRLEISRSVHLTDRQVKIWFQNRRMKLKKMNRENRIRELTANFNFS

SEQ ID NO: 15114 - protein, 313 aa, Homo sapiens
MDFDERGPCSSNMYLPSCTYYVSGPDFSSLPSFLPQTPSSRPMTYSYSSNLPQVQPVREVTFREYAIEPATKWHPRGNLAHCYSAEELVHRDCLQAPSAAGVPGDVLAKSSANVYHHPTPAVSSNFYSTVGRNGVLPQAFDQFFETAYGTPENLASSDYPGDKSAEKGPPAATATSAAAAAAATGAPATSSSDSGGGGGCRETAAAAEEKERRRRPESSSSPESSSGHTEDKAGGSSGQRTRKKRCPYTKYQIRELEREFFFSVYINKEKRLQLSRMLNLTDRQVKIWFQNRRMKEKKINRDRLQYYSANPLL

SEQ ID NO: 15115 - protein, 388 aa, Homo sapiens
MTASVLLHPRWIEPTVMFLYDNGGGLVADELNKNMEGAAAAAAAAAAAAAAGAGGGGFPHPAAAAAGGNFSVAAAAAAAAAAAANQCRNLMAHPAPLAPGAASAYSSAPGEAPPSAAAAAAAAAAAAAAAAAASSSGGPGPAGPAGAEAAKQCSPCSAAAQSSSGPAALPYGYFGSGYYPCARMGPHPNAIKSCAQPASAAAAAAFADKYMDTAGPAAEEFSSRAKEFAFYHQGYAAGPYHHHQPMPGYLDMPVVPGLGGPGESRHEPLGLPMESYQPWALPNGWNGQMYCPKEQAQPPHLWKSTLPDVVSHPSDASSYRRGRKKRVPYTKVQLKELEREYATNKFITKDKRRRISATTNLSERQVTIWFQNRRVKEKKVINKLKTTS

SEQ ID NO: 15116 - protein, 376 aa, Homo sapiens
MNYEFEREIGFINSQPSLAECLTSFPPVADTFQSSSIKTSTLSHSTLIPPPFEQTIPSLNPGSHPRHGAGGRPKPSPAGSRGSPVPAGALQPPEYPWMKEKKAAKKTALLPAAAAAATAAATGPACLSHKESLEIADGSGGGSRRLRTAYTNTQLLELEKEFHFNKYLCRPRRVEIAALLDLTERQVKVWFQNRRMKHKRQTQCKENQNSEGKCKSLEDSEKVEEDEEEKTLFEQALSVSGALLEREGYTFQQNALSQQQAPNGHNGDSQSFPVSPLTSNEKNLKHFQHQSPTVPNCLSTMGQNCGAGLNNDSPEALEVPSLQDFSVFSTDSCLQLSDAVSPSLPGSLDSPVDISADSLDFFTDTLTTIDLQHLNY

SEQ ID NO: 15117 - protein, 443 aa, Homo sapiens
MQKATYYDSSAIYGGYPYQAANGFAYNANQQPYPASAALGADGEYHRPACSLQSPSSAGGHPKAHELSEACLRTLSAPPSQPPSLGEPPLHPPPPQAAPPAPQPPQPAPQPPAPTPAAPPPPSSASPPQNASNNPTPANAAKSPLLNSPTVAKQIFPWMKESRQNTKQKTSSSSSGESCAGDKSPPGQASSKRARTAYTSAQLVELEKEFHFNRYLCRPRRVEMANLLNLTERQIKIWFQNRRMKYKKDQKGKGMLTSSGGQSPSRSPVPPGAGGYLNSMHSLVNSVPYEPQSPPPFSKPPQGTYGLPPASYPASLPSCAPPPPPQKRYTAAGAGAGGTPDYDPHAHGLQGNGSYGTPHIQGSPVFVGGSYVEPMSNSGPALFGLTHLPHAASGAMDYGGAGPLGSGHHHGPGPGEPHPTYTDLTGHHPSQGRIQEAPKLTHL

SEQ ID NO: 15118 - protein, 320 aa, Homo sapiens
MTMSSFLINSNYIEPKFPPFEEYAQHSGSGGADGGPGGGPGYQQPPAPPTQHLPLQQPQLPHAGGGREPTASYYAPRTAREPAYPAAALYPAHGAADTAYPYGYRGGASPGRPPQPEQPPAQAKGPAHGLHASHVLQPQLPPPLQPRAVPPAAPRRCEAAPATPGVPAGGSAPACPLLLADKSPLGLKGKEPVVYPWMKKIHVSAVNPSYNGGEPKRSRTAYTRQQVLELEKEFHFNRYLTRRRRIEIAHTLCLSERQVKIWFQNRRMKWKKDHKLPNTKMRSSNSASASAGPPGKAQTQSPHLHPHPHPSTSTPVPSSI

SEQ ID NO: 15119 - protein, 270 aa, Homo sapiens
MSSYFVNSFCGRYPNGPDYQLHNYGDHSSVSEQFRDSASMHSGRYGYGYNGMDLSVGRSGSGHFGSGERARSYAASASAAPAEPRYSQPATSTHSPQPDPLPCSAVAPSPGSDSHHGGKNSLSNSSGASADAGSTHISSREGVGTASGAEEDAPASSEQASAQSEPSPAPPAQPQIYPWMRKLHISHDNIGGPEGKRARTAYTRYQTLELEKEFHFNRYLTRRRRIEIAHALCLSERQIKIWFQNRRMKWKKDNKLKSMSMAAAGGAFRP

SEQ ID NO: 15120 - protein, 233 aa, Homo sapiens
MSSYFVNPTFPGSLPSGQDSFLGQLPLYQAGYDALRPFPASYGASSLPDKTYTSPCFYQQSNSVLACNRASYEYGASCFYSDKDLSGASPSGSGKQRGPGDYLHFSPEQQYKPDSSSGQGKALHDEGADRKYTSPVYPWMQRMNSCAGAVYGSHGRRGRQTYTRYQTLELEKEFHFNRYLTRRRRIEIANALCLTERQIKIWFQNRRMKWKKENKLINSTQPSGEDSEAKAGE

SEQ ID NO: 15121 - protein, 230 aa, Homo sapiens
MSSSYYVNALFSKYTAGASLFQNAEPTSCSFAPNSQRSGYGAGAGAFASTVPGLYNVNSPLYQSPFASGYGLGADAYGNLPCASYDQNIPGLCSDLAKGACDKTDEGALHGAAEANFRIYPWMRSSGPDRKRGRQTYTRYQTLELEKEFHFNRYLTRRRRIEIAHALCLTERQIKIWFQNRRMKWKKEHKDEGPTAAAAPEGAVPSAAATAAADKADEEDDDEEEEDEEE

SEQ ID NO: 15122 - protein, 272 aa, Homo sapiens
MATTGALGNYYVDSFLLGADAADELSVGRYAPGTLGQPPRQAATLAEHPDFSPCSFQSKATVFGASWNPVHAAGANAVPAAVYHHHHHHPYVHPQAPVAAAAPDGRYMRSWLEPTPGALSFAGLPSSRPYGIKPEPLSARRGDCPTLDTHTLSLTDYACGSPPVDREKQPSEGAFSENNAENESGGDKPPIDPNNPAANWLHARSTRKKRCPYTKHQTLELEKEFLFNMYLTRDRRYEVARLLNLTERQVKIWFQNRRMKMKKINKDRAKDE

SEQ ID NO: 15123 - protein, 301 aa, Homo sapiens
MDYNRMNSFLEYPLCNRGPSAYSAHSAPTSFPPSSAQAVDSYASEGRYGGGLSSPAFQQNSGYPAQQPPSTLGVPFPSSAPSGYAPAACSPSYGPSQYYPLGQSEGDGGYFHPSSYGAQLGGLSDGYGAGGAGPGPYPPQHPPYGNEQTASFAPAYADLLSEDKETPCPSEPNTPTARTFDWMKVKRNPPKTAKVSEPGLGSPSGLRTNFTTRQLTELEKEFHFNKYLSRARRVEIAATLELNETQVKIWFQNRRMKQKKREREEGRVPPAPPGCPKEAAGDASDQSTCTSPEASPSSVTS

SEQ ID NO: 15124 - protein, 284 aa, Homo sapiens
MEPGNYATLDGAKDIEGLLGAGGGRNLVAHSPLTSHPAAPTLMPAVNYAPLDLPGSAEPPKQCHPCPGVPQGTSPAPVPYGYFGGGYYSCRVSRSSLKPCAQAATLAAYPAETPTAGEEYPSRPTEFAFYPGYPGTYQPMASYLDVSVVQTLGAPGEPRHDSLLPVDSYQSWALAGGWNSQMCCQGEQNPPGPFWKAAFADSSGQHPPDACAFRRGRKKRIPYSKGQLRELEREYAANKFITKDKRRKISAATSLSERQITIWFQNRRVKEKKVLAKVKNSATP

SEQ ID NO: 15125 - protein, 356 aa, Homo sapiens
MNFEFEREIGFINSQPSLAECLTSFPAVLETFQTSSIKESTLIPPPPPFEQTFPSLQPGASTLQRPRSQKRAEDGPALPPPPPPPLPAAPPAPEFPWMKEKKSAKKPSQSATSPSPAASAVPASGVGSPADGLGLPEAGGGGARRLRTAYTNTQLLELEKEFHFNKYLCRPRRVEIAALLDLTERQVKVWFQNRRMKHKRQTQHREPPDGEPACPGALEDICDPAEEPAASPGGPSASRAAWEACCHPPEVVPGALSADPRPLAVRLEGAGASSPGCALRGAGGLEPGPLPEDVFSGRQDSPFLPDLNFFAADSCLQLSGGLSPSLQGSLDSPVPFSEEELDFFTSTLCAIDLQFP

SEQ ID NO: 15126 - protein, 431 aa, Homo sapiens
MQKATYYDNAAAALFGGYSSYPGSNGFGFDVPPQPPFQAATHLEGDYQRSACSLQSLGNAAPHAKSKELNGSCMRPGLAPEPLSAPPGSPPPSAAPTSATSNSSNGGGPSKSGPPKCGPGTNSTLTKQIFPWMKESRQTSKLKNNSPGTAEGCGGGGGGGGGGGSGGSGGGGGGGGGGDKSPPGSAASKRARTAYTSAQLVELEKEFHFNRYLCRPRRVEMANLLNLSERQIKIWFQNRRMKYKKDQKAKGLASSSGGPSPAGSPPQPMQSTAGFMNALHSMTPSYESPSPPAFGKAHQNAYALPSNYQPPLKGCGAPQKYPPTPAPEYEPHVLQANGGAYGTPTMQGSPVYVGGGGYADPLPPPAGPSLYGLNHLSHHPSGNLDYNGAPPMAPSQHHGPCEPHPTYTDLSSHHAPPPQGRIQEAPKLTHL

SEQ ID NO: 15127 - protein, 251 aa, Homo sapiens
MAMSSFLINSNYVDPKFPPCEEYSQSDYLPSDHSPGYYAGGQRRESSFQPEAGFGRRAACTVQRYAACRDPGPPPPPPPPPPPPPPPGLSPRAPAPPPAGALLPEPGQRCEAVSSSPPPPPCAQNPLHPSPSHSACKEPVVYPWMRKVHVSTVNPNYAGGEPKRSRTAYTRQQVLELEKEFHYNRYLTRRRRVEIAHALCLSERQIKIWFQNRRMKWKKDHKLPNTKIRSGGAAGSAGGPPGRPNGGPRAL

SEQ ID NO: 15128 - protein, 269 aa, Homo sapiens
MSSYFVNSFSGRYPNGPDYQLLNYGSGSSLSGSYRDPAAMHTGSYGYNYNGMDLSVNRSSASSSHFGAVGESSRAFPAPAQEPRFRQAASSCSLSSPESLPCTNGDSHGAKPSASSPSDQATSASSSANFTEIDEASASSEPEEAASQLSSPSLARAQPEPMATSTAAPEGQTPQIFPWMRKLHISHDMTGPDGKRARTAYTRYQTLELEKEFHFNRYLTRRRRIEIAHALCLSERQIKIWFQNRRMKWKKDNKLKSMSLATAGSAFQP

SEQ ID NO: 15129 - protein, 224 aa, Homo sapiens
MSSYFVNSTFPVTLASGQESFLGQLPLYSSGYADPLRHYPAPYGPGPGQDKGFATSSYYPPAGGGYGRAAPCDYGPAPAFYREKESACALSGADEQPPFHPEPRKSDCAQDKSVFGETEEQKCSTPVYPWMQRMNSCNSSSFGPSGRRGRQTYTRYQTLELEKEFHYNRYLTRRRRIEIAHALCLTERQIKIWFQNRRMKWKKESKLLSASQLSAEEEEEKQAE

SEQ ID NO: 15130 - protein, 217 aa, Homo sapiens
MSSLYYANTLFSKYPASSSVFATGAFPEQTSCAFASNPQRPGYGAGSGASFAASMQGLYPGGGGMAGQSAAGVYAAGYGLEPSSFNMHCAPFEQNLSGVCPGDSAKAAGAKEQRDSDLAAESNFRIYPWMRSSGTDRKRGRQTYTRYQTLELEKEFHYNRYLTRRRRIEIAHTLCLTERQIKIWFQNRRMKWKKENKTAGPGTTGQDRAEAEEEEEE

SEQ ID NO: 15131 - protein, 243 aa, Homo sapiens
MSSYFVNSLFSKYKTGESLRPNYYDCGFAQDLGGRPTVVYGPSSGGSFQHPSQIQEFYHGPSSLSTAPYQQNPCAVACHGDPGNFYGYDPLQRQSLFGAQDPDLVQYADCKLAAASGLGEEAEGSEQSPSPTQLFPWMRPQAAAGRRRGRQTYSRYQTLELEKEFLFNPYLTRKRRIEVSHALGLTERQVKIWFQNRRMKWKKENNKDKFPSSKCEQEELEKQKLERAPEAADEGDAQKGDKK

SEQ ID NO: 15132 - protein, 250 aa, Homo sapiens
MSISGTLSSYYVDSIISHESEDAPPAKFPSGQYASSRQPGHAEHLEFPSCSFQPKAPVFGASWAPLSPHASGSLPSVYHPYIQPQGVPPAESRYLRTWLEPAPRGEAAPGQGQAAVKAEPLLGAPGELLKQGTPEYSLETSAGREAVLSNQRPGYGDNKICEGSEDKERPDQTNPSANWLHARSSRKKRCPYTKYQTLELEKEFLFNMYLTRDRRHEVARLLNLSERQVKIWFQNRRMKMKKMNKEQGKE

SEQ ID NO: 15133 - protein, 342 aa, Homo sapiens
MTCPRNVTPNSYAEPLAAPGGGERYSRSAGMYMQSGSDFNCGVMRGCGLAPSLSKRDEGSSPSLALNTYPSYLSQLDSWGDPKAAYRLEQPVGRPLSSCSYPPSVKEENVCCMYSAEKRAKSGPEAALYSHPLPESCLGEHEVPVPSYYRASPSYSALDKTPHCSGANDFEAPFEQRASLNPRAEHLESPQLGGKVSFPETPKSDSQTPSPNEIKTEQSLAGPKGSPSESEKERAKAADSSPDTSDNEAKEEIKAENTTGNWLTAKSGRKKRCPYTKHQTLELEKEFLFNMYLTRERRLEISKTINLTDRQVKIWFQNRRMKLKKMNRENRIRELTSNFNFT

SEQ ID NO: 15134 - protein, 304 aa, Homo sapiens
MFNSVNLGNFCSPSRKERGADFGERGSCASNLYLPSCTYYMPEFSTVSSFLPQAPSRQISYPYSAQVPPVREVSYGLEPSGKWHHRNSYSSCYAAADELMHRECLPPSTVTEILMKNEGSYGGHHHPSAPHATPAGFYSSVNKNSVLPQAFDRFFDNAYCGGGDPPAEPPCSGKGEAKGEPEAPPASGLASRAEAGAEAEAEEENTNPSSSGSAHSVAKEPAKGAAPNAPRTRKKRCPYSKFQIRELEREFFFNVYINKEKRLQLSRMLNLTDRQVKIWFQNRRMKEKKLSRDRLQYFSGNPLL

SEQ ID NO: 15135 - protein, 282 aa, Homo sapiens
MGEHNLLNPGFVGPLVNIHTGDTFYFPNFRASGAQLPGLPSLSYPRRDNVCSLSWPSAEPCNGYPQPYLGSPVSLNPPFGRTCELARVEDGKGYYREPCAEGGGGGLKREERGRDPGAGPGAALLPLEPSGPPALGFKYDYAAGGGGGDGGGGAGPPHDPPSCQSLESDSSSSLLNEGNKGAGAGDPGSLVSPLNPGGGLSASGAPWYPINSRSRKKRKPYSKLQLAELEGEFLVNEFITRQRRRELSDRLNLSDQQVKIWFQNRRMKKKRLLLREQALSFF

SEQ ID NO: 15136 - protein, 330 aa, Homo sapiens
MTTSLLLHPRWPESLMYVYEDSAAESGIGGGGGGGGGGTGGAGGGCSGASPGKAPSMDGLGSSCPASHCRDLLPHPVLGRPPAPLGAPQGAVYTDIPAPEAARQCAPPPAPPTSSSATLGYGYPFGGSYYGCRLSHNVNLQQKPCAYHPGDKYPEPSGALPGDDLSSRAKEFAFYPSFASSYQAMPGYLDVSVVPGISGHPEPRHDALIPVEGYQHWALSNGWDSQVYCSKEQSQSAHLWKSPFPDVVPLQPEVSSYRRGRKKRVPYTKVQLKELEKEYAASKFITKEKRRRISATTNLSERQVTIWFQNRRVKEKKVVSKSKAPHLHST

SEQ ID NO: 15137 - protein, 264 aa, Homo sapiens
MIMSSYLMDSNYIDPKFPPCEEYSQNSYIPEHSPEYYGRTRESGFQHHHQELYPPPPPRPSYPERQYSCTSLQGPGNSRGHGPAQAGHHHPEKSQSLCEPAPLSGASASPSPAPPACSQPAPDHPSSAASKQPIVYPWMKKIHVSTVNPNYNGGEPKRSRTAYTRQQVLELEKEFHYNRYLTRRRRIEIAHSLCLSERQIKIWFQNRRMKWKKDHRLPNTKVRSAPPAGAAPSTLSAATPGTSEDHSQSATPPEQQRAEDITRL

SEQ ID NO: 15138 - protein, 222 aa, Homo sapiens
MSSYVANSFYKQSPNIPAYNMQTCGNYGSASEVQASRYCYGGLDLSITFPPPAPSNSLHGVDMAANPRAHPDRPACSAAAAPGHAPGRDEAAPLNPGMYSQKAARPALEERAKSSGEIKEEQAQTGQPAGLSQPPAPPQIYPWMTKLHMSHETDGKRSRTSYTRYQTLELEKEFHFNRYLTRRRRIEIANNLCLNERQIKIWFQNRRMKWKKDSKMKSKEAL

SEQ ID NO: 15139 - protein, 235 aa, Homo sapiens
MNSYFTNPSLSCHLAGGQDVLPNVALNSTAYDPVRHFSTYGAAVAQNRIYSTPFYSPQENVVFSSSRGPYDYGSNSFYQEKDMLSNCRQNTLGHNTQTSIAQDFSSEQGRTAPQDQKASIQIYPWMQRMNSHSGVGYGADRRRGRQIYSRYQTLELEKEFHFNRYLTRRRRIEIANALCLTERQIKIWFQNRRMKWKKESNLTSTLSGGGGGATADSLGGKEEKREETEEEKQKE

SEQ ID NO: 15140 - protein, 242 aa, Homo sapiens
MSSYFVNPLFSKYKAGESLEPAYYDCRFPQSVGRSHALVYGPGGSAPGFQHASHHVQDFFHHGTSGISNSGYQQNPCSLSCHGDASKFYGYEALPRQSLYGAQQEASVVQYPDCKSSANTNSSEGQGHLNQNSSPSLMFPWMRPHAPGRRSGRQTYSRYQTLELEKEFLFNPYLTRKRRIEVSHALGLTERQVKIWFQNRRMKWKKENNKDKLPGARDEEKVEEEGNEEEEKEEEEKEENKD

SEQ ID NO: 15141 - protein, 260 aa, Homo sapiens
MSATGPISNYYVDSLISHDNEDLLASRFPATGAHPAAARPSGLVPDCSDFPSCSFAPKPAVFSTSWAPVPSQSSVVYHPYGPQPHLGADTRYMRTWLEPLSGAVSFPSFPAGGRHYALKPDAYPGRRADCGPGEGRSYPDYMYGSPGELRDRAPQTLPSPEADALAGSKHKEEKADLDPSNPVANWIHARSTRKKRCPYTKYQTLELEKEFLFNMYLTRDRRYEVARVLNLTERQVKIWFQNRRMKMKKMNKEKTDKEQS

SEQ ID NO: 15142 - protein, 328 aa, Homo sapiens
MSSYLEYVSCSSSGGVGGDVLSLAPKFCRSDARPVALQPAFPLGNGDGAFVSCLPLAAARPSPSPPAAPARPSVPPPAAPQYAQCTLEGAYEPGAAPAAAAGGADYGFLGSGPAYDFPGVLGRAADDGGSHVHYATSAVFSGGGSFLLSGQVDYAAFGEPGPFPACLKASADGHPGAFQTASPAPGTYPKSVSPASGLPAAFSTFEWMKVKRNASKKGKLAEYGAASPSSAIRTNFSTKQLTELEKEFHFNKYLTRARRIEIANCLHLNDTQVKIWFQNRRMKQKKREREGLLATAIPVAPLQLPLSGTTPTKFIKNPGSPSQSQEPS

SEQ ID NO: 15143 - protein, 340 aa, Homo sapiens
MSFPNSSPAANTFLVDSLISACRSDSFYSSSASMYMPPPSADMGTYGMQTCGLLPSLAKREVNHQNMGMNVHPYIPQVDSWTDPNRSCRIEQPVTQQVPTCSFTTNIKEESNCCMYSDKRNKLISAEVPSYQRLVPESCPVENPEVPVPGYFRLSQTYATGKTQEYNNSPEGSSTVMLQLNPRGAAKPQLSAAQLQMEKKMNEPVSGQEPTKVSQVESPEAKGGLPEERSCLAEVSVSSPEVQEKESKEEIKSDTPTSNWLTAKSGRKKRCPYTKHQTLELEKEFLFNMYLTRERRLEISKSVNLTDRQVKIWFQNRRMKLKKMSRENRIRELTANLTFS

SEQ ID NO: 15144 - protein, 338 aa, Homo sapiens
MNDFDECGQSAASMYLPGCAYYVAPSDFASKPSFLSQPSSCQMTFPYSSNLAPHVQPVREVAFRDYGLERAKWPYRGGGGGGSAGGGSSGGGPGGGGGGAGGYAPYYAAAAAAAAAAAAAEEAAMQRELLPPAGRRPDVLFKAPEPVCAAPGPPHGPAGAASNFYSAVGRNGILPQGFDQFYEAAPGPPFAGPQPPPPPAPPQPEGAADKGDPRTGAGGGGGSPCTKATPGSEPKGAAEGSGGDGEGPPGEAGAEKSSSAVAPQRSRKKRCPYTKYQIRELEREFFFNVYINKEKRLQLSRMLNLTDRQVKIWFQNRRMKEKKLNRDRLQYFTGNPLF

SEQ ID NO: 15145 - protein, 270 aa, Homo sapiens
MCERSLYRAGYVGSLLNLQSPDSFYFSNLRPNGGQLAALPPISYPRGALPWAATPASCAPAQPAGATAFGGFSQPYLAGSGPLGLQPPTAKDGPEEQAKFYAPEAAAGPEERGRTRPSFAPESSLAPAVAALKAAKYDYAGVGRATPGSTTLLQGAPCAPGFKDDTKGPLNLNMTVQAAGVASCLRPSLPDGLPWGAAPGRARKKRKPYTKQQIAELENEFLVNEFINRQKRKELSNRLNLSDQQVKIWFQNRRMKKKRVVLREQALALY

SEQ ID NO: 15146 - protein, 343 aa, Homo sapiens
MSRAGSWDMDGLRADGGGAGGAPASSSSSSVAAAAASGQCRGFLSAPVFAGTHSGRAAAAAAAAAAAAAAASGFAYPGTSERTGSSSSSSSSAVVAARPEAPPAKECPAPTPAAAAAAPPSAPALGYGYHFGNGYYSCRMSHGVGLQQNALKSSPHASLGGFPVEKYMDVSGLASSSVPANEVPARAKEVSFYQGYTSPYQHVPGYIDMVSTFGSGEPRHEAYISMEGYQSWTLANGWNSQVYCTKDQPQGSHFWKSSFPGDVALNQPDMCVYRRGRKKRVPYTKLQLKELENEYAINKFINKDKRRRISAATNLSERQVTIWFQNRRVKDKKIVSKLKDTVS

SEQ ID NO: 15147 - protein, 432 aa, Homo sapiens
MLFEQGQQALELPECTMQKAAYYENPGLFGGYGYSKTTDTYGYSTPHQPYPPPAAASSLDTDYPGSACSIQSSAPLRAPAHKGAELNGSCMRPGTGNSQGGGGGSQPPGLNSEQQPPQPPPPPPTLPPSSPTNPGGGVPAKKPKGGPNASSSSATISKQIFPWMKESRQNSKQKNSCATAGESCEDKSPPGPASKRVRTAYTSAQLVELEKEFHFNRYLCRPRRVEMANLLNLTERQIKIWFQNRRMKYKKDQKAKGILHSPASQSPERSPPLGGAAGHVAYSGQLPPVPGLAYDAPSPPAFAKSQPNMYGLAAYTAPLSSCLPQQKRYAAPEFEPHPMASNGGGFASANLQGSPVYVGGNFVESMAPASGPVFNLGHLSHPSSASVDYSCAAQIPGNHHHGPCDPHPTYTDLSAHHSSQGRLPEAPKLTHL

SEQ ID NO: 15148 - protein, 255 aa, Homo sapiens
MVMSSYMVNSKYVDPKFPPCEEYLQGGYLGEQGADYYGGGAQGADFQPPGLYPRPDFGEQPFGGSGPGPGSALPARGHGQEPGGPGGHYAAPGEPCPAPPAPPPAPLPGARAYSQSDPKQPPSGTALKQPAVVYPWMKKVHVNSVNPNYTGGEPKRSRTAYTRQQVLELEKEFHFNRYLTRRRRIEIAHTLCLSERQIKIWFQNRRMKWKKDHKLPNTKGRSSSSSSSSSCSSSVAPSQHLQPMAKDHHTDLTTL

SEQ ID NO: 15149 - protein, 290 aa, Homo sapiens
MSSYFVNPLYSKYKAAAAAAAAAGEAINPTYYDCHFAPEVGGRHAAAAAALQLYGNSAAGFPHAPPQAHAHPHPSPPPSGTGCGGREGRGQEYFHPGGGSPAAAYQAAPPPPPHPPPPPPPPPCGGIACHGEPAKFYGYDNLQRQPIFTTQQEAELVQYPDCKSSSGNIGEDPDHLNQSSSPSQMFPWMRPQAAPGRRRGRQTYSRFQTLELEKEFLFNPYLTRKRRIEVSHALALTERQVKIWFQNRRMKWKKENNKDKFPVSRQEVKDGETKKEAQELEEDRAEGLTN

SEQ ID NO: 15150 - protein, 352 aa, Homo sapiens
MLGGSAGRLKMSSSGTLSNYYVDSLIGHEGDEVFAARFGPPGPGAQGRPAGVADGPAATAAEFASCSFAPRSAVFSASWSAVPSQPPAAAAMSGLYHPYVPPPPLAASASEPGRYVRSWMEPLPGFPGGAGGGGGGGGGGPGRGPSPGPSGPANGRHYGIKPETRAAPAPATAASTTSSSSTSLSSSSKRTECSVARESQGSSGPEFSCNSFLQEKAAAATGGTGPGAGIGAATGTGGSSEPSACSDHPIPGCSLKEEEKQHSQPQQQQLDPNNPAANWIHARSTRKKRCPYTKYQTLELEKEFLFNMYLTRDRRYEVARILNLTERQVKIWFQNRRMKMKKMSKEKCPKGD

SEQ ID NO: 15151 - protein, 529 aa, Homo sapiens
MDLPVGPGAAGPSNVPAFLTKLWTLVSDPDTDALICWSPSGNSFHVFDQGQFAKEVLPKYFKHNNMASFVRQLNMYGFRKVVHIEQGGLVKPERDDTEFQHPCFLRGQEQLLENIKRKVTSVSTLKSEDIKIRQDSVTKLLTDVQLMKGKQECMDSKLLAMKHENEALWREVASLRQKHAQQQKVVNKLIQFLISLVQSNRILGVKRKIPLMLNDSGSAHSMPKYSRQFSLEHVHGSGPYSAPSPAYSSSSLYAPDAVASSGPIISDITELAPASPMASPGGSIDERPLSSSPLVRVKEEPPSPPQSPRVEEASPGRPSSVDTLLSPTALIDSILRESEPAPASVTALTDARGHTDTEGRPPSPPPTSTPEKCLSVACLDKNELSDHLDAMDSNLDNLQTMLSSHGFSVDTSALLDLFSPSVTVPDMSLPDLDSSLASIQELLSPQEPPRPPEAENSSPDSGKQLVHYTAQPLFLLDPGSVDTGSNDLPVLFELGEGSYFSEGDGFAEDPTISLLTGSEPPKAKDPTVS

SEQ ID NO: 15152 - protein, 536 aa, Homo sapiens
MKQSSNVPAFLSKLWTLVEETHTNEFITWSQNGQSFLVLDEQRFAKEILPKYFKHNNMASFVRQLNMYGFRKVVHIDSGIVKQERDGPVEFQHPYFKQGQDDLLENIKRKVSSSKPEENKIRQEDLTKIISSAQKVQIKQETIESRLSELKSENESLWKEVSELRAKHAQQQQVIRKIVQFIVTLVQNNQLVSLKRKRPLLLNTNGAQKKNLFQHIVKEPTDNHHHKVPHSRTEGLKPRERISDDIIIYDVTDDNADEENIPVIPETNEDVISDPSNCSQYPDIVIVEDDNEDEYAPVIQSGEQNEPARESLSSGSDGSSPLMSSAVQLNGSSSLTSEDPVTMMDSILNDNINLLGKVELLDYLDSIDCSLEDFQAMLSGRQFSIDPDLLVDLFTSSVQMNPTDYINNTKSENKGLETTKNNVVQPVSEEGRKSKSKPDKQLIQYTAFPLLAFLDGNPASSVEQASTTASSEVLSSVDKPIEVDELLDSSLDPEPTQSKLVRLEPLTEAEASEATLFYLCELAPAPLDSDMPLLDS

SEQ ID NO: 15153 - protein, 492 aa, Homo sapiens
MQEAPAALPTEPGPSPVPAFLGKLWALVGDPGTDHLIRWSPSGTSFLVSDQSRFAKEVLPQYFKHSNMASFVRQLNMYGFRKVVSIEQGGLLRPERDHVEFQHPSFVRGREQLLERVRRKVPALRGDDGRWRPEDLGRLLGEVQALRGVQESTEARLRELRQQNEILWREVVTLRQSHGQQHRVIGKLIQCLFGPLQAGPSNAGGKRKLSLMLDEGSSCPTPAKFNTCPLPGALLQDPYFIQSPLPETNLGLSPHRARGPIISDIPEDSPSPEGTRLSPSSDGRREKGLALLKEEPASPGGDGEAGLALAPNECDFCVTAPPPLPVAVVQAILEGKGSFSPEGPRNAQQPEPGDPREIPDRGPLGLESGDRSPESLLPPMLLQPPQESVEPAGPLDVLGPSLQGREWTLMDLDMELSLMQPLVPERGEPELAVKGLNSPSPGKDPTLGAPLLLDVQAALGGPALGLPGALTIYSTPESRTASYLGPEASPSP

SEQ ID NO: 15154 - protein, 596 aa, Homo sapiens
MEALLSTPINPNNFPAKLWRLVNSPRYRSIRWDGRGEGLLIDQPLFEAELLSPPGPGGGGGTAGAGAEPELFKTTSFTSFIRQLNLYGFRKVVLGGPGGGKPAGNGPLHHFHNPHFRRDQPQLLVHLKRLTSANKAKLAAGLEVPCRPPNRFQRLLITSASAATAPLQHQQPPPPAGPRPEPHGPVAVGQFHRSFRRDSLSPYSCVSTPSHDHSTYPLKGLDRTPVPHRIWQNSLGMHPGQVETSPTFSDKGVPFPVLQRFPTEVTYTLQPSTTSVHVQQGPQTMVSSSQKYSNYTPSAQYSQAYYPTAVLQCCSPTHMDALSSCVTPNASSYAHCNYFQNPSMQSSYPVEFLPSNWPCSTTDENTKTEVNLEAVFQIVDELHSSPKLEMVKVEPVENQCPTSPSYRGQHILANSNNSNPCSASQASQLEPLTPVGSDIMSFVVGTEQAVACSLPQSPEYIYTIHTAQPVENSTIQESAAIQQAHVKLKEHLNHNPSPSSVVFVQEGPPFSTHQVDANIKCQTSSRENILPSEQMGFLISEMGPASKPSEDTGLATPARYREHRSNSQQGKSPDLHLLVDVACKQERFPKEEELKE

SEQ ID NO: 15155 - protein, 423 aa, Homo sapiens
MEDKRSLSMARCEERNSRGQDHGLERVPFPPQLQSETYLHPADPSPAWDDPGSTGSPNLRLLTEEIAFQPLAEEASFRRPHPDGDVPPQGEDNLLSLPFPQKLWRLVSSNQFSSIWWDDSGACRVINQKLFEKEILKRDVAHKVFATTSIKSFFRQLNLYGFRKRRQCTFRTFTRIFSAKRLVSILNKLEFYCHPYFQRDSPHLLVRMKRRVGVKSAPRHQEEDKPEAAGSCLAPADTEQQDHTSPNENDQVTPQHREPAGPNTQIRSGSAPPATPVMVPDSAVASDNSPVTQPAGEWSEGSQAHVTPVAAVPGPAALPFLYVPGSPTQMNSYGPVVALPTASRSTLAMDTTGLPAPGMLPFCHLWVPVTLVAAGAAQPAASMVMFPHLPALHHHCPHSHRTSQYMPASDGPQAYPDYADQST

SEQ ID NO: 15156 - protein, 401 aa, Homo sapiens
MAHVSSETQDVSPKDELTASEASTRSPLCEHTFPGDSDLRSMIEEHAFQVLSQGSLLESPSYTVCVSEPDKDDDFLSLNFPRKLWKIVESDQFKSISWDENGTCIVINEELFKKEILETKAPYRIFQTDAIKSFVRQLNLYGFSKIQQNFQRSAFLATFLSEEKESSVLSKLKFYYNPNFKRGYPQLLVRVKRRIGVKNASPISTLFNEDFNKKHFRAGANMENHNSALAAEASEESLFSASKNLNMPLTRESSVRQIIANSSVPIRSGFPPPSPSTSVGPSEQIATDQHAILNQLTTIHMHSHSTYMQARGHIVNFITTTTSQYHIISPLQNGYFGLTVEPSAVPTRYPLVSVNEAPYRNMLPAGNPWLQMPTIADRSAAPHSRLALQPSPLDKYHPNYN

SEQ ID NO: 15157 - protein, 155 aa, Homo sapiens; identical to SEQ ID NO: 6697

SEQ ID NO: 15158 - protein, 134 aa, Homo sapiens
MKAFSPVRSVRKNSLSDHSLGISRSKTPVDDPMSLLYNMNDCYSKLKELVPSIPQNKKVSKMEILQHVIDYILDLQIALDSHPTIVSLHHQRPGQNQASRTPLTTLNTDISILSLQASEFPSELMSNDSKALCG

SEQ ID NO: 15159 - protein, 119 aa, Homo sapiens
MKALSPVRGCYEAVCCLSERSLAIARGRGKGPAAEEPLSLLDDMNHCYSRLRELVPGVPRGTQLSQVEILQRVIDYILDLQVVLAEPAPGPPDGPHLPIQTAELTPELVISNDKRSFCH

SEQ ID NO: 15160 - protein, 161 aa, Homo sapiens
MKAVSPVRPSGRKAPSGCGGGELALRCLAEHGHSLGGSAAAAAAAAAARCKAAEAAADEPALCLQCDMNDCYSRLRRLVPTIPPNKKVSKVEILQHVIDYILDLQLALETHPALLRQPPPPAPPHHPAGTCPAAPPRTPLTALNTDPAGAVNKQGDSILCR

SEQ ID NO: 15161 - protein, 785 aa, Homo sapiens
MGKKYKNIVLLKGLEVINDYHFRMVKSLLSNDLKLNLKMREEYDKIQIADLMEEKFRGDAGLGKLIKIFEDIPTLEDLAETLKKEKLKVKGPALSRKRKKEVDATSPAPSTSSTVKTEGAEATPGAQKRKKSTKEKAGPKGSKVSEEQTQPPSPAGAGMSTAMGRSPSPKTSLSAPPNSSSTENPKTVAKCQVTPRRNVLQKRPVIVKVLSTTKPFEYETPEMEKKIMFHATVATQTQFFHVKVLNTSLKEKFNGKKIIIISDYLEYDSLLEVNEESTVSEAGPNQTFEVPNKIINRAKETLKIDILHKQASGNIVYGVFMLHKKTVNQKTTIYEIQDDRGKMDVVGTGQCHNIPCEEGDKLQLFCFRLRKKNQMSKLISEMHSFIQIKKKTNPRNNDPKSMKLPQEQRQLPYPSEASTTFPESHLRTPQMPPTTPSSSFFTKKSEDTISKMNDFMRMQILKEGSHFPGPFMTSIGPAESHPHTPQMPPSTPSSSFLTTKSEDTISKMNDFMRMQILKEGSHFPGPFMTSIGPAESHPHTPQMPPSTPSSSFLTTLKPRLKTEPEEVSIEDSAQSDLKEVMVLNATESFVYEPKEQKKMFHATVATENEVFRVKVFNIDLKEKFTPKKIIAIANYVCRNGFLEVYPFTLVADVNADRNMEIPKGLIRSASVTPKINQLCSQTKGSFVNGVFEVHKKNVRGEFTYYEIQDNTGKMEVVVHGRLTTINCEEGDKLKLTCFELAPKSGNTGELRSVIHSHIKVIKTRKNKKDILNPDSSMETSPDFFF

SEQ ID NO: 15162 - protein, 519 aa, Homo sapiens
MDADEGQDMSQVSGKESPPVSDTPDEGDEPMPIPEDLSTTSGGQQSSKSDRVVASNVKVETQSDEENGRACEMNGEECAEDLRMLDASGEKMNGSHRDQGSSALSGVGGIRLPNGKLKCDICGIICIGPNVLMVHKRSHTGERPFQCNQCGASFTQKGNLLRHIKLHSGEKPFKCHLCNYACRRRDALTGHLRTHSVGKPHKCGYCGRSYKQRSSLEEHKERCHNYLESMGLPGTLYPVIKEETNHSEMAEDLCKIGSERSLVLDRLASNVAKRKSSMPQKFLGDKGLSDTPYDSSASYEKENEMMKSHVMDQAINNAINYLGAESLRPLVQTPPGGSEVVPVISPMYQLHKPLAEGTPRSNHSAQDSAVENLLLLSKAKLVPSEREASPSNSCQDSTDTESNNEEQRSGLIYLTNHIAPHARNGLSLKEEHRAYDLLRAASENSQDALRVVSTSGEQMKVYKCEHCRVLFLDHVMYTIHMGCHGFRDPFECNMCGYHSQDRYEFSSHITRGEHRFHMS

SEQ ID NO: 15163 - protein, 526 aa, Homo sapiens [sequence omitted]

SEQ ID NO: 15164 - protein, 509 aa, Homo sapiens
MEDIQTNAELKSTQEQSVPAESAAVLNDYSLTKSHEMENVDSGEGPANEDEDIGDDSMKVKDEYSERDENVLKSEPMGNAEEPEIPYSYSREYNEYENIKLERHVVSFDSSRPTSGKMNCDVCGLSCISFNVLMVHKRSHTGERPFQCNQCGASFTQKGNLLRHIKLHTGEKPFKCHLCNYACQRRDALTGHLRTHSVEKPYKCEFCGRSYKQRSSLEEHKERCRTFLQSTDPGDTASAEARHIKAEMGSERALVLDRLASNVAKRKSSMPQKFIGEKRHCFDVNYNSSYMYEKESELIQTRMMDQAINNAISYLGAEALRPLVQTPPAPTSEMVPVISSMYPIALTRAEMSNGAPQELEKKSIHLPEKSVPSERGLSPNNSGHDSTDTDSNHEERQNHIYQQNHMVLSRARNGMPLLKEVPRSYELLKPPPICPRDSVKVINKEGEVMDVYRCDHCRVLFLDYVMFTIHMGCHGFRDPFECNMCGYRSHDRYEFSSHIARGEHRALLK

SEQ ID NO: 15165 - protein, 585 aa, Homo sapiens
MHTPPALPRRFQGGGRVRTPGSHRQGKDNLERDPSGGCVPDFLPQAQDSNHFIMESLFCESSGDSSLEKEFLGAPVGPSVSTPNSQHSSPSRSLSANSIKVEMYSDEESSRLLGPDERLLEKDDSVIVEDSLSEPLGYCDGSGPEPHSPGGIRLPNGKLKCDVCGMVCIGPNVLMVHKRSHTGERPFHCNQCGASFTQKGNLLRHIKLHSGEKPFKCPFCNYACRRRDALTGHLRTHSVSSPTVGKPYKCNYCGRSYKQQSTLEEHKERCHNYLQSLSTEAQALAGQPGDEIRDLEMVPDSMLHSSSERPTFIDRLANSLTKRKRSTPQKFVGEKQMRFSLSDLPYDVNSGGYEKDVELVAHHSLEPGFGSSLAFVGAEHLRPLRLPPTNCISELTPVISSVYTQMQPLPGRLELPGSREAGEGPEDLADGGPLLYRPRGPLTDPGASPSNGCQDSTDTESNHEDRVAGVVSLPQGPPPQPPPTIVVGRHSPAYAKEDPKPQEGLLRGTPGPSKEVLRVVGESGEPVKAFKCEHCRILFLDHVMFTIHMGCHGFRDPFECNICGYHSQDRYEFSSHIVRGEHKVG

SEQ ID NO: 15166 - protein, 419 aa, Homo sapiens
MGEKKPEPLDFVKDFQEYLTQQTHHVNMISGSVSGDKEAEALQGAGTDGDQNGLDHPSVEVSLDENSGMLVDGFERTFDGKLKCRYCNYASKGTARLIEHIRIHTGEKPHRCHLCPFASAYERHLEAHMRSHTGEKPYKCELCSFRCSDRSNLSHHRRRKHKMVPIKGTRSSLSSKKMWGVLQKKTSNLGYSRRALINLSPPSMVVQKPDYLNDFTHEIPNIQTDSYESMAKTTPTGGLPRDPQELMVDNPLNQLSTLAGQLSSLPPENQNPASPDVVPCPDEKPFMIQQPSTQAVVSAVSASIPQSSSPTSPEPRPSHSQRNYSPVAGPSSEPSAHTSTPSIGNSQPSTPAPALPVQDPQLLHHCQHCDMYFADNILYTIHMGCHGYENPFQCNICGCKCKNKYDFACHFARGQHNQH

SEQ ID NO: 15167 - protein, 510 aa, Homo sapiens
MPRGFLVKRSKKSTPVSYRVRGGEDGDRALLLSPSCGGARAEPPAPSPVPGPLPPPPPAERAHAALAAALACAPGPQPPPQGPRAAHFGNPEAAHPAPLYSPTRPVSREHEKHKYFERSFNLGSPVSAESFPTPAALLGGGGGGGASGAGGGGTCGGDPLLFAPAELKMGTAFSAGAEAARGPGPGPPLPPAAALRPPGKRPPPPTAAEPPAKAVKAPGAKKPKAIRKLHFEDEVTTSPVLGLKIKEGPVEAPRGRAGGAARPLGEFICQLCKEEYADPFALAQHKCSRIVRVEYRCPECAKVFSCPANLASHRRWHKPRPAPAAARAPEPEAAARAEAREAPGGGSDRDTPSPGGVSESGSEDGLYECHHCAKKFRRQAYLRKHLLAHHQALQAKGAPLAPPAEDLLALYPGPDEKAPQEAAGDGEGAGVLGLSASAECHLCPVCGESFASKGAQERHLRLLHAAQVFPCKYCPATFYSSPGLTRHINKCHPSENRQVILLQVPVRPAC

SEQ ID NO: 15168 - protein, 566 aa, Homo sapiens
MPRGFLVKRTKRTGGLYRVRLAERVFPLLGPQGAPPFLEEAPSASLPGAERATPPTREEPGKGLTAEAAREQSGSPCRAAGVSPGTGGREGAEWRAGGREGPGPSPSPSPSPAKPAGAELRRAFLERCLSSPVSAESFPGGAAAVAAFSCSVAPAAAPTPGEQFLLPLRAPFPEPALQPDPAPLSAALQSLKRAAGGERRGKAPTDCASGPAAAGIKKPKAMRKLSFADEVTTSPVLGLKIKEEEPGAPSRGLGGSRTPLGEFICQLCKEQYADPFALAQHRCSRIVRVEYRCPECDKVFSCPANLASHRRWHKPRPAAANAATVSSADGKPPSSSSSSSRDSGAIASFLAEGKENSRIERTADQHPQARDSSGADQHPDSAPRQGLQVLTHPEPPLPQGPYTEGVLGRRVPVPGSTSGGRGSEIFVCPYCHKKFRRQAYLRKHLSTHEAGSARALAPGFGSERGAPLAFACPLCGAHFPTADIREKHRLWHAVREELLLPALAGAPPETSGPSGPSDGSAQQIFSCKHCPSTFFSSPGLTRHINKCHPSESRQVLLLQMPLRPGC

SEQ ID NO: 15169 - protein, 325 aa, Homo sapiens
MPITRMRMRPWLEMQINSNQIPGLIWINKEEMIFQIPWKHAAKHGWDINKDACLFRSWAIHTGRYKAGEKEPDPKTWKANFRCAMNSLPDIEEVKDQSRNKGSSAVRVYRMLPPLTKNQRKERKSKSSRDAKSKAKRKSCGDSSPDTFSDGLSSSTLPDDHSSYTVPGYMQDLEVEQALTPALSPCAVSSTLPDWHIPVEVVPDSTSDLYNFQVSPMPSTSEATTDEDEEGKLPEDIMKLLEQSEWQPTNVDGKGYLLNEPGVQPTSVYGDFSCKEEPEIDSPGGDIGLSLQRVFTDLKNMDATWLDSLLTPVRLPSIQAIPCAP

SEQ ID NO: 15170 - protein, 349 aa, Homo sapiens
MPVERMRMRPWLEEQINSNTIPGLKWLNKEKKIFQIPWMHAARHGWDVEKDAPLFRNWAIHTGKHQPGVDKPDPKTWKANFRCAMNSLPDIEEVKDKSIKKGNNAFRVYRMLPLSERPSKKGKKPKTEKEDKVKHIKQEPVESSLGLSNGVSDLSPEYAVLTSTIKNEVDSTVNIIVVGQSHLDSNIENQEIVTNPPDICQVVEVTTESDEQPVSMSELYPLQISPVSSYAESETTDSVPSDEESAEGRPHWRKRNIEGKQYLSNMGTRGSYLLPGMASFVTSNKPDLQVTIKEESNPVPYNSSWPPFQDLPLSSSMTPASSSSRPDRETRASVIKKTSDITQARVKSC

SEQ ID NO: 15171 - protein, 427 aa, Homo sapiens
MGTPKPRILPWLVSQLDLGQLEGVAWVNKSRTRFRIPWKHGLRQDAQQEDFGIFQAWAEATGAYVPGRDKPDLPTWKRNFRSALNRKEGLRLAEDRSKDPHDPHKIYEFVNSGVGDFSQPDTSPDTNGGGSTSDTQEDILDELLGNMVLAPLPDPGPPSLAVAPEPCPQPLRSPSLDNPTPFPNLGPSENPLKRLLVPGEEWEFEVTAFYRGRQVFQQTISCPEGLRLVGSEVGDRTLPGWPVTLPDPGMSLTDRGVMSYVRHVLSCLGGGLALWRAGQWLWAQRLGHCHTYWAVSEELLPNSGHGPDGEVPKDKEGGVFDLGPFIVDLITFTEGSGRSPRYALWFCVGESWPQDQPWTKRLVMVKVVPTCLRALVEMARVGGASSLENTVDLHISNSHPLSLTSDQYKAYLQDLVEGMDFQGPGES

SEQ ID NO: 15172 - protein, 451 aa, Homo sapiens
MNLEGGGRGGEFGMSAVSCGNGKLRQWLIDQIDSGKYPGLVWENEEKSIFRIPWKHAGKQDYNREEDAALFKAWALFKGKFREGIDKPDPPTWKTRLRCALNKSNDFEELVERSQLDISDPYKVYRIVPEGAKKGAKQLTLEDPQMSMSHPYTMTTPYPSLPAQQVHNYMMPPLDRSWRDYVPDQPHPEIPYQCPMTFGPRGHHWQGPACENGCQVTGTFYACAPPESQAPGVPTEPSIRSAEALAFSDCRLHICLYYREILVKELTTSSPEGCRISHGHTYDASNLDQVLFPYPEDNGQRKNIEKLLSHLERGVVLWMAPDGLYAKRLCQSRIYWDGPLALCNDRPNKLERDQTCKLFDTQQFLSELQAFAHHGRSLPRFQVTLCFGEEFPDPQRQRKLITAHVEPLLARQLYYFAQQNSGHFLRGYDLPEHISNPEDYHRSIRHSSIQE

SEQ ID NO: 15173 - protein, 498 aa, Homo sapiens
MNQSIPVAPTPPRRVRLKPWLVAQVNSCQYPGLQWVNGEKKLFCIPWRHATRHGPSQDGDNTIFKAWAKETGKYTEGVDEADPAKWKANLRCALNKSRDFRLIYDGPRDMPPQPYKIYEVCSNGPAPTDSQPPEDYSFGAGEEEEEEEELQRMLPSLSLTEDVKWPPTLQPPTLRPPTLQPPTLQPPVVLGPPAPDPSPLAPPPGNPAGFRELLSEVLEPGPLPASLPPAGEQLLPDLLISPHMLPLTDLEIKFQYRGRPPRALTISNPHGCRLFYSQLEATQEQVELFGPISLEQVRFPSPEDIPSDKQRFYTNQLLDVLDRGLILQLQGQDLYAIRLCQCKVFWSGPCASAHDSCPNPIQREVKTKLFSLEHFLNELILFQKGQTNTPPPFEIFFCFGEEWPDRKPREKKLITVQVVPVAARLLLEMFSGELSWSADSIRLQISNPDLKDRMVEQFKELHHIWQSQQRLQPVAQAPPGAGLGVGQGPWPMHPAGMQ

SEQ ID NO: 15174 - protein, 467 aa, Homo sapiens
MALHPRRVRLKPWLVAQVDSGLYPGLIWLHRDSKRFQIPWKHATRHSPQQEEENTIFKAWAVETGKYQEGVDDPDPAKWKAQLRCALNKSREFNLMYDGTKEVPMNPVKIYQVCDIPQPQGSIINPGSTGSAPWDEKDNDVDEEDEEDELDQSQHHVPIQDTFPFLNINGSPMAPASVGNCSVGNCSPEAVWPKTEPLEMEVPQAPIQPFYSSPELWISSLPMTDLDIKFQYRGKEYGQTMTVSNPQGCRLFYGDLGPMPDQEELFGPVSLEQVKFPGPEHITNEKQKLFTSKLLDVMDRGLILEVSGHAIYAIRLCQCKVYWSGPCAPSLVAPNLIERQKKVKLFCLETFLSDLIAHQKGQIEKQPPFEIYLCFGEEWPDGKPLERKLILVQVIPVVARMIYEMFSGDFTRSFDSGSVRLQISTPDIKDNIVAQLKQLYRILQTQESWQPMQPTPSMQLPPALPPQ

SEQ ID NO: 15175 - protein, 503 aa, Homo sapiens
MALAPERAAPRVLFGEWLLGEISSGCYEGLQWLDEARTCFRVPWKHFARKDLSEADARIFKAWAVARGRWPPSSRGGGPPPEAETAERAGWKTNFRCALRSTRRFVMLRDNSGDPADPHKVYALSRELCWREGPGTDQTEAEAPAAVPPPQGGPPGPFLAHTHAGLQAPGPLPAPAGDKGDLLLQAVQQSCLADHLLTASWGADPVPTKAPGEGQEGLPLTGACAGGPGLPAGELYGWAVETTPSPGPQPAALTTGEAAAPESPHQAEPYLSPSPSACTAVQEPSPGALDVTIMYKGRTVLQKVVGHPSCTFLYGPPDPAVRATDPQQVAFPSPAELPDQKQLRYTEELLRHVAPGLHLELRGPQLWARRMGKCKVYWEVGGPPGSASPSTPACLLPRNCDTPIFDFRVFFQELVEFRARQRRGSPRYTIYLGFGQDLSAGRPKEKSLVLVKLEPWLCRVHLEGTQREGVSSLDSSSLSLCLSSANSLYDDIECFLMELEQPA

SEQ ID NO: 15176 - protein, 426 aa, Homo sapiens
MCDRNGGRRLRQWLIEQIDSSMYPGLIWENEEKSMFRIPWKHAGKQDYNQEVDASIFKAWAVFKGKFKEGDKAEPATWKTRLRCALNKSPDFEEVTDRSQLDISEPYKVYRIVPEEEQKCKLGVATAGCVNEVTEMECGRSEIDELIKEPSVDDYMGMIKRSPSPPEACRSQLLPDWWAQQPSTGVPLVTGYTTYDAHHSAFSQMVISFYYGGKLVGQATTTCPEGCRLSLSQPGLPGTKLYGPEGLELVRFPPADAIPSERQRQVTRKLFGHLERGVLLHSSRQGVFVKRLCQGRVFCSGNAVVCKGRPNKLERDEVVQVFDTSQFFRELQQFYNSQGRLPDGRVVLCFGEEFPDMAPLRSKLILVQIEQLYVRQLAEEAGKSCGAGSVMQAPEEPPPDQVFRMFPDICASHQRSFFRENQQITV

SEQ ID NO: 15177 - protein, 393 aa, Homo sapiens
MASGRARCTRKLRNWVVEQVESGQFPGVCWDDTAKTMFRIPWKHAGKQDFREDQDAAFFKAWAIFKGKYKEGDTGGPAVWKTRLRCALNKSSEFKEVPERGRMDVAEPYKVYQLLPPGIVSGQPGTQKVPSKRQHSSVSSERKEEEDAMQNCTLSPSVLQDSLNNEEEGASGGAVHSDIGSSSSSSSPEPQEVTDTTEAPFQGDQRSLEFLLPPEPDYSLLLTFIYNGRVVGEAQVQSLDCRLVAEPSGSESSMEQVLFPKPGPLEPTQRLLSQLERGILVASNPRGLFVQRLCPIPISWNAPQAPPGPGPHLLPSNECVELFRTAYFCRDLVRYFQGLGPPPKFQVTLNFWEESHGSSHTPQNLITVKMEQAFARYLLEQTPEQQAAILSLV

SEQ ID NO: 15178 - protein, 480 aa, Homo sapiens
MSFPQLGYPQYLSAAGPGAYGGERPGVLAAAAAAAAAASSGRPGAAELGGGAGAAAVTSVLGMYAAAGPYAGAPNYSAFLPYAADLSLFSQMGSQYELKDNPGVHPATFAAHTAPAYYPYGQFQYGDPGRPKNATRESTSTLKAWLNEHRKNPYPTKGEKIMLAIITKMTLTQVSTWFANARRRLKKENKVTWGARSKDQEDGALFGSDTEGDPEKAEDDEEIDLESIDIDKIDEHDGDQSNEDDEDKAEAPHAPAAPSALARDQGSPLAAADVLKPQDSPLGLAKEAPEPGSTRLLSPGAAAGGLQGAPHGKPKIWSLAETATSPDGAPKASPPPPAGHPGAHGPSAGAPLQHPAFLPSHGLYTCHIGKFSNWTNSAFLAQGSLLNMRSFLGVGAPHAAPHGPHLPAPPPPQPPVAIAPGALNGDKASVRSSPTLPERDLVPRPDSPAQQLKSPFQPVRDNSLAPQEGTPRILAALPSA

SEQ ID NO: 15179 - protein, 471 aa, Homo sapiens
MSYPQGYLYQAPGSLALYSCPAYGASALAAPRSEELARSASGSAFSPYPGSAAFTAQAATGFGSPLQYSADAAAAAAGFPSYMGAPYDAHTTGMTGAISYHPYGSAAYPYQLNDPAYRKNATRDATATLKAWLNEHRKNPYPTKGEKIMLAIITKMTLTQVSTWFANARRRLKKENKMTWAPRNKSEDEDEDEGDATRSKDESPDKAQEGTETSAEDEGISLHVDSLTDHSCSAESDGEKLPCRAGDPLCESGSECKDKYDDLEDDEDDDEEGERGLAPPKPVTSSPLTGLEAPLLSPPPEAAPRGGRKTPQGSRTSPGAPPPASKPKLWSLAEIATSDLKQPSLGPGCGPPGLPAAAAPASTGAPPGGSPYPASPLLGRPLYYTSPFYGNYTNYGNLNAALQGQGLLRYNSAAAAPGEALHTAPKAASDAGKAGAHPLESHYRSPGGGYEPKKDASEGCTVVGGGVQPYL

SEQ ID NO: 15180 - protein, 501 aa, Homo sapiens
MSFPQLGYQYIRPLYPSERPGAAGGSGGSAGARGGLGAGASELNASGSLSNVLSSVYGAPYAAAAAAAAAQGYGAFLPYAAELPIFPQLGAQYELKDSPGVQHPAAAAAFPHPHPAFYPYGQYQFGDPSRPKNATRESTSTLKAWLNEHRKNPYPTKGEKIMLAIITKMTLTQVSTWFANARRRLKKENKMTWAPRSRTDEEGNAYGSEREEEDEEEDEEDGKRELELEEEELGGEEEDTGGEGLADDDEDEEIDLENLDGAATEPELSLAGAARRDGDLGLGPISDSKNSDSEDSSEGLEDRPLPVLSLAPAPPPVAVASPSLPSPPVSLDPCAPAPAPASALQKPKIWSLAETATSPDNPRRSPPGAGGSPPGAAVAPSALQLSPAAAAAAAHRLVSAPLGKFPAWTNRPFPGPPPGPRLHPLSLLGSAPPHLLGLPGAAGHPAAAAAFARPAEPEGGTDRCSALEVEKKLLKTAFQPVPRRPQNHLDAALVLSALSSS

SEQ ID NO: 15181 - protein, 519 aa, Homo sapiens
MSYPQFGYPYSSAPQFLMATNSLSTCCESGGRTLADSGPAASAQAPVYCPVYESRLLATARHELNSAAALGVYGGPYGGSQGYGNYVTYGSEASAFYSLNSFDSKDGSGSAHGGLAPAAAAYYPYEPALGQYPYDRYGTMDSGTRRKNATRETTSTLKAWLQEHRKNPYPTKGEKIMLAIITKMTLTQVSTWFANARRRLKKENKMTWPPRNKCADEKRPYAEGEEEEGGEEEAREEPLKSSKNAEPVGKEEKELELSDLDDFDPLEAEPPACELKPPFHSLDGGLERVPAAPDGPVKEASGALRMSLAAGGGAALDEDLERARSCLRSAAAGPEPLPGAEGGPQVCEAKLGFVPAGASAGLEAKPRIWSLAHTATAAAAAATSLSQTEFPSCMLKRQGPAAPAAVSSAPATSPSVALPHSGALDRHQDSPVTSLRNWVDGVFHDPILRHSTLNQAWATAKGALLDPGPLGRSLGAGANVLTAPLARAFPPAVPQDAPAAGAARELLALPKAGGKPFCA

SEQ ID NO: 15182 - protein, 483 aa, Homo sapiens
MSYPQGYLYQPSASLALYSCPAYSTSVISGPRTDELGRSSSGSAFSPYAGSTAFTAPSPGYNSHLQYGADPAAAAAAAFSSYVGSPYDHTPGMAGSLGYHPYAAPLGSYPYGDPAYRKNATRDATATLKAWLNEHRKNPYPTKGEKIMLAIITKMTLTQVSTWFANARRRLKKENKMTWTPRNRSEDEEEEENIDLEKNDEDEPQKPEDKGDPEGPEAGGAEQKAASGCERLQGPPTPAGKETEGSLSDSDFKEPPSEGRLDALQGPPRTGGPSPAGPAAARLAEDPAPHYPAGAPAPGPHPAAGEVPPGPGGPSVIHSPPPPPPPAVLAKPKLWSLAEIATSSDKVKDGGGGNEGSPCPPCPGPIAGQALGGSRASPAPAPSRSPSAQCPFPGGTVLSRPLYYTAPFYPGYTNYGSFGHLHGHPGPGPGPTTGPGSHFNGLNQTVLNRADALAKDPKMLRSQSQLDLCKDSPYELKKGMSDI

SEQ ID NO: 15183 - protein, 446 aa, Homo sapiens
MSFPHFGHPYRGASQFLASASSSTTCCESTQRSVSDVASGSTPAPALCCAPYDSRLLGSARPELGAALGIYGAPYAAAAAAQSYPGYLPYSPEPPSLYGALNPQYEFKEAAGSFTSSLAQPGAYYPYERTLGQYQYERYGAVELSGAGRRKNATRETTSTLKAWLNEHRKNPYPTKGEKIMLAIITKMTLTQVSTWFANARRRLKKENKMTWAPKNKGGEERKAEGGEEDSLGCLTADTKEVTASQEARGLRLSDLEDLEEEEEEEEEAEDEEVVATAGDRLTEFRKGAQSLPGPCAAAREGRLERRECGLAAPRFSFNDPSGSEEADFLSAETGSPRLTMHYPCLEKPRIWSLAHTATASAVEGAPPARPRPRSPECRMIPGQPPASARRLSVPRDSACDESSCIPKAFGNPKFALQGLPLNCAPCPRRSEPVVQCQYPSGAEAG

SEQ ID NO: 15184 - protein, 349 aa, Homo sapiens
MGDMGDPPKKKRLISLCVGCGNQIHDQYILRVSPDLEWHAACLKCAECNQYLDESCTCFVRDGKTYCKRDYIRLYGIKCAKCSIGFSKNDFVMRARSKVYHIECFRCVACSRQLIPGDEFALREDGLFCRADHDVVERASLGAGDPLSPLHPARPLQMAAEPISARQPALRPHVHKQPEKTTRVRTVLNEKQLHTLRTCYAANPRPDALMKEQLVEMTGLSPRVIRVWFQNKRCKDKKRSIMMKQLQQQQPNDKTNIQGMTGTPMVAASPERHDGGLQANPVEVQSYQPPWKVLSDFALQSDIDQPAFQQLVNFSEGGPGSNSTGSEVASMSSQLPDTPNSMVASPIEA

SEQ ID NO: 15185 - protein, 359 aa, Homo sapiens
MVDIIFHYPFLGAMGDHSKKKPGTAMCVGCGSQIHDQFILRVSPDLEWHAACLKCAECSQYLDETCTCFVRDGKTYCKRDYVRLFGIKCAKCQVGFSSSDLVMRARDSVYHIECFRCSVCSRQLLPGDEFSLREHELLCRADHGLLLERAAAGSPRSPGPLPGARGLHLPDAGSGRQPALRPHVHKQTEKTTRVRTVLNEKQLHTLRTCYAANPRPDALMKEQLVEMTGLSPRVIRVWFQNKRCKDKKKSILMKQLQQQQHSDKTSLQGLTGTPLVAGSPIRHENAVQGSAVEVQTYQPPWKALSEFALQSDLDQPAFQQLVSFSESGSLGNSSGSDVTSLSSQLPDTPNSMVPSPVET

SEQ ID NO: 15186 - protein, 245 aa, Homo sapiens
MCAEVGPALCRGMERNSLGCCEAPKKLSLSFSIEAILKRPARRSDMDRPEGPGEEGPGEAAASGSGLEKPPKDQPQEGRKSKRRVRTTFTTEQLHELEKIFHFTHYPDVHIRSQLAARINLPEARVQIWFQNQRAKWRKQEKIGNLGAPQQLSEASVALPTNLDVAGPTWTSTALRRLAPPTSCCPSAQDQLASAWFPAWITLLPAHPWETQPVPGLPIHQTCIPVLCILPPPHPKWGSICATST

SEQ ID NO: 15187 - protein, 1246 aa, Homo sapiens [sequence omitted]

SEQ ID NO: 15188 - protein, 243 aa, Homo sapiens
MTGIAAASFFSNTCRFGGCGLHFPTLADLIEHIEDNHIDTDPRVLEKQELQQPTYVALSYINRFMTDAARREQESLKKKIQPKLSLTLSSSVSRGNVSTPPRHSSGSLTPPVTPPITPSSSFRSSTPTGSEYDEEEVDYEESDSDESWTTESAISSEAILSSMCMNGGEEKPFACPVPGCKKRYKNVNGIKYHAKNGHRTQIRVRKPFKCRCGKSYKTAQGLRHHTINFHPPVSAEIIRKMQQ

SEQ ID NO: 15189 - protein, 163 aa, Homo sapiens
MMPGQIPDPSVTTGSLPGLGPLTGLPSSALTVEELKYADIRNLGAMIAPLHFLEVKLGKRPQPVKSELDEEEERRKRRREKNKVAAARCRNKKKERTEFLQRESERLELMNAELKTQIEELKQERQQLILMLNRHRPTCIVRTDSVKTPESEGNPLLEQLEKK

SEQ ID NO: 15190 - protein, 331 aa, Homo sapiens
MTAKMETTFYDDALNASFLPSESGPYGYSNPKILKQSMTLNLADPVGSLKPHLRAKNSDLLTSPDVGLLKLASPELERLIIQSSNGHITTTPTPTQFLCPKNVTDEQEGFAEGFVRALAELHSQNTLPSVTSAAQPVNGAGMVAPAVASVAGGSGSGGFSASLHSEPPVYANLSNFNPGALSSGGGAPSYGAAGLAFPAQPQQQQQPPHHLPQQMPVQHPRLQALKEEPQTVPEMPGETPPLSPIDMESQERIKAERKRMRNRIAASKCRKRKLERIARLEEKVKTLKAQNSELASTANMLREQVAQLKQKVMNHVNSGCQLMLTQQLQTF

SEQ ID NO: 15191 - protein, 347 aa, Homo sapiens
MCTKMEQPFYHDDSYTATGYGRAPGGLSLHDYKLLKPSLAVNLADPYRSLKAPGARGPGPEGGGGGSYFSGQGSDTGASLKLASSELERLIVPNSNGVITTTPTPPGQYFYPRGGGSGGGAGGAGGGVTEEQEGFADGFVKALDDLHKMNHVTPPNVSLGATGGPPAGPGGVYAGPEPPPVYTNLSSYSPASASSGGAGAAVGTGSSYPTTTISYLPHAPPFAGGHPAQLGLGRGASTFKEEPQTVPEARSRDATPPVSPINMEDQERIKVERKRLRNRLAATKCRKRKLERIARLEDKVKTLKAENAGLSSTAGLLREQVAQLKQKVMTHVSNGCQLLLGVKGHAF

SEQ ID NO: 15192 - protein, 347 aa, Homo sapiens
METPFYGDEALSGLGGGASGSGGSFASPGRLFPGAPPTAAAGSMMKKDALTLSLSEQVAAALKPAAAPPPTPLRADGAPSAAPPDGLLASPDLGLLKLASPELERLIIQSNGLVTTTPTSSQFLYPKVAASEEQEFAEGFVKALEDLHKQNQLGAGAAAAAAAAAAGGPSGTATGSAPPGELAPAAAAPEAPVYANLSSYAGGAGGAGGAATVAFAAEPVPFPPPPPPGALGPPRLAALKDEPQTVPDVPSFGESPPLSPIDMDTQERIKAERKRLRNRIAASKCRKRKLERISRLEEKVKTLKSQNTELASTASLLREQVAQLKQKVLSHVNSGCQLLPQHQVPAY

SEQ ID NO: 15193 - protein, 513 aa, Homo sapiens
MAEVGEIIEGCRLPVLRRNQDNEDEWPLAEILSVKDISGRKLFYVHYIDFNKRLDEWVTHERLDLKKIQFPKKEAKTPTKNGLPGSRPGSPEREVPASAQASGKTLPIPVQITLRFNLPKEREAIPGGEPDQPLSSSSCLQPNHRSTKRKVEVVSPATPVPSETAPASVFPQNGAARRAVAAQPGRKRKSNCLGTDEDSQDSSDGIPSAPRMTGSLVSDRSHDDIVTRMKNIECIELGRHRLKPWYFSPYPQELTTLPVLYLCEFCLKYGRSLKCLQRHLTKCDLRHPPGNEIYRKGTISFFEIDGRKNKSYSQNLCLLAKCFLDHKTLYYDTDPFLFYVMTEYDCKGFHIVGYFSKEKESTEDYNVACILTLPPYQRRGYGKLLIEFSYELSKVEGKTGTPEKPLSDLGLLSYRSYWSQTILEILMGLKSESGERPQITINEISEITSIKKEDVISTLQYLNLINYYKGQYILTLSEDIVDGHERAMLKRLLRIDSKCLHFTPKDWSKRGKW

SEQ ID NO: 15194 - protein, 2004 aa, Homo sapiens
MVKLANPLYTEWILEAIKKVKKQKQRPSEERICNAVSSSHGLDRKTVLEQLELSVKDGTILKVSNKGLNSYKDPDNPGRIALPKPRNHGKLDNKQNVDWNKLIKRAVEGLAESGGSTLKSIERFLKGQKDVSALFGGSAASGFHQQLRLAIKRAIGHGRLLKDGPLYRLNTKATNVDGKESCESLSCLPPVSLLPHEKDKPVAEPIPICSFCLGTKEQNREKKPEELISCADCGNSGHPSCLKFSPELTVRVKALRWQCIECKTCSSCRDQGKNADNMLFCDSCDRGFHMECCDPPLTRMPKGMWICQICRPRKKGRKLLQKKAAQIKRRYTNPIGRPKNRLKKQNTVSKGPFSKVRTGPGRGRKRKITLSSQSASSSSEEGYLERIDGLDFCRDSNVSLKFNKKTKGLIDGLTKFFTPSPDGRKARGEVVDYSEQYRIRKRGNRKSSTSDWPTDNQDGWDGKQENEERLFGSQEIMTEKDMELFRDIQEQALQKVGVTGPPDPQVRCPSVIEFGKYEIHTWYSSPYPQEYSRLPKLYLCEFCLKYMKSRTILQQHMKKCGWFHPPANEIYRKNNISVFEVDGNVSTIYCQNLCLLAKLFLDHKTLYYDVEPFLFYVLTQNDVKGCHLVGYFSKEKHCQQKYNVSCIMILPQYQRKGYGRFLIDFSYLLSKREGQAGSPEKPLSDLGRLSYMAYWKSVILECLYHQNDKQISIKKLSKLTGICPQDITSTLHHLRMLDFRSDQFVIIRREKLIQDHMAKLQLNLRPVDVDPECLRWTPVIVSNSVVSEEEEEEAEEGENEEPQCQERELEISVGKSVSHENKEQDSYSVESEKKPEVMAPVSSTRLSKQVLPHDSLPANSQPSRRGRWGRKNRKTQERFGDKDSKLLLEETSSAPQEQYGECGEKSEATQEQYTESEEQLVASEEQPSQDGKPDLPKRRLSEGVEPWRGQLKKSPEALKCRLTEGSERLPRRYSEGDRAVLRGFSESSEEEEEPESPRSSSPPILTKPTLKRKKPFLHRRRRVRKRKHHNSSVVTETISETTEVLDEPFEDSDSERPMPRLEPTFEIDEEEEEEDENELFPREYFRRLSSQDVLRCQSSSKRKSKDEEEDEESDDADDTPILKPVSLLRKRDVKNSPLEPDTSTPLKKKKGWPKGKSRKPIHWKKRPGRKPGFKLSREIMPVSTQACVIEPIVSIPKAGRKPKIQESEETVEPKEDMPLPEERKEEEEMQAEAEEAEEGEEEDAASSEVPAASPADSSNSPETETKEPEVEEEEEKPRVSEEQRQSEEEQQELEEPEPEEEEDAAAETAQNDDHDADDEDDGHLESTKKKELEEQPTREDVKEEPGVQESFLDANMQKSREKIKDKEETELDSEEEQPSHDTSVVSEQMAGSEDDHEEDSHTKEELIELKEEEEIPHSELDLETVQAVQSLTQEESSEHEGAYQDCEETLAACQTLQSYTQADEDPQMSMVEDCHASEHNSPISSVQSHPSQSVRSVSSPNVPALESGYTQISPEQGSLSAPSMQNMETSPMMDVPSVSDHSQQVVDSGFSDLGSIESTTENYENPSSYDSTMGGSICGNSSSQSSCSYGGLSSSSSLTQSSCVVTQQMASMGSSCSMMQQSSVQPAANCSIKSPQSCVVERPPSNQQQQPPPPPPQQPQPPPPQPQPAPQPPPPQQQPQQQPQPQPQQPPPPPPPQQQPPLSQCSMNNSFTPAPMIMEIPESGSTGNISIYERIPGDFGAGSYSQPSATFSLAKLQQLTNTIMDPHAMPYSHSPAVTSYATSVSLSNTGLAQLAPSHPLAGTPQAQATMTPPPNLASTTMNLTSPLLQCNMSATNIGIPHTQRLQGQMPVKGHISIRSKSAPLPSAAAHQQQLYGRSPSAVAMQAGPRALAVQRGMNMGVNLMPTPAYNVNSMNMNTLNAMNSYRMTQPMMNSSYHSNPAYMNQTAQYPMQMQMGMMGSQAYTQQPMQPNPHGNMMYTGPSHHSYMNAAGVPKQSLNGPYMRR

SEQ ID NO: 15195 - protein, 2073 aa, Homo sapiens
MVKLANPLYTEWILEAIQKIKKQKQRPSEERICHAVSTSHGLDKKTVSEQLELSVQDGSVLKVTNKGLASYKDPDNPGRFSSVKPGTFPKSAKGSRGSCNDLRNVDWNKLLRRAIEGLEEPNGSSLKNIEKYLRSQSDLTSTTNNPAFQQRLRLGAKRAVNNGRLLKDGPQYRVNYGSLDGKGAPQYPSAFPSSLPPVSLLPHEKDQPRADPIPICSFCLGTKESNREKKPEELLSCADCGSSGHPSCLKFCPELTTNVKALRWQCIECKTCSACRVQGRNADNMLFCDSCDRGFHMECCDPPLSRMPKGMWICQVCRPKKKGRKLLHEKAAQIKRRYAKPIGRPKNKLKQRLLSVTSDEGSMNAFTGRGSPGRGQKTKVCTTPSSGHAASGKDSSSRLAVTDPTRPGATTKITTTSTYISASTLKVNKKTKGLIDGLTKFFTPSPDGRRSRGEIIDFSKHYRPRKKVSQKQSCTSHVLATGTTQKLKPPPSSLPPPTPISGQSPSSQKSSTATSSPSPQSSSSQCSVPSLSSLTTNSQLKALFDGLSHIYTTQGQSRKKGHPSYAPPKRMRRKTELSSTAKSKAHFFGKRDIRSRFISHSSSSSWGMARGSIFKAIAHFKRTTFLKKHRMLGRLKYKVTPQMGTPSPGKGSLTDGRIKPDQDDDTEIKINIKQESADVNVIGNKDVVTEEDLDVFKQAQELSWEKIECESGVEDCGRYPSVIEFGKYEIQTWYSSPYPQEYARLPKLYLCEFCLKYMKSKNILLRHSKKCGWFHPPANEIYRRKDLSVFEVDGNMSKIYCQNLCLLAKLFLDHKTLYYDVEPFLFYVLTKNDEKGCHLVGYFSKEKLCQQKYNVSCIMIMPQHQRQGFGRFLIDFSYLLSRREGQAGSPEKPLSDLGRLSYLAYWKSVILEYLYHHHERHISIKAISRATGMCPHDIATTLQHLHMIDKRDGRFVIIRREKLILSHMEKLKTCSRANELDPDSLRWTPILISNAAVSEEEREAEKEAERLMEQASCWEKEEQEILSTRANSRQSPAKVQSKNKYLHSPESRPVTGERGQLLELSKESSEEEEEEEDEEEEEEEEEEEEDEEEEEEEEEEEEEENIQSSPPRLTKPQSVAIKRKRPFVLKKKRGRKRRRINSSVTTETISETTEVLNEPFDNSDEERPMPQLEPTCEIEVEEDGRKPVLRKAFQHQPGKKRQTEEEEGKDNHCFKNADPCRNNMNDDSSNLKEGSKDNPEPLKCKQVWPKGTKRGLSKWRQNKERKTGFKLNLYTPPETPMEPDEQVTVEEQKETSEGKTSPSPIRIEEEVKETGEALLPQEENRREETCAPVSPNTSPGEKPEDDLIKPEEEEEEEEEEEEEEEEEEGEEEEGGGNVEKDPDGAKSQEKEEPEISTEKEDSARLDDHEEEEEEDEEPSHNEDHDADDEDDSHMESAEVEKEELPRESFKEVLENQETFLDLNVQPGHSNPEVLMDCGVDLTASCNSEPKELAGDPEAVPESDEEPPPGEQAQKQDQKNSKEVDTEFKEGNPATMEIDSETVQAVQSLTQESSEQDDTFQDCAETQEACRSLQNYTRADQSPQIATTLDDCQQSDHSSPVSSVHSHPGQSVRSVNSPSVPALENSYAQISPDQSAISVPSLQNMETSPMMDVPSVSDHSQQVVDSGFSDLGSIESTTENYENPSSYDSTMGGSICGNGSSQNSCSYSNLTSSSLTQSSCAVTQQMSNISGSCSMLQQTSISSPPTCSVKSPQGCVVERPPSSSQQLAQCSMAANFTPPMQLAEIPETSNANIGLYERMGQSDFGAGHYPQPSATFSLAKLQQLTNTLIDHSLPYSHSAAVTSYANSASLSTPLSNTGLVQLSQSPHSVPGGPQAQATMTPPPNLTPPPMNLPPPLLQRNMAASNIGISHSQRLQTQIASKGHISMRTKSASLSPAAATHQSQIYGRSQTVAMQGPARTLTMQRGMNMSVNLMPAPAYNVNSVNMNMNTLNAMNGYSMSQPMMNSGYHSNHGYMNQTPQYPMQMQMGMMGTQPYAQQPMQTPPHGNMMYTAPGHHGYMNTGMSKQSLNGSYMRR

SEQ ID NO: 15196 - protein, 611 aa, Homo sapiens
MPRRKRNAGSSSDGTEDSDFSTDLEHTDSSESDGTSRRSARVTRSSARLSQSSQDSSPVRNLQSFGTEEPAYSTRRVTRSQQQPTPVTPKKYPLRQTRSSGSETEQVVDFSDRETKNTADHDESPPRTPTGNAPSSESDIDISSPNVSHDESIAKDMSLKDSGSDLSHRPKRRRFHESYNFNMKCPTPGCNSLGHLTGKHERHFSISGCPLYHNLSADECKVRAQSRDKQIEERMLSHRQDDNNRHATRHQAPTERQLRYKEKVAELRKKRNSGLSKEQKEKYMEHRQTYGNTREPLLENLTSEYDLDLFRRAQARASEDLEKLRLQGQITEGSNMIKTIAFGRYELDTWYHSPYPEEYARLGRLYMCEFCLKYMKSQTILRRHMAKCVWKHPPGDEIYRKGSISVFEVDGKKNKIYCQNLCLLAKLFLDHKTLYYDVEPFLFYVMTEADNTGCHLIGYFSKEKNSFLNYNVSCILTMPQYMRQGYGKMLIDFSYLLSKVEEKVGSPERPLSDLGLISYRSYWKEVLLRYLHNFQGKEISIKEISQETAVNPVDIVSTLQALQMLKYWKGKHLVLKRQDLIDEWIAKEAKRSNSNKTMDPSCLKWTPPKGT

SEQ ID NO: 15197 - protein, 458 aa, Homo sapiens
MAAQGAAAAVAAGTSGVAGEGEPGPGENAAAEGTAPSPGRVSPPTPARGEPEVTVEIGETYLCRRPDSTWHSAEVIQSRVNDQEGREEFYVHYVGFNRRLDEWVDKNRLALTKTVKDAVQKNSEKYLSELAEQPERKITRNQKRKHDEINHVQKTYAEMDPTTAALEKEHEAITKVKYVDKIHIGNYEIDAWYFSPFPEDYGKQPKLWLCEYCLKYMKYEKSYRFHLGQCQWRQPPGKEIYRKSNISVYEVDGKDHKIYCQNLCLLAKLFLDHKTLYFDVEPFVFYILTEVDRQGAHIVGYFSKEKESPDGNNVACILTLPPYQRRGYGKFLIAFSYELSKLESTVGSPEKPLSDLGKLSYRSYWSWVLLEILRDFRGTLSIKDLSQMTSITQNDIISTLQSLNMVKYWKGQHVICVTPKLVEEHLKSAQYKKPPITVDSVCLKWAPPKHKQVKLSKK

SEQ ID NO: 15198 - protein, 381 aa, Homo sapiens
MSRHEGVSCDACLKGNFRGRRYKCLICYDYDLCASCYESGATTTRHTTDHPMQCILTRVDFDLYYGGEAFSVEQPQSFTCPYCGKMGYTETSLQEHVTSEHAETSTEVICPICAALPGGDPNHVTDDFAAHLTLEHRAPRDLDESSGVRHVRRMFHPGRGLGGPRARRSNMHFTSSSTGGLSSSQSSYSPSNREAMDPIAELLSQLSGVRRSAGGQLNSSGPSASQLQQLQMQLQLERQHAQAARQQLETARNATRRTNTSSVTTTITQSTATTNIANTESSQQTLQNSQFLLTRLNDPKMSETERQSMESERADRSLFVQELLLSTLVREESSSSDEDDRGEMADFGAMGCVDIMPLDVALENLNLKESNKGNEPPPPPL

SEQ ID NO: 15199 - protein, 256 aa, Homo sapiens; identical to SEQ ID NO: 7382

SEQ ID NO: 15200 - protein, 1162 aa, Homo sapiens
MEPEEERIRYSQRLRGTMRRRYEDDGISDDEIEGKRTFDLEEKLHTNKYNANFVTFMEGKDFNVEYIQRGGLRDPLIFKNSDGLGIKMPDPDFTVNDVKMCVGSRRMVDVMDVNTQKGIEMTMAQWTRYYETPEEEREKLYNVISLEFSHTRLENMVQRPSTVDFIDWVDNMWPRHLKESQTESTNAILEMQYPKVQKYCLMSVRGCYTDFHVDFGGTSVWYHIHQGGKVFWLIPPTAHNLELYENWLLSGKQGDIFLGDRVSDCQRIELKQGYTFVIPSGWIHAVYTPTDTLVFGGNFLHSFNIPMQLKIYNIEDRTRVPNKFRYPFYYEMCWYVLERYVYCITNRSHLTKEFQKESLSMDLELNGLESGNGDEEAVDREPRRLSSRRSVLTSPVANGVNLDYDGLGKTCRSLPSLKKTLAGDSSSDCSRGSHNGQVWDPQCAPRKDRQVHLTHFELEGLRCLVDKLESLPLHKKCVPTGIEDEDALIADVKILLEELANSDPKLALTGVPIVQWPKRDKLKFPTRPKVRVPTIPITKPHTMKPAPRLTPVRPAAASPIVSGARRRRVRCRKCKACVQGECGVCHYCRDMKKFGGPGRMKQSCVLRQCLAPRLPHSVTCSLCGEVDQNEETQDFEKKLMECCICNEIVHPGCLQMDGEGLLNEELPNCWECPKCYQEDSSEKAQKRKMEESDEEAVQAKVLRPLRSCDEPLTPPPHSPTSMLQLIHDPVSPRGMVTRSSPGAGPSDHHSASRDERFKRRQLLRLQATERTMVREKENNPSGKKELSEVEKAKIRGSYLTVTLQRPTKELHGTSIVPKLQAITASSANLRHSPRVLVQHCPARTPQRGDEEGLGGEEEEEEEEEEEDDSAEEGGAARLNGRGSWAQDGDESWMQREVWMSVFRYLSRRELCECMRVCKTWYKWCCDKRLWTKIDLSRCKAIVPQALSGIIKRQPVSLDLSWTNISKKQLTWLVNRLPGLKDLLLAGCSWSAVSALSTSSCPLLRTLDLRWAVGIKDPQIRDLLTPPADKPGQDNRSKLRNMTDFRLAGLDITDATLRLIIRHMPLLSRLDLSHCSHLTDQSSNLLTAVGSSTRYSLTELNMAGCNKLTDQTLIYLRRIANVTLIDLRGCKQITRKACEHFISDLSINSLYCLSDEKLIQKIS

SEQ ID NO: 15201 - protein, 1690 aa, Homo sapiens
MAGVGPGGYAAEFVPPPECPVFEPSWEEFTDPLSFIGRIRPLAEKTGICKIRPPKDWQPPFACEVKSFRFTPRVQRLNELEAMTRVRLDFLDQLAKFWELQGSTLKIPVVERKILDLYALSKIVASKGGFEMVTKEKKWSKVGSRLGYLPGKGTGSLLKSHYERILYPYELFQSGVSLMGVQMPNLDLKEKVEPEVLSTDTQTSPEPGTRMNILPKRTRRVKTQSESGDVSRNTELKKLQIFGAGPKVVGLAMGTKDKEDEVTRRRKVTNRSDAFNMQMRQRKGTLSVNFVDLYVCMFCGRGNNEDKLLLCDGCDDSYHTFCLIPPLPDVPKGDWRCPKCVAEECSKPREAFGFEQAVREYTLQSFGEMADNFKSDYFNMPVHMVPTELVEKEFWRLVSSIEEDVIVEYGADISSKDFGSGFPVKDGRRKILPEEEEYALSGWNLNNMPVLEQSVLAHINVDISGMKVPWLYVGMCFSSFCWHIEDHWSYSINYLHWGEPKTWYGVPSHAAEQLEEVMRELAPELFESQPDLLHQLVTIMNPNVLMEHGVPVYRTNQCAGEFVVTFPRAYHSGFNQGYNFAEAVNFCTADWLPIGRQCVNHYRRLRRHCVFSHEELIFKMAADPECLDVGLAAMVCKELTLMTEEETRLRESVVQMGVLMSEEEVFELVPDDERQCSACRTTCFLSALTCSCNPERLVCLYHPTDLCPCPMQKKCLRYRYPLEDLPSLLYGVKVRAQSYDTWVSRVTEALSANFNHKKDLIELRVMLEDAEDRKYPENDLFRKLRDAVKEAETCASVAQLLLSKKQKHRQSPDSGRTRTKLTVEELKAFVQQLFSLPCVISQARQVKNLLDDVEEFHERAQEAMMDETPDSSKLQMLIDMGSSLYVELPELPRLKQELQQARWLDEVRLTLSDPQQVTLDVMKKLIDSGVGLAPHHAVEKAMAELQELLTVSERWEEKAKVCLQARPRHSVASLESIVNEAKNIPAFLPNVLSLKEALQKAREWTAKVEAIQSGSNYAYLEQLESLSAKGRPIPVRLEALPQVESQVAAARAWRERTGRTFLKKNSSHTLLQVLSPRTDIGVYGSGKNRRKKVKELIEKEKEKDLDLEPLSDLEEGLEETRDTAMVVAVFKEREQKEIEAMHSLRAANLAKMTMVDRIEEVKFCICRKTASGFMLQCELCKDWFHNSCVPLPKSSSQKKGSSWQAKEVKFLCPLCMRSRRPRLETILSLLVSLQKLPVRLPEGEALQCLTERAMSWQDRARQALATDELSSALAKLSVLSQRMVEQAAREKTEKIISAELQKAAANPDLQGHLPSFQQSAFNRVVSSVSSSPRQTMDYDDEETDSDEDIRETYGYDMKDTASVKSSSSLEPNLFCDEEIPIKSEEVVTHMWTAPSFCAEHAYSSASKSCSQGSSTPRKQPRKSPLVPRSLEPPVLELSPGAKAQLEELMMVGDLLEVSLDETQHIWRILQATHPPSEDRFLHIMEDDSMEEKPLKVKGKDSSEKKRKRKLEKVEQLFGEGKQKSKELKKMDKPRKKKLKLGADKSKELNKLAKKLAKEEERKKKKEKAAAAKVELVKESTEKKREKKVLDIPSKYDWSGAEESDDENAVCAAQNCQRPCKDKVDWVQCDGGCDEWFHQVCVGVSPEMAENEDYICINCAKKQGPVSPGPAPPPSFIMSYKLPMEDLKETS

SEQ ID NO: 15202 - protein, 1544 aa, Homo sapiens
MEAATTLHPGPRPALPLGGPGPLGEFLPPPECPVFEPSWEEFADPFAFIHKIRPIAEQTGICKVRPPPDWQPPFACDVDKLHFTPRIQRLNELEAQTRVKLNFLDQIAKYWELQGSTLKIPHVERKILDLFQLNKLVAEEGGFAVVCKDRKWTKIATKMGFAPGKAVGSHIRGHYERILNPYNLFLSGDSLRCLQKPNLTTDTKDKEYKPHDIPQRQSVQPSETCPPARRAKRMRAEAMNIKIEPEETTEARTHNLRRRMGCPTPKCENEKEMKSSIKQEPIERKDYIVENEKEKPKSRSKKATNAVDLYVCLLCGSGNDEDRLLLCDGCDDSYHTFCLIPPLHDVPKGDWRCPKCLAQECSKPQEAFGFEQAARDYTLRTFGEMADAFKSDYFNMPVHMVPTELVEKEFWRLVSTIEEDVTVEYGADIASKEFGSGFPVRDGKIKLSPEEEEYLDSGWNLNNMPVMEQSVLAHITADICGMKLPWLYVGMCFSSFCWHIEDHWSYSINYLHWGEPKTWYGVPGYAAEQLENVMKKLAPELFVSQPDLLHQLVTIMNPNTLMTHEVPVYRTNQCAGEFVITFPRAYHSGFNQGFNFAEAVNFCTVDWLPLGRQCVEHYRLLHRYCVFSHDEMICKMASKADVLDVVVASTVQKDMAIMIEDEKALRETVRKLGVIDSERMDFELLPDDERQCVKCKTTCFMSAISCSCKPGLLVCLHHVKELCSCPPYKYKLRYRYTLDDLYPMMNALKLRAESYNEWALNVNEALEAKINKKKSLVSFKALIEESEMKKFPDNDLLRHLRLVTQDAEKCASVAQQLLNGKRQTRYRSGGGKSQNQLTVNELRQFVTQLYALPCVLSQTPLLKDLLNRVEDFQQHSQKLLSEETPSAAELQDLLDVSFEFDVELPQLAEMRIRLEQARWLEEVQQACLDPSSLTLDDMRRLIDLGVGLAPYSAVEKAMARLQELLTVSEHWDDKAKSLLKARPRHSLNSLATAVKEIEEIPAYLPNGAALKDSVQRARDWLQDVEGLQAGGRVPVLDTLIELVTRGRSIPVHLNSLPRLETLVAEVQAWKECAVNTFLTENSPYSLLEVLCPRCDIGLLGLKRKQRKLKEPLPNGKKKSTKLESLSDLERALTESKETASAMATLGEARLREMEALQSLRLANEGKLLSPLQDVDIKICLCQKAPAAPMIQCELCRDAFHTSCVAVPSISQGLRIWLCPHCRRSEKPPLEKILPLLASLQRIRVRLPEGDALRYMIERTVNWQHRAQQLLSSGNLKFVQDRVGSGLLYSRWQASAGQVSDTNKVSQPPGTTSFSLPDDWDNRTSYLHSPFSTGRSCIPLHGVSPEVNELLMEAQLLQVSLPEIQELYQTLLAKPSPAQQTDRSSPVRPSSEKNDCCRGKRDGINSLERKLKRRLEREGLSSERWERVKKMRTPKKKKIKLSHPKDMNNFKLERERSYELVRSAETHSLPSDTSYSEQEDSEDEDAICPAVSCLQPEGDEVDWVQCDGSCNQWFHQVCVGVSPEMAEKEDYICVRCTVKDAPSRK

SEQ ID NO: 15203 - protein, 1560 aa, Homo sapiens
MEPGSDDFLPPPECPVFEPSWAEFRDPLGYIAKIRPIAEKSGICKIRPPADWQPPFAVEVDNFRFTPRIQRLNELEAQTRVKLNYLDQIAKFWEIQGSSLKIPNVERRILDLYSLSKIVVEEGGYEAICKDRRWARVAQRLNYPPGKNIGSLLRSHYERIVYPYEMYQSGANLVQCNTRPFDNEEKDKEYKPHSIPLRQSVQPSKFNSYGRRAKRLQPDPEPTEEDIEKNPELKKLQIYGAGPKMMGLGLMAKDKTLRKKDKEGPECPPTVVVKEELGGDVKVESTSPKTFLESKEELSHSPEPCTKMTMRLRRNHSNAQFIESYVCRMCSRGDEDDKLLLCDGCDDNYHIFCLLPPLPEIPKGVWRCPKCVMAECKRPPEAFGFEQATREYTLQSFGEMADSFKADYFNMPVHMVPTELVEKEFWRLVNSIEEDVTVEYGADIHSKEFGSGFPVSDSKRHLTPEEEEYATSGWNLNVMPVLEQSVLCHINADISGMKVPWLYVGMVFSAFCWHIEDHWSYSINYLHWGEPKTWYGVPSLAAEHLEEVMKKLTPELFDSQPDLLHQLVTLMNPNTLMSHGVPVVRTNQCAGEFVITFPRAYHSGFNQGYNFAEAVNFCTADWLPAGRQCIEHYRRLRRYCVFSHEELICKMAACPEKLDLNLAAAVHKEMFIMVQEERRLRKALLEKGITEAEREAFELLPDDERQCIKCKTTCFLSALACYDCPDGLVCLSHINDLCKCSSSRQYLRYRYTLDELPAMLHKLKVRAESFDTWANKVRVALEVEDGRKRSLEELRALESEARERRFPNSELLQQLKNCLSEAEACVSRALGLVSGQEAGPHRVAGLQMTLTELRAFLDQMNNLPCAMHQIGDVKGVLEQVEAYQAEAREALASLPSSPGLLQSLLERGRQLGVEVPEAQQLQRQVEQARWLDEVKRTLAPSARRGTLAVMRGLLVAGASVAPSPAVDKAQAELQELLTIAERWEEKAHLCLEARQKHPPATLEAIIREAENIPVHLPNIQALKEALAKARAWIADVDEIQNGDHYPCLDDLEGLVAVGRDLPVGLEELRQLELQVLTAHSWREKASKTFLKKNSCYTLLEVLCPCADAGSDSTKRSRWMEKELGLYKSDTELLGLSAQDLRDPGSVIVAFKEGEQKEKEGILQLRRTNSAKPSPLASSSTASSTTSICVCGQVLAGAGALQCDLCQDWFHGRCVSVPRLLSSPRPNPTSSPLLAWWEWDTKFLCPLCMRSRRPRLETILALLVALQRLPVRLPEGEALQCLTERAISWQGRARQALASEDVTALLGRLAELRQRLQAEPRPEEPPNYPAAPASDPLREGSGKDMPKVQGLLENGDSVTSPEKVAPEEGSGKRDLELLSSLLPQLTGPVLELPEATRAPLEELMMEGDLLEVTLDENHSIWQLLQAGQPPDLERIRTLLELEKAERHGSRARGRALERRRRRKVDRGGEGDDPAREELEPKRVRSSGPEAEEVQEEEELEEETGGEGPPAPIPTTGSPSTQENQNGLEPAEGTTSGPSAPFSTLTPRLHLPCPQQPPQQQL

SEQ ID NO: 15204 - protein, 1539 aa, Homo sapiens
MEPGCDEFLPPPECPVFEPSWAEFQDPLGYIAKIRPIAEKSGICKIRPPADWQPPFAVEVDNFRFTPRVQRLNELEAQTRVKLNYLDQIAKFWEIQGSSLKIPNVERKILDLYSLSKIVIEEGGYEAICKDRRWARVAQRLHYPPGKNIGSLLRSHYERIIYPYEMFQSGANHVQCNTHPFDNEVKDKEYKPHSIPLRQSVQPSKFSSYSRRAKRLQPDPEPTEEDIEKHPELKKLQIYGPGPKMMGLGLMAKDKDKTVHKKVTCPPTVTVKDEQSGGGNVSSTLLKQHLSLEPCTKTTMQLRKNHSSAQFIDSYICQVCSRGDEDDKLLFCDGCDDNYHIFCLLPPLPEIPRGIWRCPKCILAECKQPPEAFGFEQATQEYSLQSFGEMADSFKSDYFNMPVHMVPTELVEKEFWRLVSSIEEDVTVEYGADIHSKEFGSGFPVSNSKQNLSPEEKEYATSGWNLNVMPVLDQSVLCHINADISGMKVPWLYVGMVFSAFCWHIEDHWSYSINYLHWGEPKTWYGVPSLAAEHLEEVMKMLTPELFDSQPDLLHQLVTLMNPNTLMSHGVPVVRTNQCAGEFVITFPRAYHSGFNQGYNFAEAVNFCTADWLPAGRQCIEHYRRLRRYCVFSHEELICKMAAFPETLDLNLAVAVHKEMFIMVQEERRLRKALLEKGVTEAEREAFELLPDDERQCIKCKTTCFLSALACYDCPDGLVCLSHINDLCKCSSSRQYLRYRYTLDELPTMLHKLKIRAESFDTWANKVRVALEVEDGRKRSFEELRALESEARERRFPNSELLQRLKNCLSEVEACIAQVLGLVSGQVARMDTPQLTLTELRVLLEQMGSLPCAMHQIGDVKDVLEQVEAYQAEAREALATLPSSPGLLRSLLERGQQLGVEVPEAHQLQQQVEQAQWLDEVKQALAPSAHRGSLVIMQGLLVMGAKIASSPSVDKARAELQELLTIAERWEEKAHFCLEARQKHPPATLEAIIRETENIPVHLPNIQALKEALTKAQAWIADVDEIQNGDHYPCLDDLEGLVAVGRDLPVGLEELRQLELQVLTAHSWREKASKTFLKKNSCYTLLEVLCPCADAGSDSTKRSRWMEKALGLYQCDTELLGLSAQDLRDPGSVIVAFKEGEQKEKEGILQLRRTNSAKPSPLAPSLMASSPTSICVCGQVPAGVGVLQCDLCQDWFHGQCVSVPHLLTSPKPSLTSSPLLAWWEWDTKFLCPLCMRSRRPRLETILALLVALQRLPVRLPEGEALQCLTERAIGWQDRARKALASEDVTALLRQLAELRQQLQAKPRPEEASVYTSATACDPIREGSGNNISKVQGLLENGDSVTSPENMAPGKGSDLELLSSLLPQLTGPVLELPEAIRAPLEELMMEGDLLEVTLDENHSIWQLLQAGQPPDLDRIRTLLELEKFEHQGSRTRSRALERRRRRQKVDQGRNVENLVQQELQSKRARSSGIMSQVGREEEHYQEKADRENMFLTPSTDHSPFLKGNQNSLQHKDSGSSAACPSLMPLLQLSYSDEQQL

SEQ ID NO: 15205 - protein, 711 aa, Homo sapiens
MSDYSTGGPPPGPPPPAGGGGGAGGAGGGPPPGPPGAGDRGGGGPGGGGPGGGSAGGPSQPPGGGGPGIRKDAFADAVQRARQIAAKIGGDAATTVNNSTPDFGFGGQKRQLEDGDQPESKKLASQGDSISSQLGPIHPPPRTSMTEEYRVPDGMVGLIIGRGGEQINKIQQDSGCKVQISPDSGGLPERSVSLTGAPESVQKAKMMLDDIVSRGRGGPPGQFHDNANGGQNGTVQEIMIPAGKAGLVIGKGGETIKQLQERAGVKMILIQDGSQNTNVDKPLRIIGDPYKVQQACEMVMDILRERDQGGFGDRNEYGSRIGGGIDVPVPRHSVGVVIGRSGEMIKKIQNDAGVRIQFKQDDGTGPEKIAHIMGPPDRCEHAARIINDLLQSLRSGPPGPPGGPGMPPGGRGRGRGQGNWGPPGGEMTFSIPTHKCGLVIGRGGENVKAINQQTGAFVEISRQLPPNGDPNFKLFIIRGSPQQIDHAKQLIEEKIEGPLCPVGPGPGGPGPAGPMGPFNPGPFNQGPPGAPPHAGGPPPHQYPPQGWGNTYPQWQPPAPHDPSKAAAAAADPNAAWAAYYSHYYQQPPGPVPGPAPAPAAPPAQGEPPQPPPTGQSDYTKAWEEYYKKIGQQPQQPGAPPQQDYTKAWEEYYKKQAQVATGGGPGAPPGSQPDYSAAWAEYYRQQAAYYGQTPGPGGPQPPPTQQGQQQAQ

SEQ ID NO: 15206 - protein, 1950 aa, Homo sapiens
MPGARRRRRGAAMEGKPRAGVALAPGPSGRRPSARCARRRRPGLLLPGLWLLLLARPASCAPDELSPEQHNLSLYSMELVLKKSTGHSAAQVALTETAPGSQHSSPLHVTAPPSATTFDTAFFNQGKQTKSTADPSIFVATYVSVTSKEVAVNDDEMDNFLPDTHWTTPRMVSPIQYITVSPPGLPREALEPMLTPSLPMVSLQDEEVTSGWQNTTRQPAAYAESASHFHTFRSAFRTSEGIVPTPGRNLVLYPTDAYSHLSSRTLPEIVASLTEGVETTLFLSSRSLMPQPLGDGITIPLPSLGEVSQPPEEVWATSADRYTDVTTVLSQSLEETISPRTYPTVTASHAALAFSRTHSPLLSTPLAFASSASPTDVSSNPFLPSDSSKTSELHSNSALPGPVDNTHILSPVSSFRPYTWCAACTVPSPQQVLATSLMEKDVGSGDGAETLCMTVLEESSISLMSSVVADFSEFEEDPQVFNTLFPSRPIVPLSSRSMEISETSVGISAEVDMSSVTTTQVPPAHGRLSVPASLDPTAGSLSVAETQVTPSSVTTAFFSVITSILLDSSFSVIANKNTPSLAVRDPSVFTPYSLVPSVESSLFSDQERSSFSEHKPRGALDFASSFFSTPPLELSGSISSPSEAPASLSLMPSDLSPFTSQSFSPLVETFTLFDSSDLQSSQLSLPSSTNLEFSQLQPSSELPLNTIMLLPSRSEVSPWSSFPSDSLEFVEASTVSLTDSEAHFTSAFIETTSYLESSLISHESAVTALVPPGSESFDILTAGIQATSPLTTVHTTPILTESSLFSTLTPPDDQISALDGHVSVLASFSKAIPTGTVLITDAYLPSGSSFVSEATPFPLPTELTVVGPSLTPTEVPLNTSTEVSTTSTGAATGGPLDSTLMGDAASQSPPESSAAPPLPSLRPVTAFTLEATVDTPTLATAKPPYVCDITVPDAYLITTVLARRAVQEYIITAIKEVLRIHFNRAVELKVYELFTDFTFLVTSGPFVYTAISVINVLINSKLVRDQTPLILSVKPSFLVPESRFQVQTVLQFVPPSVDTGFCNFTQRIEKGLMTALFEVRKHHQGTYNLTVQILNITISSSRVTPRRGPVNIIFAVKSTQGFLNGSEVSELLRNLSVVEFSFYLGYPVLQIAEPFQYPQLNLSQLLKSSWVRTVLLGVMEKQLQNEVFQAEMERKLAQLLSEVSTRRRMWRRATVAAGNSVVQVVNVSRLEGDDNPVQLIYFVEDQDGERLSAVKSSDLINKMDLQRAAIILGYRIQGVIAQPVDRVKRPSPESQSNNLWVIVGVVIPVLVVMVIVVILYWKLCRTDKLDFQPDTVANIQQRQKLQIPSVKGFDFAKQHLGQHNKDDILIIHEPAPLPGPLKDHTTPSENGDVPSPKSKIPSKNVRHRGRVSPSDADSTVSEESSERDAGDKTPGAVNDGRSHRAPQSGPPLPSSGNEQHSSASIFEHVDRISRPPEASRRVPSKIQLIAMQPIPAPPVQRPSPADRVAESNKINKEIQTALRHKSEIEHHRNKIRLRAKRRGHYEFPVVDDLSSGDTKERHRVYRRAQMQIDKILDPTASVPSVFIEPRKSSRIKRSPKPRRKHQVNGCPADAEKDRLITTDSDGTYRRPPGVHNSAYIGCPSDPDLPADVQTPSSVELGRYPALPFPASQYIPPQPSIEEARQTMHSLLDDAFALVAPSSQPASTAGVGPGVPPGLPANSTPSQEERRATQWGSFYSPAQTANNPCSRYEDYGMTPPTGPLPRPGFGPGLLQSTELVPPDPQQPQASAEAPFAARGIYSEEMPSVARPRPVGGTTGSQIQHLTQVGIASRIGAQPVEIPPSRGSQYGGPGWPSYGEDEAGRREATHMLGHQEYSSSPLFQVPRTSGREPSAPSGNLPHRGLQGPGLGYPTSSTEDLQPGHSSASLIKAIREELLRLSQKQSTVQNFHS

SEQ ID NO: 15207 - protein, 362 aa, Homo sapiens
MATAETALPSISTLTALGPFPDTQDDFLKWWRSEEAQDMGPGPPDPTEPPLHVKSEDQPGEEEDDERGADATWDLDLLLTNFSGPEPGGAPQTCALAPSEASGAQYPPPPETLGAYAGGPGLVAGLLGSEDHSGWVRPALRARAPDAFVGPALAPAPAPEPKALALQPVYPGPGAGSSGGYFPRTGLSVPAASGAPYGLLSGYPAMYPAPQYQGHFQLFRGLQGPAPGPATSPSFLSCLGPGTVGTGLGGTAEDPGVIAETAPSKRGRRSWARKRQAAHTCAHPGCGKSYTKSSHLKAHLRTHTGEKPYACTWEGCGWRFARSDELTRHYRKHTGQRPFRCQLCPRAFSRSDHLALHMKRHL

SEQ ID NO: 15208 - protein, 480 aa, Homo sapiens
MLNFGASLQQTAEERMEMISERPKESMYSWNKTAEKSDFEAVEALMSMSCSWKSDFKKYVENRPVTPVSDLSEEENLLPGTPDFHTIPAFCLTPPYSPSDFEPSQVSNLMAPAPSTVHFKSLSDTAKPHIAAPFKEEEKSPVSAPKLPKAQATSVIRHTADAQLCNHQTCPMKAASILNYQNNSFRRRTHLNVEAARKNIPCAAVSPNRSKCERNTVADVDEKASAALYDFSVPSSETVICRSQPAPVSPQQKSVLVSPPAVSAGGVPPMPVICQMVPLPANNPVVTTVVPSTPPSQPPAVCPPVVFMGTQVPKGAVMFVVPQPVVQSSKPPVVSPNGTRLSPIAPAPGFSPSAAKVTPQIDSSRIRSHICSHPGCGKTYFKSSHLKAHTRTHTGEKPFSCSWKGCERRFARSDELSRHRRTHTGEKKFACPMCDRRFMRSDHLTKHARRHLSAKKLPNWQMEVSKLNDIALPPTPAPTQ

SEQ ID NO: 15209 - protein, 512 aa, Homo sapiens
MHTPDFAGPDDARAVDIMDICESILERKRHDSERSTCSILEQTDMEAVEALVCMSSWGQRSQKGDLLRIRPLTPVSDSGDVTTTVHMDAATPELPKDFHSLSTLCITPPQSPDLVEPSTRTPVSPQVTDSKACTATDVLQSSAVVARALSGGAERGLLGLEPVPSSPCRAKGTSVIRHTGESPAACFPTIQTPDCRLSDSREGEEQLLGHFETLQDTHLTDSLLSTNLVSCQPCLHKSGGLLLTDKGQQAGWPGAVQTCSPKNYENDLPRKTTPLISVSVPAPPVLCQMIPVTGQSSMLPAFLKPPPQLSVGTVRPILAQAAPAPQPVFVGPAVPQGAVMLVLPQGALPPPAPCAANVMAAGNTKLLPLAPAPVFITSSQNCVPQVDFSRRRNYVCSFPGCRKTYFKSSHLKAHLRTHTGEKPFNCSWDGCDKKFARSDELSRHRRTHTGEKKFVCPVCDRRFMRSDHLTKHARRHMTTKKIPGWQAEVGKLNRIASAESPGSPLVSMPASA

SEQ ID NO: 15210 - protein, 402 aa, Homo sapiens
MNIHMKRKTIKNINTFENRMLMLDGMPAVRVKTELLESEQGSPNVHNYPDMEAVPLLLNNVKGEPPEDSLSVDHFQTQTEPVDLSINKARTSPTAVSSSPVSMTASASSPSSTSTSSSSSSRLASSPTVITSVSSASSSSTVLTPGPLVASASGVGGQQFLHIIHPVPPSSPMNLQSNKLSHVHRIPVVVQSVPVVYTAVRSPGNVNNTIVVPLLEDGRGHGKAQMDPRGLSPRQSKSDSDDDDLPNVTLDSVNETGSTALSIARAVQEVHPSPVSRVRGNRMNNQKFPCSISPFSIESTRRQRRSESPDSRKRRIHRCDFEGCNKVYTKSSHLKAHRRTHTGEKPYKCTWEGCTWKFARSDELTRHYRKHTGVKPFKCADCDRSFSRSDHLALHRRRHMLV

SEQ ID NO: 15211 - protein, 288 aa, Homo sapiens
MAAAAYVDHFAAECLVSMSSRAVVHGPREGPESRPEGAAVAATPTLPRVEERRDGKDSASLFVVARILADLNQQAPAPAPAERREGAAARKARTPCRLPPPAPEPTSPGAEGAAAAPPSPAWSEPEPEAGLEPEREPGPAGSGEPGLRQRVRRGRSRADLESPQRKHKCHYAGCEKVYGKSSHLKAHLRTHTGERPFACSWQDCNKKFARSDELARHYRTHTGEKKFSCPICEKRFMRSDHLTKHARRHANFHPGMLQRRGGGSRTGSLSDYSRSDASSPTISPASSP

SEQ ID NO: 15212 - protein, 323 aa, Homo sapiens
MSAAVACLDYFAAECLVSMSAGAVVHRRPPDPEGAGGAAGSEVGAAPPESALPGPGPPGPASVPQLPQVPAPSPGAGGAAPHLLAASVWADLRGSSGEGSWENSGEAPRASSGFSDPIPCSVQTPCSELAPASGAAAVCAPESSSDAPAVPSAPAAPGAPAASGGFSGGALGAGPAPAADQAPRRRSVTPAAKRHQCPFPGCTKAYYKSSHLKSHQRTHTGERPFSCDWLDCDKKFTRSDELARHYRTHTGEKRFSCPLCPKQFSRSDHLTKHARRHPTYHPDMIEYRGRRRTPRIDPPLTSEVESSASGSGPGPAPSFTTCL

SEQ ID NO: 15213 - protein, 416 aa, Homo sapiens
MVDHLLPVDENFSSPKCPVGYLGDRLVGRRAYHMLPSPVSEDDSDASSPCSCSSPDSQALCSCYGGGLGTESQDSILDFLLSQATLGSGGGSGSSIGASSGPVAWGPWRRAAAPVKGEHFCLPEFPLGDPDDVPRPFQPTLEEIEEFLEENMEPGVKEVPEGNSKDLDACSQLSAGPHKSHLHPGSSGRERCSPPPGGASAGGAQGPGGGPTPDGPIPVLLQIQPVPVKQESGTGPASPGQAPENVKVAQLLVNIQGQTFALVPQVVPSSNLNLPSKFVRIAPVPIAAKPVGSGPLGPGPAGLLMGQKFPKNPAAELIKMHKCTFPGCSKMYTKSSHLKAHLRRHTGEKPFACTWPGCGWRFSRSDELSRHRRSHSGVKPYQCPVCEKKFARSDHLSKHIKVHRFPRSSRSVRSVN

SEQ ID NO: 15214 - protein, 252 aa, Homo sapiens
MSAAVACVDYFAADVLMAISSGAVVHRGRPGPEGAGPAAGLDVRAARREAASPGTPGPPPPPPAASGPGPGAAAAPHLLAASILADLRGGPGAAPGGASPASSSSAASSPSSGRAPGAAPSAAAKSHRCPFPDCAKAYYKSSHLKSHLRTHTGERPFACDWQGCDKKFARSDELARHHRTHTGEKRFSCPLCSKRFTRSDHLAKHARRHPGFHPDLLRRPGARSTSPSDSLPCSLAGSPAPSPAPSPAPAGL

SEQ ID NO: 15215 - protein, 389 aa, Homo sapiens
MYGRPQAEMEQEAGELSRWQAAHQAAQDNENSAPILNMSSSSGSSGVHTSWNQGLPSIQHFPHSAEMLGSPLVSVEAPGQNVNEGGPQFSMPLPERGMSYCPQATLTPSRMIYCQRMSPPQQEMTIFSGPQLMPVGEPNIPRVARPFGGNLRMPPNGLPVSASTGIPIMSHTGNPPVPYPGLSTVPSDETLLGPTVPSTEAQAVLPSMAQMLPPQDAHDLGMPPAESQSLLVLGSQDSLVSQPDSQEGPFLPEQPGPAPQTVEKNSRPQEGTGRRGSSEARPYCCNYENCGKAYTKRSHLVSHQRKHTGERPYSCNWESCSWSFFRSDELRRHMRVHTRYRPYKCDQCSREFMRSDHLKQHQKTHRPGPSDPQANNNNGEQDSPPAAGP

SEQ ID NO: 15216 - protein, 355 aa, Homo sapiens
MALSEPILPSFSTFASPCRERGLQERWPRAEPESGGTDDDLNSVLDFILSMGLDGLGAEAAPEPPPPPPPPAFYYPEPGAPPPYSAPAGGLVSELLRPELDAPLGPALHGRFLLAPPGRLVKAEPPEADGGGGYGCAPGLTRGPRGLKREGAPGPAASCMRGPGGRPPPPPDTPPLSPDGPARLPAPGPRASFPPPFGGPGFGAPGPGLHYAPPAPPAFGLFDDAAAAAAALGLAPPAARGLLTPPASPLELLEAKPKRGRRSWPRKRTATHTCSYAGCGKTYTKSSHLKAHLRTHTGEKPYHCNWDGCGWKFARSDELTRHYRKHTGHRPFQCHLCDRAFSRSDHLALHMKRHM

SEQ ID NO: 15217 - protein, 345 aa, Homo sapiens
MLMFDPVPVKQEAMDPVSVSYPSNYMESMKPNKYGVIYSTPLPEKFFQTPEGLSHGIQMEPVDLTVNKRSSPPSAGNSPSSLKFPSSHRRASPGLSMPSSSPPIKKYSPPSPGVQPFGVPLSMPPVMAAALSRHGIRSPGILPVIQPVVVQPVPFMYTSHLQQPLMVSLSEEMENSSSSMQVPVIESYEKPISQKKIKIEPGIEPQRTDYYPEEMSPPLMNSVSPPQALLQENHPSVIVQPGKRPLPVESPDTQRKRRIHRCDYDGCNKVYTKSSHLKAHRRTHTGEKPYKCTWEGCTWKFARSDELTRHFRKHTGIKPFQCPDCDRSFSRSDHLALHRKRHMLV

SEQ ID NO: 15218 - protein, 513 aa, Homo sapiens
MRQPPGESDMAVSDALLPSFSTFASGPAGREKTLRQAGAPNNRWREELSHMKRLPPVLPGRPYDLAAATVATDLESGGAGAACGGSNLAPLPRRETEEFNDLLDLDFILSNSLTHPPESVAATVSSSASASSSSSPSSSGPASAPSTCSFTYPIRAGNDPGVAPGGTGGGLLYGRESAPPPTAPFNLADINDVSPSGGFVAELLRPELDPVYIPPQQPQPPGGGLMGKFVLKASLSAPGSEYGSPSVISVSKGSPDGSHPVVVAPYNGGPPRTCPKIKQEAVSSCTHLGAGPPLSNGHRPAAHDFPLGRQLPSRTTPTLGLEEVLSSRDCHPALPLPPGFHPHPGPNYPSFLPDQMQPQVPPLHYQGQSRGFVARAGEPCVCWPHFGTHGMMLTPPSSPLELMPPGSCMPEEPKPKRGRRSWPRKRTATHTCDYAGCGKTYTKSSHLKAHLRTHTGEKPYHCDWDGCGWKFARSDELTRHYRKHTGHRPFQCQKCDRAFSRSDHLALHMKRHF

SEQ ID NO: 15219 - protein, 457 aa, Homo sapiens
MATRVLSMSARLGPVPQPPAPQDEPVFAQLKPVLGAANPARDAALFPGEELKHAHHRPQAQPAPAQAPQPAQPPATGPRLPPEDLVQTRCEMEKYLTPQLPPVPIIPEHKKYRRDSASVVDQFFTDTEGLPYSINMNVFLPDITHLRTGLYKSQRPCVTHIKTEPVAIFSHQSETTAPPPAPTQALPEFTSIFSSHQTAAPEVNNIFIKQELPTPDLHLSVPTQQGHLYQLLNTPDLDMPSSTNQTAAMDTLNVSMSAAMAGLNTHTSAVPQTAVKQFQGMPPCTYTMPSQFLPQQATYFPPSPPSSEPGSPDRQAEMLQNLTPPPSYAATIASKLAIHNPNLPTTLPVNSQNIQPVRYNRRSNPDLEKRRIHYCDYPGCTKVYTKSSHLKAHLRTHTGEKPYKCTWEGCDWRFARSDELTRHYRKHTGAKPFQCGVCNRSFSRSDHLALHMKRHQN

SEQ ID NO: 15220 - protein, 283 aa, Homo sapiens
MDVLPMCSIFQELQIVHETGYFSALPSLEEYWQQTCLELERYLQSEPCYVSASEIKFDSQEDLWTKIILAREKKEESELKISSSPPEDTLISPSFCYNLETNSLNSDVSSESSDSSEELSPTAKFTSDPIGEVLVSSGKLSSSVTSTPPSSPELSREPSQLWGCVPGELPSPGKVRSGTSGKPGDKGNGDASPDGRRRVHRCHFNGCRKVYTKSSHLKAHQRTHTGEKPYRCSWEGCEWRFARSDELTRHFRKHTGAKPFKCSHCDRCFSRSDHLALHMKRHL

SEQ ID NO: 15221 - protein, 302 aa, Homo sapiens
MDVLASYSIFQELQLVHDTGYFSALPSLEETWQQTCLELERYLQTEPRRISETFGEDLDCFLHASPPPCIEESFRRLDPLLLPVEAAICEKSSAVDILLSRDKLLSETCLSLQPASSSLDSYTAVNQAQLNAVTSLTPPSSPELSRHLVKTSQTLSAVDGTVTLKLVAKKAALSSVKVGGVATAAAAVTAAGAVKSGQSDSDQGGLGAEACPENKKRVHRCQFNGCRKVYTKSSHLKAHQRTHTGEKPYKCSWEGCEWRFARSDELTRHYRKHTGAKPFKCNHCDRCFSRSDHLALHMKRHI

SEQ ID NO: 15222 - protein, 359 aa, Homo sapiens
MVDMDKLINNLEVQLNSEGGSMQVFKQVTASVRNRDPPEIEYRSNMTSPTLLDANPMENPALFNDIKIEPPEELLASDFSLPQVEPVDLSFHKPKAPLQPASMLQAPIRPPKPQSSPQTLVVSTSTSDMSTSANIPTVLTPGSVLTSSQSTGSQQILHVIHTIPSVSLPNKMGGLKTIPVVVQSLPMVYTTLPADGGPAAITVPLIGGDGKNAGSVKVDPTSMSPLEIPSDSEESTIESGSSALQSLQGLQQEPAAMAQMQGEESLDLKRRRIHQCDFAGCSKVYTKSSHLKAHRRIHTGEKPYKCTWDGCSWKFARSDELTRHFRKHTGIKPFRCTDCNRSFSRSDHLSLHRRRHDTM

SEQ ID NO: 15223 - protein, 244 aa, Homo sapiens
MSAAAYMDFVAAQCLVSISNRAAVPEHGVAPDAERLRLPEREVTKEHGDPGDTWKDYCTLVTIAKSLLDLNKYRPIQTPSVCSDSLESPDEDMGSDSDVTTESGSSPSHSPEERQDPGSAPSPLSLLHPGVAAKGKHASEKRHKCPYSGCGKVYGKSSHLKAHYRVHTGERPFPCTWPDCLKKFSRSDELTRHYRTHTGEKQFRCPLCEKRFMRSDHLTKHARRHTEFHPSMIKRSKKALANAL

SEQ ID NO: 15224 - protein, 3969 aa, Homo sapiens
MAHSCRWRFPARPGTTGGGGGGGRRGLGGAPRQRVPALLLPPGPPVGGGGPGAPPSPPAVAAAAAAAGSSGAGVPGGAAAASAASSSSASSSSSSSSSASSGPALLRVGPGFDAALQVSAAIGTNLRRFRAVFGESGGGGGSGEDEQFLGFGSDEEVRVRSPTRSPSVKTSPRKPRGRPRSGSDRNSAILSDPSVFSPLNKSETKSGDKIKKKDSKSIEKKRGRPPTFPGVKIKITHGKDISELPKGNKEDSLKKIKRTPSATFQQATKIKKLRAGKLSPLKSKFKTGKLQIGRKGVQIVRRRGRPPSTERIKTPSGLLINSELEKPQKVRKDKEGTPPLTKEDKTVVRQSPRRIKPVRIIPSSKRTDATIAKQLLQRAKKGAQKKIEKEAAQLQGRKVKTQVKNIRQFIMPVVSAISSRIIKTPRRFIEDEDYDPPIKIARLESTPNSRFSAPSCGSSEKSSAASQHSSQMSSDSSRSSSPSVDTSTDSQASEEIQVLPEERSDTPEVHPPLPISQSPENESNDRRSRRYSVSERSFGSRTTKKLSTLQSAPQQQTSSSPPPPLLTPPPPLQPASSISDHTPWLMPPTIPLASPFLPASTAPMQGKRKSILREPTFRWTSLKHSRSEPQYFSSAKYAKEGLIRKPIFDNFRPPPLTPEDVGFASGFSASGTAASARLFSPLHSGTRFDMHKRSPLLRAPRFTPSEAHSRIFESVTLPSNRTSAGTSSSGVSNRKRKRKVFSPIRSEPRSPSHSMRTRSGRLSSSELSPLTPPSSVSSSLSISVSPLATSALNPTFTFPSHSLTQSGESAEKNQRPRKQTSAPAEPFSSSSPTPLFPWFTPGSQTERGRNKDKAPEELSKDRDADKSVEKDKSRERDREREKENKRESRKEKRKKGSEIQSSSALYPVGRVSKEKVVGEDVATSSSAKKATGRKKSSSHDSGTDITSVTLGDTTAVKTKILIKKGRGNLEKTNLDLGPTAPSLEKEKTLCLSTPSSSTVKHSTSSIGSMLAQADKLPMTDKRVASLLKKAKAQLCKIEKSKSLKQTDQPKAQGQESDSSETSVRGPRIKHVCRRAAVALGRKRAVFPDDMPTLSALPWEEREKILSSMGNDDKSSIAGSEDAEPLAPPIKPIKPVTRNKAPQEPPVKKGRRSRRCGQCPGCQVPEDCGVCTNCLDKPKFGGRNIKKQCCKMRKCQNLQWMPSKAYLQKQAKAVKKKEKKSKTSEKKDSKESSVVKNVVDSSQKPTPSAREDPAPKKSSSEPPPRKPVEEKSEEGNVSAPGPESKQATTPASRKSSKQVSQPALVIPPQPPTTGPPRKEVPKTTPSEPKKKQPPPPESGPEQSKQKKVAPRPSIPVKQKPKEKEKPPPVNKQENAGTLNILSTLSNGNSSKQKIPADGVHRIRVDFKEDCEAENVWEMGGLGILTSVPITPRVVCFLCASSGHVEFVYCQVCCEPFHKFCLEENERPLEDQLENWCCRRCKFCHVCGRQHQATKQLLECNKCRNSYHPECLGPNYPTKPTKKKKVWICTKCVRCKSCGSTTPGKGWDAQWSHDFSLCHDCAKLFAKGNFCPLCDKCYDDDDYESKMMQCGKCDRWVHSKCENLSDEMYEILSNLPESVAYTCVNCTERHPAEWRLALEKELQISLKQVLTALLNSRTTSHLLRYRQAAKPPDLNPETEESIPSRSSPEGPDPPVLTEVSKQDDQQPLDLEGVKRKMDQGNYTSVLEFSDDIVKIIQAAINSDGGQPEIKKANSMVKSFFIRQMERVFPWFSVKKSRFWEPNKVSSNSGMLPNAVLPPSLDHNYAQWQEREENSHTEQPPLMKKIIPAPKPKGPGEPDSPTPLHPPTPPILSTDRSREDSPELNPPPGIEDNRQCALCLTYGDDSANDAGRLLYIGQNEWTHVNCALWSAEVFEDDDGSLKNVHMAVIRGKQLRCEFCQKPGATVGCCLTSCTSNYHFMCSRAKNCVFLDDKKVYCQRHRDLIKGEVVPENGFEVFRRVFVDFEGISLRRKFLNGLEPENIHMMIGSMTIDCLGILNDLSDCEDKLFPIGYQCSRVYWSTTDARKRCVYTCKIVECRPPVVEPDINSTVEHDENRTIAHSPTSFTESSSKESQNTAEIISPPSPDRPPHSQTSGSCYYHVISKVPRIRTPSYSPTQRSPGCRPLPSAGSPTPTTHEIVTVGDPLLSSGLRSIGSRRHSTSSLSPQRSKLRIMSPMRTGNTYSRNNVSSVSTTGTATDLESSAKVVDHVLGPLNSSTSLGQNTSTSSNLQRTVVTVGNKNSHLDGSSSSEMKQSSASDLVSKSSSLKGEKTKVLSSKSSEGSAHNVAYPGIPKLAPQVHNTTSRELNVSKIGSFAEPSSVSFSSKEALSFPHLHLRGQRNDRDQHTDSTQSANSSPDEDTEVKTLKLSGMSNRSSIINEHMGSSSRDRRQKGKKSCKETFKEKHSSKSFLEPGQVTTGEEGNLKPEFMDEVLTPEYMGQRPCNNVSSDKIGDKGLSMPGVPKAPPMQVEGSAKELQAPRKRTVKVTLTPLKMENESQSKNALKESSPASPLQIESTSPTEPISASENPGDGPVAQPSPNNTSCQDSQSNNYQNLPVQDRNLMLPDGPKPQEDGSFKRRYPRRSARARSNMFFGLTPLYGVRSYGEEDIPFYSSSTGKKRGKRSAEGQVDGADDLSTSDEDDLYYYNFTRTVISSGGEERLASHNLFREEEQCDLPKISQLDGVDDGTESDTSVTATTRKSSQIPKRNGKENGTENLKIDRPEDAGEKEHVTKSSVGHKNEPKMDNCHSVSRVKTQGQDSLEAQLSSLESSRRVHTSTPSDKNLLDTYNTELLKSDSDNNNSDDCGNILPSDIMDFVLKNTPSMQALGESPESSSSELLNLGEGLGLDSNREKDMGLFEVFSQQLPTTEPVDSSVSSSISAEEQFELPLELPSDLSVLTTRSPTVPSQNPSRLAVISDSGEKRVTITEKSVASSESDPALLSPGVDPTPEGHMTPDHFIQGHMDADHISSPPCGSVEQGHGNNQDLTRNSSTPGLQVPVSPTVPIQNQKYVPNSTDSPGPSQISNAAVQTTPPHLKPATEKLIVVNQNMQPLYVLQTLPNGVTQKIQLTSSVSSTPSVMETNTSVLGPMGGGLTLTTGLNPSLPTSQSLFPSASKGLLPMSHHQHLHSFPAATQSSFPPNISNPPSGLLIGVQPPPDPQLLVSESSQRTDLSTTVATPSSGLKKRPISRLQTRKNKKLAPSSTPSNIAPSDVVSNMTLINFTPSQLPNHPSLLDLGSLNTSSHRTVPNIIKRSKSSIMYFEPAPLLPQSVGGTAATAAGTSTISQDTSHLTSGSVSGLASSSSVLNVVSMQTTTTPTSSASVPGHVTLTNPRLLGTPDIGSISNLLIKASQQSLGIQDQPVALPPSSGMFPQLGTSQTPSTAAITAASSICVLPSTQTTGITAASPSGEADEHYQLQHVNQLLASKTGIHSSQRDLDSASGPQVSNFTQTVDAPNSMGLEQNKALSSAVQASPTSPGGSPSSPSSGQRSASPSVPGPTKPKPKTKRFQLPLDKGNGKKHKVSHLRTSSSEAHIPDQETTSLTSGTGTPGAEAEQQDTASVEQSSQKECGQPAGQVAVLPEVQVTQNPANEQESAEPKTVEEEESNFSSPLMLWLQQEQKRKESITEKKPKKGLVFEISSDDGFQICAESIEDAWKSLTDKVQEARSNARLKQLSFAGVNGLRMLGILHDAVVFLIEQLSGAKHCRNYKFRFHKPEEANEPPLNPHGSARAEVHLRKSAFDMFNFLASKHRQPPEYNPNDEEEEEVQLKSARRATSMDLPMPMRFRHLKKTSKEAVGVYRSPIHGRGLFCKRNIDAGEMVIEYAGNVIRSIQTDKREKYYDSKGIGCYMFRIDDSEVVDATMHGNAARFINHSCEPNCYSRVINIDGQKHIVIFAMRKIYRGEELTYDYKFPIEDASNKLPCNCGAKKCRKFLN

SEQ ID NO: 15225 - protein, 2715 aa, Homo sapiens
MAAAAGGGSCPGPGSARGRFPGRPRGAGGGGGRGGRGNGAERVRVALRRGGGATGPGGAEPGEDTALLRLLGLRRGLRRLRRLWAGPRVQRGRGRGRGRGWGPSRGCVPEEESSDGESDEEEFQGFHSDEDVAPSSLRSALRSQRGRAPRGRGRKHKTTPLPPPRLADVAPTPPKTPARKRGEEGTERMVQALTELLRRAQAPQAPRSRACEPSTPRRSRGRPPGRPAGPCRRKQQAVVVAEAAVTIPKPEPPPPVVPVKHQTGSWKCKEGPGPGPGTPRRGGQSSRGGRGGRGRGRGGGLPFVIKFVSRAKKVKMGQLSLGLESGQGQGQHEESWQDVPQRRVGSGQGGSPCWKKQEQKLDDEEEEKKEEEEKDKEGEEKEERAVAEEMMPAAEKEEAKLPPPPLTPPAPSPPPPLPPPSTSPPPPLCPPPPPPVSPPPLPSPPPPPAQEEQEESPPPVVPATCSRKRGRPPLTPSQRAEREAARAGPEGTSPPTPTPSTATGGPPEDSPTVAPKSTTFLKNIRQFIMPVVSARSSRVIKTPRRFMDEDPPKPPKVEVSPVLRPPITTSPPVPQEPAPVPSPPRAPTPPSTPVPLPEKRRSILREPTFRWTSLTRELPPPPPAPPPPPAPSPPPAPATSSRRPLLLRAPQFTPSEAHLKIYESVLTPPPLGAPEAPEPEPPPADDSPAEPEPRAVGRTNHLSLPRFAPVVTTPVKAEVSPHGAPALSNGPQTQAQLLQPLQALQTQLLPQALPPPQPQLQPPPSPQQMPPLEKARIAGVGSLPLSGVEEKMFSLLKRAKVQLFKIDQQQQQKVAASMPLSPGGQMEEVAGAVKQISDRGPVRSEDESVEAKRERPSGPESPVQGPRIKHVCRHAAVALGQARAMVPEDVPRLSALPLRDRQDLATEDTSSASETESVPSRSRRGKVEAAGPGGESEPTGSGGTLAHTPRRSLPSHHGKKMRMARCGHCRGCLRVQDCGSCVNCLDKPKFGGPNTKKQCCVYRKCDKIEARKMERLAKKGRTIVKTLLPWDSDESPEASPGPPGPRRGAGAGGPREEVVAHPGPEEQDSLLQRKSARRCVKQRPSYDIFEDSDDSEPGGPPAPRRRTPRENELPLPEPEEQSRPRKPTLQPVLQLKARRRLDKDALAPGPFASFPNGWTGKQKSPDGVHRVRVDFKEDCDLENVWLMGGLSVLTSVPGGPPMVCLLCASKGLHELVFCQVCCDPFHPFCLEEAERPLPQHHDTWCCRRCKFCHVCGRKGRGSKHLLECERCRHAYHPACLGPSYPTRATRKRRHWICSACVRCKSCGATPGKNWDVEWSGDYSLCPRCTQLYEKGNYCPICTRCYEDNDYESKMMQCAQCDHWVHAKCEGLSDEDYEILSGLPDSVLYTCGPCAGAAQPRWREALSGALQGGLRQVLQGLLSSKVVGPLLLCTQCGPDGKQLHPGPCGLQAVSQRFEDGHYKSVHSFMEDMVGILMRHSEEGETPDRRAGGQMKGLLLKLLESAFGWFDAHDPKYWRRSTRLPNGVLPNAVLPPSLDHVYAQWRQQEPETPESGQPPGDPSAAFQGKDPAAFSHLEDPRQCALCLKYGDADSKEAGRLLYIGQNEWTHVNCAIWSAEVFEENDGSLKNVHAAVARGRQMRCELCLKPGATVGCCLSSCLSNFHFMCARASYCIFQDDKKVFCQKHTDLLDGKEIVNPDGFDVLRRVYVDFEGINFKRKFLTGLEPDAINVLIGSIRIDSLGTLSDLSDCEGRLFPIGYQCSRLYWSTVDARRRCWYRCRILEYRPWGPREEPAHLEAAEENQTIVHSPAPSSEPPGGEDPPLDTDVLVPGAPERHSPIQNLDPPLRPDSGSAPPPAPRSFSGARIKVPNYSPSRRPLGGVSFGPLPSPGSPSSLTHHIPTVGDPDFPAPPRRSRRPSPLAPRPPPSRWASPPLKTSPQLRVPPPTSVVTALTPTSGELAPPGPAPSPPPPEDLGPDFEDMEVVSGLSAADLDFAASLLGTEPFQEEIVAAGAMGSSHGGPGDSSEEESSPTSRYIHFPVTVVSAPGLAPSATPGAPRIEQLDGVDDGTDSEAEAVQQPRGQGTPPSGPGVVRAGVLGAAGDRARPPEDLPSEIVDFVLKNLGGPGDGGAGPREESLPPAPPLANGSQPSQGLTASPADPTRTFAWLPGAPGVRVLSLGPAPEPPKPATSKIILVNKLGQVFVKMAGEGEPVPPPVKQPPLPPTISPTAPTSWTLPPGPLLGVLPVVGVVRPAPPPPPPPLTLVLSSGPASPPRQAIRVKRVSTFSGRSPPAPPPYKAPRLDEDGEASEDTPQVPGLGSGGFSRVRMKTPTVRGVLDLDRPGEPAGEESPGPLQERSPLLPLPEDGPPQVPDGPPDLLLESQWHHYSGEASSSEEEPPSPDDKENQAPKRTGPHLRFEISSEDGFSVEAESLEGAWRTLIEKVQEARGHARLRHLSFSGMSGARLLGIHHDAVIFLAEQLPGAQRCQHYKFRYHQQGEGQEEPPLNPHGAARAEVYLRKCTFDMFNFLASQHRVLPEGATCDEEEDEVQLRSTRRATSLELPMAMRFRHLKKTSKEAVGVYRSAIHGRGLFCKRNIDAGEMVIEYSGIVIRSVLTDKREKFYDGKGIGCYMFRMDDFDVVDATMHGNAARFINHSCEPNCFSRVIHVEGQKHIVIFALRRILRGEELTYDYKFPIEDASNKLPCNCGAKRCRRFLN

SEQ ID NO: 15226 - protein, 4911 aa, Homo sapiens
MSSEEDKSVEQPQPPPPPPEEPGAPAPSPAAADKRPRGRPRKDGASPFQRARKKPRSRGKTAVEDEDSMDGLETTETETIVETEIKEQSAEEDAEAEVDNSKQLIPTLQRSVSEESANSLVSVGVEAKISEQLCAFCYCGEKSSLGQGDLKQFRITPGFILPWRNQPSNKKDIDDNSNGTYEKMQNSAPRKQRGQRKERSPQQNIVSCVSVSTQTASDDQAGKLWDELSLVGLPDAIDIQALFDSTGTCWAHHRCVEWSLGVCQMEEPLLVNVDKAVVSGSTERCAFCKHLGATIKCCEEKCTQMYHYPCAAGAGTFQDFSHIFLLCPEHIDQAPERSKEDANCAVCDSPGDLLDQFFCTTCGQHYHGMCLDIAVTPLKRAGWQCPECKVCQNCKQSGEDSKMLVCDTCDKGYHTFCLQPVMKSVPTNGWKCKNCRICIECGTRSSSQWHHNCLICDNCYQQQDNLCPFCGKCYHPELQKDMLHCNMCKRWVHLECDKPTDHELDTQLKEEYICMYCKHLGAEMDRLQPGEEVEIAELTTDYNNEMEVEGPEDQMVFSEQAANKDVNGQESTPGIVPDAVQVHTEEQQKSHPSESLDTDSLLIAVSSQHTVNTELEKQISNEVDSEDLKMSSEVKHICGEDQIEDKMEVTENIEVVTHQITVQQEQLQLLEEPETVVSREESRPPKLVMESVTLPLETLVSPHEESISLCPEEQLVIERLQGEKEQKENSELSTGLMDSEMTPTIEGCVKDVSYQGGKSIKLSSETESSFSSSADISKADVSSSPTPSSDLPSHDMLHNYPSALSSSAGNIMPTTYISVTPKIGMGKPAITKRKFSPGRPRSKQGAWSTHNTVSPPSWSPDISEGREIFKPRQLPGSAIWSIKVGRGSGFPGKRRPRGAGLSGRGGRGRSKLKSGIGAVVLPGVSTADISSNKDDEENSMHNTVVLFSSSDKFTLNQDMCVVCGSFGQGAEGRLLACSQCGQCYHPYCVSIKITKVVLSKGWRCLECTVCEACGKATDPGRLLLCDDCDISYHTYCLDPPLQTVPKGGWKCKWCVWCRHCGATSAGLRCEWQNNYTQCAPCASLSSCPVCYRNYREEDLILQCRQCDRWMHAVCQNLNTEEEVENVADIGFDCSMCRPYMPASNVPSSDCCESSLVAQIVTKVKELDPPKTYTQDGVCLTESGMTQLQSLTVTVPRRKRSKPKLKLKIINQNSVAVLQTPPDIQSEHSRDGEMDDSREGELMDCDGKSESSPEREAVDDETKGVEGTDGVKKRKRKPYRPGIGGFMVRQRSRTGQGKTKRSVIRKDSSGSISEQLPCRDDGWSEQLPDTLVDESVSVTESTEKIKKRYRKRKNKLEETFPAYLQEAFFGKDLLDTSRQSKISLDNLSEDGAQLLYKTNMNTGFLDPSLDPLLSSSSAPTKSGTHGPADDPLADISEVLNTDDDILGIISDDLAKSVDHSDIGPVTDDPSSLPQPNVNQSSRPLSEEQLDGILSPELDKMVTDGAILGKLYKIPELGGKDVEDLFTAVLSPANTQPTPLPQPPPPTQLLPIHNQDAFSRMPLMNGLIGSSPHLPHNSLPPGSGLGTFSAIAQSSYPDARDKNSAFNPMASDPNNSWTSSAPTVEGENDTMSNAQRSTLKWEKEEALGEMATVAPVLYTNINFPNLKEEFPDWTTRVKQIAKLWRKASSQERAPYVQKARDNRAALRINKVQMSNDSMKRQQQQDSIDPSSRIDSELFKDPLKQRESEHEQEWKFRQQMRQKSKQQAKIEATQKLEQVKNEQQQQQQQQFGSQHLLVQSGSDTPSSGIQSPLTPQPGNGNMSPAQSFHKELFTKQPPSTPTSTSSDDVFVKPQAPPPPPAPSRIPIQDSLSQAQTSQPPSPQVFSPGSSNSRPPSPMDPYAKMVGTPRPPPVGHSFSRRNSAAPVENCTPLSSVSRPLQMNETTANRPSPVRDLCSSSTTNNDPYAKPPDTPRPVMTDQFPKSLGLSRSPVVSEQTAKGPIAAGTSDHFTKPSPRADVFQRQRIPDSYARPLLTPAPLDSGPGPFKTPMQPPPSSQDPYGSVSQASRRLSVDPYERPALTPRPIDNFSHNQSNDPYSQPPLTPHPAVNESFAHPSRAFSQPGTISRPTSQDPYSQPPGTPRPVVDSYSQSSGTARSNTDPYSQPPGTPRPTTVDPYSQQPQTPRPSTQTDLFVTPVTNQRHSDPYAHPPGTPRPGISVPYSQPPATPRPRISEGFTRSSMTRPVLMPNQDPFLQAAQNRGPALPGPLVRPPDTCSQTPRPPGPGLSDTFSRVSPSAARDPYDQSPMTPRSQSDSFGTSQTAHDVADQPRPGSEGSFCASSNSPMHSQGQQFSGVSQLPGPVPTSGVTDTQNTVNMAQADTEKLRQRQKLREIILQQQQQKKIAGRQEKGSQDSPAVPHPGPLQHWQPENVNQAFTRPPPPYPGNIRSPVAPPLGPRYAVFPKDQRGPYPPDVASMGMRPHGFRFGFPGGSHGTMPSQERFLVPPQQIQGSGVSPQLRRSVSVDMPRPLNNSQMNNPVGLPQHFSPQSLPVQQHNILGQAYIELRHRAPDGRQRLPFSAPPGSVVEASSNLRHGNFIPRPDFPGPRHTDPMRRPPQGLPNQLPVHPDLEQVPPSQQEQGHSVHSSSMVMRTLNHPLGGEFSEAPLSTSVPSETTSDNLQITTQPSDGLEEKLDSDDPSVKELDVKDLEGVEVKDLDDEDLENLNLDTEDGKVVELDTLDNLETNDPNLDDLLRSGEFDIIAYTDPELDMGDKKSMFNEELDLPIDDKLDNQCVSVEPKKKEQENKTLVLSDKHSPQKKSTVTNEVKTEVLSPNSKVESKCETEKNDENKDNVDTPCSQASAHSDLNDGEKTSLHPCDPDLFEKRTNRETAGPSANVIQASTQLPAQDVINSCGITGSTPVLSSLLANEKSDNSDIRPSGSPPPPTLPASPSNHVSSLPPFIAPPGRVLDNAMNSNVTVVSRVNHVFSQGVQVNPGLIPGQSTVNHSLGTGKPATQTGPQTSQSGTSSMSGPQQLMIPQTLAQQNRERPLLLEEQPLLLQDLLDQERQEQQQQRQMQAMIRQRSEPFFPNIDFDAITDPIMKAKMVALKGINKVMAQNNLGMPPMVMSRFPFMGQVVTGTQNSEGQNLGPQAIPQDGSITHQISRPNPPNFGPGFVNDSQRKQYEEWLQETQQLLQMQQKYLEEQIGAHRKSKKALSAKQRTAKKAGREFPEEDAEQLKHVTEQQSMVQKQLEQIRKQQKEHAELIEDYRIKQQQQCAMAPPTMMPSVQPQPPLIPGATPPTMSQPTFPMVPQQLQHQQHTTVISGHTSPVRMPSLPGWQPNSAPAHLPLNPPRIQPPIAQLPIKTCTPAPGTVSNANPQSGPPPRVEFDDNNPFSESFQERERKERLREQQERQRIQLMQEVDRQRALQQRMEMEQHGMVGSEISSSRTSVSQIPFYSSDLPCDFMQPLGPLQQSPQHQQQMGQVLQQQNIQQGSINSPSTQTFMQTNERRQVGPPSFVPDSPSIPVGSPNFSSVKQGHGNLSGTSFQQSPVRPSFTPALPAAPPVANSSLPCGQDSTITHGHSYPGSTQSLIQLYSDIIPEEKGKKKRTRKKKRDDDAESTKAPSTPHSDITAPPTPGISETTSTPAVSTPSELPQQADQESVEPVGPSTPNMAAGQLCTELENKLPNSDFSQATPNQQTYANSEVDKLSMETPAKTEEIKLEKAETESCPGQEEPKLEEQNGSKVEGNAVACPVSSAQSPPHSAGAPAAKGDSGNELLKHLLKNKKSSSLLNQKPEGSICSEDDCTKDNKLVEKQNPAEGLQTLGAQMQGGFGCGNQLPKTDGGSETKKQRSKRTQRTGEKAAPRSKKRKKDEEEKQAMYSSTDTFTHLKQQNNLSNPPTPPASLPPTPPPMACQKMANGFATTEELAGKAGVLVSHEVTKTLGPKPFQLPFRPQDDLLARALAQGPKTVDVPASLPTPPHNNQEELRIQDHCGDRDTPDSFVPSSSPESVVGVEVSRYPDLSLVKEEPPEPVPSPIIPILPSTAGKSSESRRNDIKTEPGTLYFASPFGPSPNGPRSGLISVAITLHPTAAENISSVVAAFSDLLHVRIPNSYEVSSAPDVPSMGLVSSHRINPGLEYRQHLLLRGPPPGSANPPRLVSSYRLKQPNVPFPPTSNGLSGYKDSSHGIAESAALRPQWCCHCKVVILGSGVRKSFKDLTLLNKDSRESTKRVEKDIVFCSNNCFILYSSTAQAKNSENKESIPSLPQSPMRETPSKAFHQYSNNISTLDVHCLPQLPEKASPPASPPIAFPPAFEAAQVEAKPDELKVTVKLKPRLRAVHGGFEDCRPLNKKWRGMKWKKWSIHIVIPKGTFKPPCEDEIDEFLKKLGTSLKPDPVPKDYRKCCFCHEEGDGLTDGPARLLNLDLDLWVHLNCALWSTEVYETQAGALINVELALRRGLQMKCVFCHKTGATSGCHRFRCTNIYHFTCAIKAQCMFFKDKTMLCPMHKPKGIHEQELSYFAVFRRVYVQRDEVRQIASIVQRGERDHTFRVGSLIFHTIGQLLPQQMQAFHSPKALFPVGYEASRLYWSTRYANRRCRYLCSIEEKDGRPVFVIRIVEQGHEDLVLSDISPKGVWDKILEPVACVRKKSEMLQLFPAYLKGEDLFGLTVSAVARIAESLPGVEACENYTFRYGRNPLMELPLAVNPTGCARSEPKMSAHVKRFVLRPHTLNSTSTSKSFQSTVTGELNAPYSKQFVHSKSSQYRKMKTEWKSNVYLARSRIQGLGLYAARDIEKHTMVIEYIGTIIRNEVANRKEKLYESQNRGVYMFRMDNDHVIDATLTGGPARYINHSCAPNCVAEVVTFERGHKIIISSSRRIQKGEELCYDYKFDFEDDQHKIPCHCGAVNCRKWMN

SEQ ID NO: 15227 - protein, 1858 aa, Homo sapiens
MSIVIPLGVDTAETSYLEMAAGSEPESVEASPVVVEKSNSYPHQLYTSSSHHSHSYIGLPYADHNYGARPPPTPPASPPPSVLISKNEVGIFTTPNFDETSSATTISTSEDGSYGTDVTRCICGFTHDDGYMICCDKCSVWQHIDCMGIDRQHIPDTYLCERCQPRNLDKERAVLLQRRKRENMSDGDTSATESGDEVPVELYTAFQHTPTSITLTASRVSKVNDKRRKKSGEKEQHISKCKKAFREGSRKSSRVKGSAPEIDPSSDGSNFGWETKIKAWMDRYEEANNNQYSEGVQREAQRIALRLGNGNDKKEMNKSDLNTNNLLFKPPVESHIQKNKKILKSAKDLPPDALIIEYRGKFMLREQFEANGYFFKRPYPFVLFYSKFHGLEMCVDARTFGNEARFIRRSCTPNAEVRHEIQDGTIHLYIYSIHSIPKGTEITIAFDFDYGNCKYKVDCACLKENPECPVLKRSSESMENINSGYETRRKKGKKDKDISKEKDTQNQNITLDCEGTTNKMKSPETKQRKLSPLRLSVSNNQEPDFIDDIEEKTPISNEVEMESEEQIAERKRKMTREERKMEAILQAFARLEKREKRREQALERISTAKTEVKTECKDTQIVSDAEVIQEQAKEENASKPTPAKVNRTKQRKSFSRSRTHIGQQRRRHRTVSMCSDIQPSSPDIEVTSQQNDIENTVLTIEPETETALAEIITETEVPALNKCPTKYPKTKKHLVNEWLSEKNEKTGKPSDGLSERPLRITTDPEVLATQLNSLPGLTYSPHVYSTPKHYIRFTSPFLSEKRRRKEPTENISGSCKKRWLKQALEEENSAILHRFNSPCQERSRSPAVNGENKSPLLLNDSCSLPDLTTPLKKRRFYQLLDSVYSETSTPTPSPYATPTHTDITPMDPSFATPPRIKSDDETCRNGYKPIYSPVTPVTPGTPGNTMHFENISSPESSPEIKRRTYSQEGYDRSSTMLTLGPFRNSNLTELGLQEIKTIGYTSPRSRTEVNRQCPGEKEPVSDLQLGLDAVEPTALHKTLETPAHDRAEPNSQLDSTHSGRGTMYSSWVKSPDRTGVNFSVNSNLRDLTPSHQLEVGGGFRISESKCLMQDDTRGMFMETTVFCTSEDGLVSGFGRTVNDNLIDGNCTPQNPPQKKKVSLLEYRKRQREARKSGSKTENFPLISVSPHASGSLSNNGDGCASSNDNGEQVDHTASLPLPTPATVYNATSEETSNNCPVKDATASEKNEPEVQWTASTSVEQVRERSYQRALLLSDHRKDKDSGGESPCVSCSPSHVQSSPSSHSNHIPQLQAKGPVPSFSELMEDPDPENPEPTTTNECPSPDTSQNTCKSPPKMSKPGSPGSVIPAQAHGKIFTKPDPQWDSTVSASEAENGVHLKTELQQKQLSNNNQALSKNHPPQTHVRNSSEQLSQKLPSVPTKLHCPPSPHLENPPKSSTPHTPVQHGYLSPKPPSQQLGSPYRPHHSQSPQVGTPQREPQRNFYPAAQNLPANTQQATSGTLFTQTPSGQSSATYSQFNQQSLNSTAPPPPPPPPPSSSYYQNQQPSANFQNYNQLKGSLSQQTVFTSGPNQALPGTTSQQTVPGHHVTPGHFLPSQNPTIHHQTAAAVVPPPPPPPPAPGPHLVQQPNSHQQHSVAHVVGPVHAVTPGSHIHSQTAGHHLPPPPPPPGPAPHHHPPPHPSTGLQGLQAQHQHVVNSAPPPPPPPPPSSVLASGHHTTSAQALHHPPHQGPPLFPSSAHPTVPPYPSQATHHTTLGPGPQHQPSGTGPHCPLPVTGPHLQPQGPNSIPTPTASGFCPHPGSVALPHGVQGPQQASPVPGQIPIHRAQVPPTFQNNYHGSGWH

SEQ ID NO: 15228 - protein, 840 aa, Homo sapiens
MHLVAGDSPGSGPHLPATAFIIPASSATLGLPSSALDVSCFPREPIHVGAPEQVAGCEPVSATVLPQLSAGPASSSTSTVRLLEWTEAAAPPPGGGLRFRISEYKPLNMAGVEQPPSPELRQEGVTEYEDGGAPAGDGEAGPQQAEDHPQNPPEDPNQDPPEDDSTCQCQACGPHQAAGPDLGSSNDGCPQLFQERSVIVENSSGSTSASELLKPMKKRKRREYQSPSEEESEPEAMEKQEEGKDPEGQPTASTPESEEWSSSQPATGEKKECWSWESYLEEQKAITAPVSLFQDSQAVTHNKNGFKLGMKLEGIDPQHPSMYFILTVAEVCGYRLRLHFDGYSECHDFWVNANSPDIHPAGWFEKTGHKLQPPKGYKEEEFSWSQYLRSTRAQAAPKHLFVSQSHSPPPLGFQVGMKLEAVDRMNPSLVCVASVTDVVDSRFLVHFDNWDDTYDYWCDPSSPYIHPVGWCQKQGKPLTPPQDYPDPDNFCWEKYLEETGASAVPTWAFKVRPPHSFLVNMKLEAVDRRNPALIRVASVEDVEDHRIKIHFDGWSHGYDFWIDADHPDIHPAGWCSKTGHPLQPPLGPREPSSASPGGCPPLSYRSLPHTRTSKYSFHHRKCPTPGCDGSGHVTGKFTAHHCLSGCPLAERNQSRLKAELSDSEASARKKNLSGFSPRKKPRHHGRIGRPPKYRKIPQEDFQTLTPDVVHQSLFMSALSAHPDRSLSVCWEQHCKLLPGVAGISASTVAKWTIDEVFGFVQTLTGCEDQARLFKDEARIVRVTHVSGKTLVWTVAQLGDLVCSDHLQEGKGILETGVHSLLCSLPTHLLAKLSFASDSQY

SEQ ID NO: 15229 - protein, 705 aa, Homo sapiens; identical to SEQ ID NO: 7623

SEQ ID NO: 15230 - protein, 780 aa, Homo sapiens
MTESASSTSGQEFDVFSVMDWKDGVGTLPGSDLKFRVNEFGALEVITDENEMENVKKATATTTWMVPTAQEAPTSPPSSRPVFPPAYWTSPPGCPTVFSEKTGMPFRLKDPVKVEGLQFCENCCQYGNVDECLSGGNYCSQNCARHIKDKDQKEERDVEEDNEEEDPKCSRKKKPKLSLKADTKEDGEERDDEMENKQDVRILRGSQRARRKRRGDSAVLKQGLPPKGKKAWCWASYLEEEKAVAVPAKLFKEHQSFPYNKNGFKVGMKLEGVDPEHQSVYCVLTVAEVCGYRIKLHFDGYSDCYDFWVNADALDIHPVGWCEKTGHKLHPPKGYKEEEFNWQTYLKTCKAQAAPKSLFENQNITVIPSGFRVGMKLEAVDKKNPSFICVATVTDMVDNRFLVHFDNWDESYDYWCEASSPHIHPVGWCKEHRRTLITPPGYPNVKHFSWDKYLEETNSLPAPARAFKVKPPHGFQKKMKLEVVDKRNPMFIRVATVADTDDHRVKVHFDGWNNCYDYWIDADSPDIHPVGWCSKTGHPLQPPLSPLELMEASEHGGCSTPGCKGIGHFKRARHLGPHSAANCPYSEINLNKDRIFPDRLSGEMPPASPSFPRNKRTDANESSSSPEIRDQHADDVKEDFEERTESEMRTSHEARGAREEPTVQQAQRRSAVFLSFKSPIPCLPLRWEQQSKLLPTVAGIPASKVSKWSTDEVSEFIQSLPGCEEHGKVFKDEQIDGEAFLLMTQTDIVKIMSIKLGPALKIFNSILMFKAAEKNSHNEL

SEQ ID NO: 15231 - protein, 623 aa, Homo sapiens
MKQPNRKRKLNMDSKERLDQDGRLEQAEEEKKPKDSTTPLSHVPSAAAQGAWSWEWYLKEQKAVAAPVELFSKDQSFPEHENGFQIGMRLEGIDPRHPSVFCVLSVAEVCGYRLRLHFDGYLSCYDFWTNAGSPDIHPVGWCEKTKHELHIPKGYRKDKFVWMDYLKACKLQNAPKKLFRNRSPNGPMSKEFQVGMKLEAVDRKNPSLVCVATIADIVEDRLLVHFDNWDDSYDYWCDVNSPYVQPVGWCQENGRTLIAPQGYPNPENFSWTEYLEATQTNAVPAKVFKMRLPHGFLPNMKLEVVDKRNPRLIRVATIVDVDDQRVKVHFDGWDHKYDYWVEADSPDIHPIGWCDVTGHPLEVPQRTNDLKILPGQAVCPTPGCRGIGHIRGPRYSGHHSAFGCPYSDMNLKKEATLHDRLREQTQANLESDSSHSKSKSLCSLNFNGKHEKVNSQPRLVQQAKCLKIKGKEDIDLDNLFRVLVLHPRGLEYSVEQAQQVLHQSVSMSTVSAHPFRDLPLGREQHCKLLPGVADIRASQVARWTVDEVAEFVQSLLGCEEHAKCFKKEQIDGKAFLLLTQTDIVKVMKIKLGPALKIYNSILMFRHSQELPEEDIASGQEVRG

SEQ ID NO: 15232 - protein, 281 aa, Homo sapiens
MTSKEDGKAAPGEERRRSPLDHLPPPANSNKPLTPFSIEDILNKPSVRRSYSLCGAAHLLAAADKHAQGGLPLAGRALLSQTSPLCALEELASKTFKGLEVSVLQAAEGRDGMTIFGQRQTPKKRRKSRTAFTNHQIYELEKRFLYQKYLSPADRDQIAQQLGLTNAQVITWFQNRRAKLKRDLEEMKADVESAKKLGPSGQMDIVALAELEQNSEATAGGGGGCGRAKSRPGSPVLPPGAPKAPGAGALQLSPASPLTDQPASSQDCSEDEEDEEIDVDD

SEQ ID NO: 15233 - protein, 198 aa, Homo sapiens
MNSGREPRTPRTLLSIADILAPRMVPRAPSAPQLPESGPGPTSPLCALEELTSKTFRGLDARALQPSEGRAGPDALGPGPFGRKRRKSRTAFTAQQVLELERRFVFQKYLAPSERDGLATRLGLANAQVVTWFQNRRAKLKRDVEEMRADVASLRALSPEVLCSLALPEGAPDPGLCLGPAGPDSRPHLSDEEIQVDD

SEQ ID NO: 15234 - protein, 433 aa, Homo sapiens
MQRMIQQFAAEYTSKNSSTQDPSQPNSTKNQSLPKASPVTTSPTAATTQNPVLSKLLMADQDSPLDLTVRKSQSEPSEQDGVLDLSTKKSPCAGSTSLSHSPGCSSTQGNGRPGRPSQYRPDGLRSGDGVPPRSLQDGTREGFGHSTSLKVPLARSLQISEELLSRNQLSTAASLGPSGLQNHGQHLILSREASWAKPHYEFNLSRMKFRGNGALSNISDLPFLAENSAFPKMALQAKQDGKKDVSHSSPVDLKIPQVRGMDLSWESRTGDQYSYSSLVMGSQTESALSKKLRAILPKQSRKSMLDAGPDSWGSDAEQSTSGQPYPTSDQEGDPGSKQPRKKRGRYRQYNSEILEEAISVVMSGKMSVSKAQSIYGIPHSTLEYKVKERLGTLKNPPKKKMKLMRSEGPDVSVKIELDPQGEAAQSANESKNE

SEQ ID NO: 15235 - protein, 602 aa, Homo sapiens; identical to SEQ ID NO: 7758

SEQ ID NO: 15236 - protein, 399 aa, Homo sapiens
MPQLSGGGGGGGGDPELCATDEMIPFKDEGDPQKEKIFAEISHPEEEGDLADIKSSLVNESEIIPASNGHEVARQAQTSQEPYHDKAREHPDDGKHPDGGLYNKGPSYSSYSGYIMMPNMNNDPYMSNGSLSPPIPRTSNKVPVVQPSHAVHPLTPLITYSDEHFSPGSHPSHIPSDVNSKQGMSRHPPAPDIPTFYPLSPGGVGQITPPLGWQGQPVYPITGGFRQPYPSSLSVDTSMSRFSHHMIPGPPGPHTTGIPHPAIVTPQVKQEHPHTDSDLMHVKPQHEQRKEQEPKRPHIKKPLNAFMLYMKEMRANVVAECTLKESAAINQILGRRWHALSREEQAKYYELARKERQLHMQLYPGWSARDNYGKKKKRKREKLQESASGTGPRMTAAYI

SEQ ID NO: 15237 - protein, 168 aa, Homo sapiens
MHPSLATMGKLASKLQLDLSVVKIWFKNQRAKWKRQQRQQMQTRPSLGPANQTTSVKKEETPSAITTANIRPVSPGISDANDHDLREPSGIKNPGGASASARVSSWDSQSYDIEQICLGASNPPWASTLFEIDEFVKIYDLPGEDDTSSLNQYLFPVCLEYDQLQSSV

SEQ ID NO: 15238 - protein, 406 aa, Homo sapiens
MVHCAGCKRPILDRFLLNVLDRAWHVKCVQCCECKCNLTEKCFSREGKLYCKNDFFRCFGTKCAGCAQGISPSDLVRRARSKVFHLNCFTCMMCNKQLSTGEELYIIDENKFVCKEDYLSNSSVAKENSLHSATTGSDPSLSPDSQDPSQDDAKDSESANVSDKEAGSNENDDQNLGAKRRGPRTTIKAKQLETLKAAFAATPKPTRHIREQLAQETGLNMRVIQVWFQNRRSKERRMKQLSALGARRHAFFRSPRRMRPLVDRLEPGELIPNGPFSFYGDYQSEYYGPGGNYDFFPQGPPSSQAQTPVDLPFVPSSGPSGTPLGGLEHPLPGHHPSSEAQRFTDILAHPPGDSPSPEPSLPGPLHSMSAEVFGPSPPFSSLSVNGGASYGNHLSHPPEMNEAAVW

SEQ ID NO: 15239 - protein, 406 aa, Homo sapiens
MLFHSLSGPEVHGVIDEMDRRAKSEAPAISSAIDRGDTETTMPSISSDRAALCAGCGGKISDRYYLLAVDKQWHMRCLKCCECKLNLESELTCFSKDGSIYCKEDYYRRFSVQRCARCHLGISASEMVMRARDLVYHLNCFTCTTCNKMLTTGDHFGMKDSLVYCRLHFEALLQGEYPAHFNHADVAAAAAAAAAAKSAGLGAAGANPLGLPYYNGVGTVQKGRPRKRKSPGPGADLAAYNAALSCNENDAEHLDRDQPYPSSQKTKRMRTSFKHHQLRTMKSYFAINHNPDAKDLKQLAQKTGLTKRVLQVWFQNARAKFRRNLLRQENTGVDKSTDAALQTGTPSGPASELSNASLSPSSTPTTLTDLTSPTLPTVTSVLTSVPGNLEGHEPHSPSQTTLTNLF

SEQ ID NO: 15240 - protein, 397 aa, Homo sapiens
MLLETGLERDRARPGAAAVCTLGGTREIPLCAGCDQHILDRFILKALDRHWHSKCLKCSDCHTPLAERCFSRGESVYCKDDFFKRFGTKCAACQLGIPPTQVVRRAQDFVYHLHCFACVVCKRQLATGDEFYLMEDSRLVCKADYETAKQREAEATAKRPRTTITAKQLETLKSAYNTSPKPARHVREQLSSETGLDMRVVQVWFQNRRAKEKRLKKDAGRQRWGQYFRNMKRSRGGSKSDKDSVQEGQDSDAEVSFPDEPSLAEMGPANGLYGSLGEPTQALGRPSGALGNFSLEHGGLAGPEQYRELRPGSPYGVPPSPAAPQSLPGPQPLLSSLVYPDTSLGLVPSGAPGGPPPMRVLAGNGPSSDLSTGSSGGYPDFPASPASWLDEVDHAQF

SEQ ID NO: 15241 - protein, 390 aa, Homo sapiens
MMQSATVPAEGAVKGLPEMLGVPMQQIPQCAGCNQHILDKFILKVLDRHWHSSCLKCADCQMQLADRCFSRAGSVYCKEDFFKRFGTKCTACQQGIPPTQVVRKAQDFVYHLHCFACIICNRQLATGDEFYLMEDGRLVCKEDYETAKQNDDSEAGAKRPRTTITAKQLETLKNAYKNSPKPARHVREQLSSETGLDMRVVQVWFQNRRAKEKRLKKDAGRHRWGQFYKSVKRSRGSSKQEKESSAEDCGVSDSELSFREDQILSELGHTNRIYGNVGDVTGGQLMNGSFSMDGTGQSYQDLRDGSPYGIPQSPSSISSLPSHAPLLNGLDYTVDSNLGIIAHAGQGVSQTLRAMAGGPTSDISTGSSVGYPDFPTSPGSWLDEMDHPPF

SEQ ID NO: 15242 - protein, 402 aa, Homo sapiens
MMVHCAGCERPILDRFLLNVLDRAWHIKCVQCCECKTNLSEKCFSREGKLYCKNDFFRRFGTKCAGCAQGISPSDLVRKARSKVFHLNCFTCMVCNKQLSTGEELYVIDENKFVCKDDYLSSSSLKEGSLNSVSSCTDRSLSPDLQDALQDDPKETDNSTSSDKETANNENEEQNSGTKRRGPRTTIKAKQLETLKAAFAATPKPTRHIREQLAQETGLNMRVIQVWFQNRRSKERRMKQLSALGARRHAFFRSPRRMRPLGGRLDESEMLGSTPYTYYGDYQGDYYAPGSNYDFFAHGPPSQAQSPADSSFLAASGPGSTPLGALEPPLAGPHAADNPRFTDMISHPDTPSPEPGLPGTLHPMPGEVFSGGPSPPFPMSGTSGYSGPLSHPNPELNEAAVW

SEQ ID NO: 15243 - protein, 363 aa, Homo sapiens
MAQPGSGCKATTRCLEGTAPPAMAQSDAEALAGALDKDEGQASPCTPSTPSVCSPPSAASSVPSAGKNICSSCGLEILDRYLLKVNNLIWHVRCLECSVCRTSLRQQNSCYIKNKEIFCKMDYFSRFGTKCARCGRQIYASDWVRRARGNAYHLACFACFSCKRQLSTGEEFGLVEEKVLCRIHYDTMIENLKRAAENGNGLTLEGAVPSEQDSQPKPAKRARTSFTAEQLQVMQAQFAQDNNPDAQTLQKLADMTGLSRRVIQVWFQNCRARHKKHTPQHPVPPSGAPPSRLPSALSDDIHYTPFSSPERARMVTLHGYIESQVQCGQVHCRLPYTAPPVHLKADMDGPLSNRGEKVILFQY

SEQ ID NO: 15244 - protein, 356 aa, Homo sapiens
MQILSRCQGLMSEECGRTTALAAGRTRKGAGEEGLVSPEGAGDEDSCSSSAPLSPSSSPRSMASGSGCPPGKCVCNSCGLEIVDKYLLKVNDLCWHVRCLSCSVCRTSLGRHTSCYIKDKDIFCKLDYFRRYGTRCSRCGRHIHSTDWVRRAKGNVYHLACFACFSCKRQLSTGEEFALVEEKVLCRVHYDCMLDNLKREVENGNGISVEGALLTEQDVNHPKPAKRARTSFTADQLQVMQAQFAQDNNPDAQTLQKLAERTGLSRRVIQVWFQNCRARHKKHVSPNHSSSTPVTAVPPSRLSPPMLEEMAYSAYVPQDGTMLTALHSYMDAHSPTTLGLQPLLPHSMTQLPISHT

SEQ ID NO: 15245 - protein, 397 aa, Homo sapiens
MEIVGCRAEDNSCPFRPPAMLFHGISGGHIQGIMEEMERRSKTEARLAKGAQLNGRDAGMPPLSPEKPALCAGCGGKISDRYYLLAVDKQWHLRCLKCCECKLALESELTCFAKDGSIYCKEDYYRRFSVQRCARCHLGISASEMVMRARDSVYHLSCFTCSTCNKTLTTGDHFGMKDSLVYCRAHFETLLQGEYPPQLSYTELAAKSGGLALPYFNGTGTVQKGRPRKRKSPALGVDIVNYNSGCNENEADHLDRDQQPYPPSQKTKRMRTSFKHHQLRTMKSYFAINHNPDAKDLKQLAQKTGLTKRVLQVWFQNARAKFRRNLLRQENGGVDKADGTSLPAPPSADSGALTPPGTATTLTDLTNPTITVVTSVTSNMDSHESGSPSQTTLTNLF

SEQ ID NO: 15246 - protein, 382 aa, Homo sapiens
MLDGLKMEENFQSAIDTSASFSSLLGRAVSPKSVCEGCQRVILDRFLLRLNDSFWHEQCVQCASCKEPLETTCFYRDKKLYCKYDYEKLFAVKCGGCFEAIAPNEFVMRAQKSVYHLSCFCCCVCERQLQKGDEFVLKEGQLLCKGDYEKERELLSLVSPAASDSGKSDDEESLCKSAHGAGKGTAEEGKDHKRPKRPRTILTTQQRRAFKASFEVSSKPCRKVRETLAAETGLSVRVVQVWFQNQRAKMKKLARRQQQQQQDQQNTQRLSSAQTNGGGSAGMEGIMNPYTALPTPQQLLAIEQSVYSSDPFRQGLTPPQMPGDHMHPYGAEPLFHDLDSDDTSLSNLGDCFLATSEAGPLQSRVGNPIDHLYSMQNSYFTS

SEQ ID NO: 15247 - protein, 402 aa, Homo sapiens
MDIATGPESLERCFPRGQTDCAKMLDGIKMEEHALRPGPATLGVLLGSDCPHPAVCEGCQRPISDRFLMRVNESSWHEECLQCAACQQALTTSCYFRDRKLYCKQDYQQLFAAKCSGCMEKIAPTEFVMRALECVYHLGCFCCCVCERQLRKGDEFVLKEGQLLCKGDYEKEKDLLSSVSPDESDSVKSEDEDGDMKPAKGQGSQSKGSGDDGKDPRRPKRPRTILTTQQRRAFKASFEVSSKPCRKVRETLAAETGLSVRVVQVWFQNQRAKMKKLARRHQQQQEQQNSQRLGQEVLSSRMEGMMASYTPLAPPQQQIVAMEQSPYGSSDPFQQGLTPPQMPGDHMNPYGNDSIFHDIDSDTSLTSLSDCFLGSSDVGSLQARVGNPIDRLYSMQSSYFAS

SEQ ID NO: 15248 - protein, 808 aa, Homo sapiens
MTSPAAAQSREIDCLSPEAQKLAEARLAAKRAARAEAREIRMKELERQQKEEDSERYSRRSRRNTSASDEDERMSVGSRGSLRVEERPEKDFTEKGSRNMPGLSAATLASLGGTSSRRGSGDTSISIDTEASIREIKELNELKDQIQDVEGKYMQGLKEMKDSLAEVEEKYKKAMVSNAQLDNEKTNFMYQVDTLKDMLLELEEQLAESRRQYEEKNKEFEREKHAHSILQFQFAEVKEALKQREEMLEKHGIILNSEIATNGETSDTLNNVGYQGPTKMTKEELNALKSTGDGTLGRASEVEVKNEIVANVGKREILHNTEKEQHTEDTVKDCVDIEVFPAGENTEDQKSSEDTAPFLGTLAGATYEEQVQSQILESSSLPENTVQVESNEVMGAPDDRTRTPLEPSNCWSDLDGGNHTENVGEAAVTQVEEQAGTVASCPLGHSDDTVYHDDKCMVEVPQELETSTGHSLEKEFTNQEAAEPKEVPAHSTEVGRDHNEEEGEETGLRDEKPIKTEVPGSPAGTEGNCQEATGPSTVDTQNEPLDMKEPDEEKSDQQGEALDSSQKKTKNKKKKNKKKKSPVPVETLKDVKKELTYQNTDLSEIKEEEQVKSTDRKSAVEAQNEVTENPKQKIAAESSENVDCPENPKIKLDGKLDQEGDDVQTAAEEVLADGDTLDFEDDTVQSSGPRAGGEELDEGVAKDNAKIDGATQSSPAEPKSEDADRCTLPEHESPSQDISDACEAESTERCEMSEHPSQTVRKALDSNSLENDDLSAPGREPGHFNPESREDTRGGNEKGKSKEDCTMS

SEQ ID NO: 15249 - protein, 721 aa, Homo sapiens
MGTPASGRKRTPVKDRFSAEDEALSNIAREAEARLAAKRAARAEARDIRMRELERQQKEYSLHSFDRKWGQIQKWLEDSERARYSHRSSHHRPYLGVEDALSIRSVGSHRYDMFKDRSSRLSSLNHSYSHSHGMKKRSSDSHKDLLSGLYFDQRNYSSLRHSKPTSAYYTRQSSSLYSDPLATYKSDRASPTANSGLLRSASLASLYNGGLYNPYGPRTPSECSYYSSRISSARSSPGFTNDDTASIVSSDRASRGRRESVVSAADYFSRSNRRGSVVSEVDDISIPDLSSLDEKSDKQYAENYTRPSSRNSASATTPLSGNSSRRGSGDTSSLIDPDTSLSELRDIYDLKDQIQDVEGRYMQGLKELKESLSEVEEKYKKAMVSNAQLDNEKNNLIYQVDTLKDVIEEQEEQMAEFYRENEEKSKELERQKHMCSVLQHKMEELKEGLRQRDELIEEKQRMQQKIDTMTKEVFDLQETLLWKDKKIGALEKQKEYIACLRNERDMLREELADLQETVKTGEKHGLVIIPDGTPNGDVSHEPVAGAITVVSQEAAQVLESAGEGPLDVRLRKLAGEKEELLSQIRKLKLQLEEERQKCSRNDGTVGDLAGLQNGSDLQFIEMQRDANRQISEYKFKLSKAEQDITTLEQSISRLEGQVLRYKTAAENAEKVEDELKAEKRKLQRELRTALDKIEEMEMTNSHLAKRLEKMKANRTALLAQQ

SEQ ID NO: 15250 - protein, 379 aa, Homo sapiens
MVFFTCNACGESVKKIQVEKHVSVCRNCECLSCIDCGKDFWGDDYKNHVKCISEDQKYGGKGYEGKTHKGDIKQQAWIQKISELIKRPNVSPKVRELLEQISAFDNVPRKKAKFQNWMKNSLKVHNESILDQVWNIFSEASNSEPVNKEQDQRPLHPVANPHAEISTKVPASKVKDAVEQQGEVKKNKRERKEERQKKRKREKKELKLENHQENSRNQKPKKRKKGQEADLEAGGEEVPEANGSAGKRSKKKKQRKDSASEEEAHVGAGKRKRRHSEVETDSKKKKMKLPEHPEGGEPEDDEAPAKGKFNWKGTIKAILKQAPDNEITIKKLRKKVLAQYYTVTDEHHRSEEELLVIFNKKISKNPTFKLLKDKVKLVK

SEQ ID NO: 15251 - protein, 280 aa, Homo sapiens
MCPPQAQAEVGPTMTEKAEMVCAPSPAPAPPPKPASPGPPQVEEVGHRGGSSPPRLPPGVPVISLGHSRPPGVAMPTTELGTLRPPLLQLSTLGTAPPTLALHYHPHPFLNSVYIGPAGPFSIFPSSRLKRRPSHCELDLAEGHQPQKVARRVFTNSRERWRQQNVNGAFAELRKLLPTHPPDRKLSKNEVLRLAMKYIGFLVRLLRDQAAALAAGPTPPGPRKRPVHRVPDDGARRGSGRRAEAAARSQPAPPADPDGSPGGAARPIKMEQTALSPEVR

SEQ ID NO: 15252 - protein, 434 aa, Homo sapiens
MPNRKASRNAYYFFVQEKIPELRRRGLPVARVADAIPYCSSDWALLREEEKEKYAEMAREWRAAQGKDPGPSEKQKPVFTPLRRPGMLVPKQNVSPPDMSALSLKGDQALLGGIFYFLNIFSHGELPPHCEQRFLPCEIGCVKYSLQEGIMADFHSFINPGEIPRGFRFHCQAASDSSHKIPISNFERGHNQATVLQNLYRFIHPNPGNWPPIYCKSDDRTRVNWCLKHMAKASEIRQDLQLLTVEDLVVGIYQQKFLKEPSKTWIRSLLDVAMWDYSSNTRCKWHEENDILFCALAVCKKIAYCISNSLATLFGIQLTEAHVPLQDYEASNSVTPKMVVLDAGRYQKLRVGSSGFSHFNSSNEEQRSNTPIGDYPSRAKISGQNSSVRGRGITRLLESISNSSSNIHKFSNCDTSLSPYMSQKDGYKSFSSLS

SEQ ID NO: 15253 - protein, 373 aa, Homo sapiens
MASELAMSNSDLPTSPLAMEYVNDFDLMKFEVKKEPVETDRIISQCGRLIAGGSLSSTPMSTPCSSVPPSPSFSAPSPGSGSEQKAHLEDYYWMTGYPQQLNPEALGFSPEDAVEALISNSHQLQGGFDGYARGAQQLAAAAGAGAGASLGGSGEEMGPAAAVVSAVIAAAAAQSGAGPHYHHHHHHAAGHHHHPTAGAPGAAGSAAASAGGAGGAGGGGPASAGGGGGGGGGGGGGGAAGAGGALHPHHAAGGLHFDDRFSDEQLVTMSVRELNRQLRGVSKEEVIRLKQKRRTLKNRGYAQSCRFKRVQQRHVLESEKNQLLQQVDHLKQEISRLVRERDAYKEKYEKLVSSGFRENGSSSDNPSSPEFFM

SEQ ID NO: 15254 - protein, 256 aa, Homo sapiens
MKLLENSSFEAINSQLTVETGDAHIIGRIESYSCKMAGDDKHMFKQFCQEGQPHVLEALSPPQTSGLSPSRLSKSQGGEEEGPLSDKCSRKTLFYLIATLNESFRPDYDFSTARSHEFSREPSLSWVVNAVNCSLFSAVREDFKDLKPQLWNAVDEEICLAECDIYSYNPDLDSDPFGEDGSLWSFNYFFYNKRLKRIVFFSCRSISGSTYTPSEAGNELDMELGEEEVEEESRSGGSGAEETSTMEEDRVPVICI

SEQ ID NO: 15255 - protein, 353 aa, Homo sapiens
MAAELAMGAELPSSPLAIEYVNDFDLMKFEVKKEPPEAERFCHRLPPGSLSSTPLSTPCSSVPSSPSFCAPSPGTGGGGGAGGGGGSSQAGGAPGPPSGGPGAVGGTSGKPALEDLYWMSGYQHHLNPEALNLTPEDAVEALIGSGHHGAHHGAHHPAAAAAYEAFRGPGFAGGGGADDMGAGHHHGAHHAAHHHHAAHHHHHHHHHHGGAGHGGGAGHHVRLEERFSDDQLVSMSVRELNRQLRGFSKEEVIRLKQKRRTLKNRGYAQSCRFKRVQQRHILESEKCQLQSQVEQLKLEVGRLAKERDLYKEKYEKLAGRGGPGSAGGAGFPREPSPPQAGPGGAKGTADFFL

SEQ ID NO: 15256 - protein, 195 aa, Homo sapiens
MTDSVIYSMLELPTATQAQNDYGPQQKSSSSRPSCSCLVAIALGLLTAVLLSVLLYQWILCQGSNYSTCASCPSCPDRWMKYGNHCYYFSVEEKDWNSSLEFCLARDSHLLVITDNQEMSLLQVFLSEAFCWIGLRNNSGWRWEDGSPLNFSRISSNSFVQTCGAINKNGLQASSCEVPLHWVCKKCPFADQALF

SEQ ID NO: 15257 - protein, 323 aa, Homo sapiens
MAAELSMGPELPTSPLAMEYVNDFDLLKFDVKKEPLGRAERPGRPCTRLQPAGSVSSTPLSTPCSSVPSSPSFSPTEQKTHLEDLYWMASNYQQMNPEALNLTPEDAVEALIGSHPVPQPLQSFDSFRGAHHHHHHHHPHPHHAYPGAGVAHDELGPHAHPHHHHHHQASPPPSSAASPAQQLPTSHPGPGPHATASATAAGGNGSVEDRFSDDQLVSMSVRELNRHLRGFTKDEVIRLKQKRRTLKNRGYAQSCRYKRVQQKHHLENEKTQLIQQVEQLKQEVSRLARERDAYKVKCEKLANSGFREAGSTSDSPSSPEFFL

SEQ ID NO: 15258 - protein, 164 aa, Homo sapiens
MSVDPLSSKALKIKRELSENTPHLSDEALMGLSVRELNRHLRGLSAEEVTRLKQRRRTLKNRGYAASCRVKRVCQKEELQKQKSELEREVDKLARENAAMRLELDALRGKCEALQGFARSVAAARGPATLVAPASVITIVKSTPGSGSGPAHGPDPAHGPASCS

SEQ ID NO: 15259 - protein, 162 aa, Homo sapiens
MTTPNKGNKALKVKREPGENGTSLTDEELVTMSVRELNQHLRGLSKEEIVQLKQRRRTLKNRGYAASCRVKRVTQKEELEKQKAELQQEVEKLASENASMKLELDALRSKYEALQTFARTVARSPVAPARGPLAAGLGPLVPGKVAATSVITIVKSKTDARS

SEQ ID NO: 15260 - protein, 156 aa, Homo sapiens
MTTNPKPNKALKVKKEAGENAPVLSDDELVSMSVRELNQHLRGLTKEEVTRLKQRRRTLKNRGYAASCRIKRVTQKEELERQRVELQQEVEKLARENSSMRLELDALRSKYEALQTFARTVARGPVAPSKVATTSVITIVKSTELSSTSVPFSAAS

SEQ ID NO: 15261 - protein, 847 aa, Homo sapiens; identical to SEQ ID NO: 8367

SEQ ID NO: 15262 - protein, 160 aa, Homo sapiens
MSDNDDIEVESDEEQPRFQSAADKRAHHNALERKRRDHIKDSFHSLRDSVPSLQGEKASRAQILDKATEYIQYMRRKNHTHQQDIDDLKRQNALLEQQVRALEKARSSAQLQTNYPSSDNSLYTNAKGSTISAFDGGSDSSSESEPEEPQSRKKLRMEAS

SEQ ID NO: 15263 - protein, 477 aa, Homo sapiens; identical to SEQ ID NO: 8384

SEQ ID NO: 15264 - protein, 605 aa, Homo sapiens
MAEDWLDCPALGPGWKRREVFRKSGATCGRSDTYYQSPTGDRIRSKVELTRYLGPACDLTLFDFKQGILCYPAPKAHPVAVASKKRKKPSRPAKTRKRQVGPQSGEVRKEAPRDETKADTDTAPASFPAPGCCENCGISFSGDGTQRQRLKTLCKDCRAQRIAFNREQRMFKRVGCGECAACQVTEDCGACSTCLLQLPHDVASGLFCKCERRRCLRIVERSRGCGVCRGCQTQEDCGHCPICLRPPRPGLRRQWKCVQRRCLRGKHARRKGGCDSKMAARRRPGAQPLPPPPPSQSPEPTEPHPRALAPSPPAEFIYYCVDEDELQPYTNRRQNRKCGACAACLRRMDCGRCDFCCDKPKFGGSNQKRQKCRWRQCLQFAMKRLLPSVWSESEDGAGSPPPYRRRKRPSSARRHHLGPTLKPTLATRTAQPDHTQAPTKQEAGGGFVLPPPGTDLVFLREGASSPVQVPGPVAASTEALLQEAQCSGLSWVVALPQVKQEKADTQDEWTPGTAVLTSPVLVPGCPSKAVDPGLPSVKQEPPDPEEDKEENKDDSASKLAPEEEAGGAGTPVITEIFSLGGTRFRDTAVWLPRSKDLKKPGARKQ

SEQ ID NO: 15265 - protein, 411 aa, Homo sapiens
MRAHPGGGRCCPEQEEGESAAGGSGAGGDSAIEQGGQGSALAPSPVSGVRREGARGGGRGRGRWKQAGRGGGVCGRGRGRGRGRGRGRGRGRGRGRPPSGGSGLGGDGGGCGGGGSGGGGAPRREPVPFPSGSAGPGPRGPRATESGKRMDCPALPPGWKKEEVIRKSGLSAGKSDVYYFSPSGKKFRSKPQLARYLGNTVDLSSFDFRTGKMMPSKLQKNKQRLRNDPLNQNKGKPDLNTTLPIRQTASIFKQPVTKVTNHPSNKVKSDPQRMNEQPRQLFWEKRLQGLSASDVTEQIIKTMELPKGLQGVGPGSNDETLLSAVASALHTSSAPITGQVSAAVEKNPAVWLNTSQPLCKAFIVTDEDIRKQEERVQQVRKKLEEALMADILSRAADTEEMDIEMDSGDEA

SEQ ID NO: 15266 - protein, 291 aa, Homo sapiens
MERKRWECPALPQGWEREEVPRRSGLSAGHRDVFYYSPSGKKFRSKPQLARYLGGSMDLSTFDFRTGKMLMSKMNKSRQRVRYDSSNQVKGKPDLNTALPVRQTASIFKQPVTKITNHPSNKVKSDPQKAVDQPRQLFWEKKLSGLNAFDIAEELVKTMDLPKGLQGVGPGCTDETLLSAIASALHTSTMPITGQLSAAVEKNPGVWLNTTQPLCKAFMVTDEDIRKQEELVQQVRKRLEEALMADMLAHVEELARDGEAPLDKACAEDDDEEDEEEEEEEPDPDPEMEHV

SEQ ID NO: 15267 - protein, 194 aa, Homo sapiens
MAKSSQRKQRDCVNQCKSKPGLSTSIPLRMSSYTFKRPVTRITPHPGNEVRYHQWEESLEKPQQVCWQRRLQGLQAYSSAGELSSTLDLANTLQKLVPSYTGGSLLEDLASGLEHSCPMPHLACSSDAVEIIPAEGVGISQLLCKQFLVTEEDIRKQEGKVKTVRERLAIALIADGLANEAEKVRDQEGRPEKR

SEQ ID NO: 15268 - protein, 208 aa, Homo sapiens
MGEPAFTSFPSLPVLGKLKRNMMPWALQKKREIHMAKAHRRRAARSALPMRLTSCIFRRPVTRIRSHPDNQVRRRKGDEHLEKPQQLCAYRRLQALQPCSSQGEGSSPLHLESVLSILAPGTAGESLDRAGAERVRSPLEPTPGRFPAVAGGPTPGMGCQLPPPLSGQLVTPADIRRQARRVKKARERLAKALQADRLARRAEMLTGG

SEQ ID NO: 15269 - protein, 580 aa, Homo sapiens
MGTTGLESLSLGDRGAAPTVTSSERLVPDPPNDLRKEDVAMELERVGEDEEQMMIKRSSECNPLLQEPIASAQFGATAGTECRKSVPCGWERVVKQRLFGKTAGRFDVYFISPQGLKFRSKSSLANYLHKNGETSLKPEDFDFTVLSKRGIKSRYKDCSMAALTSHLQNQSNNSNWNLRTRSKCKKDVFMPPSSSSELQESRGLSNFTSTHLLLKEDEGVDDVNFRKVRKPKGKVTILKGIPIKKTKKGCRKSCSGFVQSDSKRESVCNKADAESEPVAQKSQLDRTVCISDAGACGETLSVTSEENSLVKKKERSLSSGSNFCSEQKTSGIINKFCSAKDSEHNEKYEDTFLESEEIGTKVEVVERKEHLHTDILKRGSEMDNNCSPTRKDFTGEKIFQEDTIPRTQIERRKTSLYFSSKYNKEALSPPRRKAFKKWTPPRSPFNLVQETLFHDPWKLLIATIFLNRTSGKMAIPVLWKFLEKYPSAEVARTADWRDVSELLKPLGLYDLRAKTIVKFSDEYLTKQWKYPIELHGIGKYGNDSYRIFCVNEWKQVHPEDHKLNKYHDWLWENHEKLSLS

SEQ ID NO: 15270 - protein, 1494 aa, Homo sapiens
MNGGKECDGGDKEGGLPAIQVPVGWQRRVDQNGVLYVSPSGSLLSCLEQVKTYLLTDGTCKCGLECPLILPKVFNFDPGAAVKQRTAEDVKADEDVTKLCIHKRKIIAVATLHKSMEAPHPSLVLTSPGGGTNATPVVPSRAATPRSVRNKSHEGITNSVMPECKNPFKLMIGSSNAMGRLYVQELPGSQQQELHPVYPRQRLGSSEHGQKSPFRGSHGGLPSPASSGSQIYGDGSISPRTDPLGSPDVFTRSNPGFHGAPNSSPIHLNRTPLSPPSVMLHGSPVQSSCAMAGRTNIPLSPTLTTKSPVMKKPMCNFSTNMEIPRAMFHHKPPQGPPPPPPPSCALQKKPLTSEKDPLGILDPIPSKPVNQNPVIINPTSFHSNVHSQVPMMNVSMPPAVVPLPSNLPLPTVKPGHMNHGSHVQRVQHSASTSLSPSPVTSPVHMMGTGIGRIEASPQRSRSSSTSSDHGNFMMPPVGPQATSSGIKVPPRSPRSTIGSPRPSMPSSPSTKSDGHHQYKDIPNPLIAGISNVLNTPSSAAFPTASAGSSSVKSQPGLLGMPLNQILNQHNAASFPASSLLSAAAKAQLANQNKLAGNNSSSSSNSGAVAGSGNTEGHSTLNTMFPPTANMLLPTGEGQSGRAALRDKLMSQQKDALRKRKQPPTTVLSLLRQSQMDSSAVPKPGPDLLRKQGQGSFPISSMSQLLQSMSCQSSHLSSNSTPGCGASNTALPCSANQLHFTDPSMNSSVLQNIPLRGEAVHCHNANTNFVHSNSPVPNHHLAGLINQIQASGNCGMLSQSGMALGNSLHPNPPQSRISTSSTPVIPNSIVSSYNQTSSEAGGSGPSSSIAIAGTNHPAITKTTSVLQDGVIVTTAAGNPLQSQLPIGSDFPFVGQEHALHFPSNSTSNNHLPHPLNPSLLSSLPISLPVNQQHLLNQNLLNILQPSAGEGDMSSINNTLSNHQLTHLQSLLNNNQMFPPNQQQQQLLQGYQNLQAFQGQSTIPCPANNNPMACLFQNFQVRMQEDAALLNKRISTQPGLTALPENPNTTLPPFQDTPCELQPRIDPSLGQQVKDGLVVGGPGDASVDAIYKAVVDAASKGMQVVITTAVNSTTQISPIPALSAMSAFTASIGDPLNLSSAVSAVIHGRNMGGVDHDGRLRNSRGARLPKNLDHGKNVNEGDGFEYFKSASCHTSKKQWDGEQSPRGERNRWKYEEFLDHPGHIHSSPCHERPNNVSTLPFLPGEQHPILLPPRNCPGDKILEENFRYNNYKRTMMSFKERLENTVERCAHINGNRPRQSRGFGELLSTAKQDLVLEEQSPSSSNSLENSLVKDYIHYNGDFNAKSVNGCVPSPSDAKSISSEDDLRNPDSPSSNELIHYRPRTFNVGDLVWGQIKGLTSWPGKLVREDDVHNSCQQSPEEGKVEPEKLKTLTEGLEAYSRVRKRNRKSGKLNNHLEAAIHEAMSELDKMSGTVHQIPQGDRQMRPPKPKRRKISR

SEQ ID NO: 15271 - protein, 1003 aa, Homo sapiens; identical to SEQ ID NO: 8402

SEQ ID NO: 15272 - protein, 354 aa, Homo sapiens
MTAVNVALIRDTKWLTLEVCREFQRGTCSRADADCKFAHPPRVCHVENGRVVACFDSLKGRCTRENCKYLHPPPHLKTQLEINGRNNLIQQKTAAAMFAQQMQLMLQNAQMSSLGSFPMTPSIPANPPMAFNPYIPHPGMGLVPAELVPNTPVLIPGNPPLAMPGAVGPKLMRSDKLEVCREFQRGNCTRGENDCRYAHPTDASMIEASDNTVTICMDYIKGRCSREKCKYFHPPAHLQARLKAAHHQMNHSAASAMALQPGTLQLIPKRSALEKPNGATPVFNPTVFHCQQALTNLQLPQPAFIPAGPILCMAPASNIVPMMHGATPTTVSAATTPATSVPFAAPTTGNQLKF

SEQ ID NO: 15273 - protein, 1230 aa, Homo sapiens
MRSKGRARKLATNNECVYGNYPEIPLEEMPDADGVASTPSLNIQEPCSPATSSEAFTPKEGSPYKAPIYIPDDIPIPAEFELRESNMPGAGLGIWTKRKIEVGEKFGPYVGEQRSNLKDPSYGWEILDEFYNVKFCIDASQPDVGSWLKYIRFAGCYDQHNLVACQINDQIFYRVVADIAPGEELLLFMKSEDYPHETMAPDIHEERQYRCEDCDQLFESKAELADHQKFPCSTPHSAFSMVEEDFQQKLESENDLQEIHTIQECKECDQVFPDLQSLEKHMLSHTEEREYKCDQCPKAFNWKSNLIRHQMSHDSGKHYECENCAKVFTDPSNLQRHIRSQHVGARAHACPECGKTFATSSGLKQHKHIHSSVKPFICEVCHKSYTQFSNLCRHKRMHADCRTQIKCKDCGQMFSTTSSLNKHRRFCEGKNHFAAGGFFGQGISLPGTPAMDKTSMVNMSHANPGLADYFGANRHPAGLTFPTAPGFSFSFPGLFPSGLYHRPPLIPASSPVKGLSSTEQTNKSQSPLMTHPQILPATQDILKALSKHPSVGDNKPVELQPERSSEERPFEKISDQSESSDLDDVSTPSGSDLETTSGSDLESDIESDKEKFKENGKMFKDKVSPLQNLASINNKKEYSNHSIFSPSLEEQTAVSGAVNDSIKAIASIAEKYFGSTGLVGLQDKKVGALPYPSMFPLPFFPAFSQSMYPFPDRDLRSLPLKMEPQSPGEVKKLQKGSSESPFDLTTKRKDEKPLTPVPSKPPVTPATSQDQPLDLSMGSRSRASGTKLTEPRKNHVFGGKKGSNVESRPASDGSLQHARPTPFFMDPIYRVEKRKLTDPLEALKEKYLRPSPGFLFHPQMSAIENMAEKLESFSALKPEASELLQSVPSMFNFRAPPNALPENLLRKGKERYTCRYCGKIFPRSANLTRHLRTHTGEQPYRCKYCDRSFSISSNLQRHVRNIHNKEKPFKCHLCDRCFGQQTNLDRHLKKHENGNMSGTATSSPHSELESTGAILDDKEDAYFTEIRNFIGNSNHGSQSPRNVEERMNGSHFKDEKALVTSQNSDLLDDEEVEDEVLLDEEDEDNDITGKTGKEPVTSNLHEGNPEDDYEETSALEMSCKTSPVRYKEEEYKSGLSALDHIRHFTDSLKMRKMEDNQYSEAELSSFSTSHVPEELKQPLHRKSKSQAYAMMLSLSDKESLHSTSHSSSNVWHSMARAAAESSAIQSISHV

SEQ ID NO: 15274 - protein, 486 aa, Homo sapiens
MVAGMLGLREEKSEDQDLQGLKDKPLKFKKVKKDKKEEKEGKHEPVQPSAHHSAEPAEAGKAETSEGSGSAPAVPEASASPKQRRSIIRDRGPMYDDPTLPEGWTRKLKQRKSGRSAGKYDVYLINPQGKAFRSKVELIAYFEKVGDTSLDPNDFDFTVTGRGSPSRREQKPPKKPKSPKAPGTGRGRGRPKGSGTTRPKAATSEGVQVKRVLEKSPGKLLVKMPFQTSPGGKAEGGGATTSTQVMVIKRPGRKRKAEADPQAIPKKRGRKPGSVVAAAAAEAKKKAVKESSIRSVQETVLPIKKRKTRETVSIEVKEVVKPLLVSTLGEKSGKGLKTCKSPGRKSKESSPKGRSSSASSPPKKEHHHHHHHSESPKAPVPLLPPLPPPPPEPESSEDPTSPPEPQDLSSSVCKEEKMPRGGSLESDGCPKEPAKTQPAVATAATAAEKYKHRGEGERKDIVSSSMPRPNREEPVDSRTPVTERVS

SEQ ID NO: 15275 - protein, 507 aa, Homo sapiens
MGRKKIQITRIMDERNRQVTFTKRKFGLMKKAYELSVLCDCEIALIIFNSSNKLFQYASTDMDKVLLKYTEYNEPHESRTNSDIVEALNKKEHRGCDSPDPDTSYVLTPHTEEKYKKINEEFDNMMRNHKIAPGLPPQNFSMSVTVPVTSPNALSYTNPGSSLVSPSLAASSTLTDSSMLSPPQTTLHRNVSPGAPQRPPSTGNAGGMLSTTDLTVPNGAGSSPVGNGFVNSRASPNLIGATGANSLGKVMPTKSPPPPGGGNLGMNSRKPDLRVVIPPSSKGMMPPLSEEEELELNTQRISSSQATQPLATPVVSVTTPSLPPQGLVYSAMPTAYNTDYSLTSADLSALQGFNSPGMLSLGQVSAWQQHHLGQAALSSLVAGGQLSQGSNLSINTNQNISIKSEPISPPRDRMTPSGFQQQQQQQQQQQPPPPPQPQPQPPQPQPRQEMGRSPVDSLSSSSSSYDGSDREDPRGDFHSPIVLGRPPNTEDRESPSVKRMRMDAWVT

SEQ ID NO: 15276 - protein, 365 aa, Homo sapiens
MGRKKIQISRILDQRNRQVTFTKRKFGLMKKAYELSVLCDCEIALIIFNSANRLFQYASTDMDRVLLKYTEYSEPHESRTNTDILETLKRRGIGLDGPELEPDEGPEEPGEKFRRLAGEGGDPALPRPRLYPAAPAMPSPDVVYGALPPPGCDPSGLGEALPAQSRPSPFRPAAPKAGPPGLVHPLFSPSHLTSKTPPPLYLPTEGRRSDLPGGLAGPRGGLNTSRSLYSGLQNPCSTATPGPPLGSFPFLPGGPPVGAEAWARRVPQPAAPPRRPPQSASSLSASLRPPGAPATFLRPSPIPCSSPGPWQSLCGLGPPCAGCPWPTAGPGRRSPGGTSPERSPGTARARGDPTSLQASSEKTQQ

SEQ ID NO: 15277 - protein, 473 aa, Homo sapiens
MGRKKIQITRIMDERNRQVTFTKRKFGLMKKAYELSVLCDCEIALIIFNSTNKLFQYASTDMDKVLLKYTEYNEPHESRTNSDIVETLRKKGLNGCDSPDPDADDSVGHSPESEDKYRKINEDIDLMISRQRLCAVPPPNFEMPVSIPVSSHNSLVYSNPVSSLGNPNLLPLAHPSLQRNSMSPGVTHRPPSAGNTGGLMGGDLTSGAGTSAGNGYGNPRNSPGLLVSPGNLNKNMQAKSPPPMNLGMNNRKPDLRVLIPPGSKNTMPSVSEDVDLLLNQRINNSQSAQSLATPVVSVATPTLPGQGMGGYPSAISTTYGTEYSLSSADLSSLSGFNTASALHLGSVTGWQQQHLHNMPPSALSQLGACTSTHLSQSSNLSLPSTQSLNIKSEPVSPPRDRTTTPSRYPQHTRHEAGRSPVDSLSSCSSSYDGSDREDHRNEFHSPIGLTRPSPDERESPSVKRMRLSEGWAT

SEQ ID NO: 15278 - protein, 521 aa, Homo sapiens
MGRKKIQIQRITDERNRQVTFTKRKFGLMKKAYELSVLCDCEIALIIFNHSNKLFQYASTDMDKVLLKYTEYNEPHESRTNADIIETLRKKGFNGCDSPEPDGEDSLEQSPLLEDKYRRASEELDGLFRRYGSTVPAPNFAMPVTVPVSNQSSLQFSNPSGSLVTPSLVTSSLTDPRLLSPQQPALQRNSVSPGLPQRPASAGAMLGGDLNSANGACPSPVGNGYVSARASPGLLPVANGNSLNKVIPAKSPPPPTHSTQLGAPSRKPDLRVITSQAGKGLMHHLTEDHLDLNNAQRLGVSQSTHSLTTPVVSVATPSLLSQGLPFSSMPTAYNTDYQLTSAELSSLPAFSSPGGLSLGNVTAWQQPQQPQQPQQPQPPQQQPPQPQQPQPQQPQQPQQPPQQQSHLVPVSLSNLIPGSPLPHVGAALTVTTHPHISIKSEPVSPSRERSPAPPPPAVFPAARPEPGDGLSSPAGGSYETGDRDDGRGDFGPTLGLLRPAPEPEAEGSAVKRMRLDTWTLK

SEQ ID NO: 15279 - protein, 390 aa, Homo sapiens; identical to SEQ ID NO: 8520

SEQ ID NO: 15280 - protein, 477 aa, Homo sapiens
MAQRYDELPHYGGMDGVGVPASMYGDPHAPRPIPPVHHLNHGPPLHATQHYGAHAPHPNVMPASMGSAVNDALKRDKDAIYGHPLFPLLALVFEKCELATCTPREPGVAGGDVCSSDSFNEDIAVFAKQVRAEKPLFSSNPELDNLMIQAIQVLRFHLLELEKVHELCDNFCHRYISCLKGKMPIDLVIDERDGSSKSDHEELSGSSTNLADHNPSSWRDHDDATSTHSAGTPGPSSGGHASQSGDNSSEQGDGLDNSVASPGTGDDDDPDKDKKRQKKRGIFPKVATNIMRAWLFQHLTHPYPSEEQKKQLAQDTGLTILQVNNWFINARRRIVQPMIDQSNRAGFLLDPSVSQGAAYSPEGQPMGSFVLDGQQHMGIRPAGLQSMPGDYVSQGGPMGMSMAQPSYTPPQMTPHPTQLRHGPPMHSYLPSHPHHPAMMMHGGPPTHPGMTMSAQSPTMLNSVDPNVGGQVMDIHAQ

SEQ ID NO: 15281 - protein, 375 aa, Homo sapiens; identical to SEQ ID NO: 8528

SEQ ID NO: 15282 - protein, 274 aa, Homo sapiens
MGPELGWGHPRGGDVCSSDSFNEDNTAFAKQVRSERPFFSSNPELDNLMIQAIQVLRFHLLELEKGKMPIDLVIEDRDGGCREDFEDYPASCPSLPDQNNIWIRDHEDSGSVHLGTPGPSSGGLASQSGDNSSDQGVGLDTSVASPSSGGEDEDLDQEPRRNKKRGIFPKVATNIMRAWLFQHLSHPYPSEEQKKQLAQDTGLTILQVNNWFINARRRIVQPMIDQSNRTGQGAAFSPEGQPIGGYTETEPHVAFRAPASVGMSLNSEGEWHYL

SEQ ID NO: 15283 - protein, 358 aa, Homo sapiens
MARRYDELPHYPSIADGPAALAGFPEAVPAAPGPYGPHRPPQPLPPGLDSDGLKRDKDEIYGHPLFPLLALVFEKCELATCSPRDGAGAGLGTPRGGDVCSSDSFNEDNTAFAKQVRSERPFFSSNPELDNLMIQAIQVLRFHLLELEKGKMPIDLVIEDRDGGCREDFEDYPASCLSLPDQNNIWIRDHEDSGSVHLGTPGPSSGGLASQSGDNSSDQGVGLDTSVASPSSGGEDEDLDQEPRRNKKRGIFPKVATNIMRAWLFQHLWHPYPSEEQKKQLVQDTGLTILQVNNWFINARRRMVQPMIDQSNRIGQGAAFSPEGQPIGGYTETEPHVAFRPPASVGMSLNLEGEWHYL

SEQ ID NO: 15284 - protein, 254 aa, Homo sapiens
MDPAASSCMRSLQPPAPVWGCLRNPHSEGNGASGLPHYPPTPFSFHQKPDFLATATAAYPDFSASCLAATPHSLPQEEHIFTEQHPAFPQSPNWHFPVSDARRRPNSGPAGGSKEMGTSSLGLVDTTGGPGDDYGVLGSTANETEKKSSRRRKESSDNQENRGKPEGSSKARKERTAFTKEQLRELEAEFAHHNYLTRLRRYEIAVNLDLSERQVKVWFQNRRMKWKRVKGGQPISPNGQDPEDGDSTASPSSE

SEQ ID NO: 15285 - protein, 304 aa, Homo sapiens
MEHPLFGCLRSPHATAQGLHPFSQSSLALHGRSDHMSYPELSTSSSSCIIAGYPNEEGMFASQHHRGHHHHHHHHHHHHHQQQQHQALQTNWHLPQMSSPPSAARHSLCLQPDSGGPPELGSSPPVLCSNSSSLGSSTPTGAACAPGDYGRQALSPAEAEKRSGGKRKSDSSDSQEGNYKSEVNSKPRKERTAFTKEQIRELEAEFAHHNYLTRLRRYEIAVNLDLTERQVKVWFQNRRMKWKRVKGGQQGAAAREKELVNVKKGTLLPSELSGIGAATLQQTGDSIANEDSHDSDHSSEHAHL

SEQ ID NO: 15286 - protein, 268 aa, Homo sapiens
MAQPLCPPLSESWMLSAAWGPTRRPPPSDKDCGRSLVSSPDSWGSTPADSPVASPARPGTLRDPRAPSVGRRGARSSRLGSGQRQSASEREKLRMRTLARALHELRRFLPPSVAPAGQSLTKIETLRLAIRYIGHLSAVLGLSEESLQRRCRQRGDAGSPRGCPLCPDDCPAQMQTRTQAEGQGQGRGLGLVSAVRAGASWGSPPACPGARAAPEPRDPPALFAEAACPEGQAMEPSPPSPLLPGDVLALLETWMPLSPLEWLPEEPK

SEQ ID NO: 15287 - protein, 397 aa, Homo sapiens
MAQSPPPQSLLGHDHWIFAQGWGWAGHWDSTSPASSSDSSGSCPCDGARGLPQPQPPSCSSRAAEAAATTPRRARTGPAGGQRQSASEREKLRMRTLARALHELRRFLPPSLAPAGQSLTKIETLRLAIRYIGHLSAVLGLSEESLQCRRRQRGDAGSPWGCPLCPDRGPAEAQTQAEGQGQGQGQGQGQGQGQGQGQGQGQGQGRRPGLVSAVLAEASWGSPSACPGAQAAPERLGRGVHDTDPWATPPYCPKIQSPPYSSQGTTSDASLWTPPQGCPWTQSSPEPRNPPVPWTAAPATLELAAVYQGLSVSPEPCLSLGAPSLLPHPSCQRLQPQTPGRCWSHSAEVVPNSEDQGPGAAFQLSEASPPQSSGLRFSGCPELWQEDLEGARLGIFY

SEQ ID NO: 15288 - protein, 1857 aa, Homo sapiens
MARKKLKKFTTLEIVLSVLLLVLFIISIVLIVLLAKESLKSTAPDPGTTGTPDPGTTGTPDPGTTGTTHARTTGPPDPGTTGTTPVSAECPVVNELERINCIPDQPPTKATCDQRGCCWNPQGAVSVPWCYYSKNHSYHVEGNLVNTNAGFTARLKNLPSSPVFGSNVDNVLLTAEYQTSNRFHFKLTDQTNNRFEVPHEHVQSFSGNAAASLTYQVEISRQPFSIKVTRRSNNRVLFDSSIGPLLFADQFLQLSTRLPSTNVYGLGEHVHQQYRHDMNWKTWPIFNRDTTPNGNGTNLYGAQTFFLCLEDASGLSFGVFLMNSNAMEVVLQPAPAITYRTIGGILDFYVFLGNTPEQVVQEYLELIGRPALPSYWALGFHLSRYEYGTLDNMREVVERNRAAQLPYDVQHADIDYMDERRDFTYDSVDFKGFPEFVNELHNNGQKLVIIVDPAISNNSSSSKPYGPYDRGSDMKIWVNSSDGVTPLIGEVWPGQTVFPDYTNPNCAVWWTKEFELFHNQVEFDGIWIDMNEVSNFVDGSVSGCSTNNLNNPPFTPRILDGYLFCKTLCMDAVQHWGKQYDIHNLYGYSMAVATAEAAKTVFPNKRSFILTRSTFAGSGKFAAHWLGDNTATWDDLRWSIPGVLEFNLFGIPMVGPDICGFALDTPEELCRRWMQLGAFYPFSRNHNGQGYKDQDPASFGADSLLLNSSRHYLNIRYTLLPYLYTLFFRAHSRGDTVARPLLHEFYEDNSTWDVHQQFLWGPGLLITPVLDEGAEKVMAYVPDAVWYDYETGSQVRWRKQKVEMELPGDKIGLHLRGGYIFPTQQPNTTTLASRKNPLGLIIALDENKEAKGELFWDNGETKDTVANKVYLLCEFSVTQNRLEVNISQSTYKDPNNLAFNEIKILGTEEPSNVTVKHNGVPSQTSPTVTYDSNLKVAIITDIDLLLGEAYTVEWSIKIRDEEKIDCYPDENGASAENCTARGCIWEASNSSGVPFCYFVNDLYSVSDVQYNSHGATADISLKSSVYANAFPSTPVNPLRLDVTYHKNEMLQFKIYDPNKNRYEVPVPLNIPSMPSSTPEGQLYDVLIKKNPFGIEIRRKSTGTIIWDSQLLGFTFSDMFIRISTRLPSKYLYGFGETEHRSYRRDLEWHTWGMFSRDQPPGYKKNSYGVHPYYMGLEEDGSAHGVLLLNSNAMDVTFQPLPALTYRTTGGVLDFYVFLGPTPELVTQQYTELIGRPVMVPYWSLGFQLCRYGYQNDSEIASLYDEMVAAQIPYDVQYSDIDYMERQLDFTLSPKFAGFPALINRMKADGMRVILILDPAISGNETQPYPAFTRGVEDDVFIKYPNDGDIVWGKVWPDFPDVVVNGSLDWDSQVELYRAYVAFPDFFRNSTAKWWKREIEELYNNPQNPERSLKFDGMWIDMNEPSSFVNGAVSPGCRDASLNHPPYMPHLESRDRGLSSKTLCMESQQILPDGSLVQHYNVHNLYGWSQTRPTYEAVQEVTGQRGVVITRSTFPSSGRWAGHWLGDNTAAWDQLKKSIIGMMEFSLFGISYTGADICGFFQDAEYEMCVRWMQLGAFYPFSRNHNTIGTRRQDPVSWDVAFVNISRTVLQTRYTLLPYLYTLMHKAHTEGVTVVRPLLHEFVSDQVTWDIDSQFLLGPAFLVSPVLERNARNVTAYFPRARWYDYYTGVDINARGEWKTLPAPLDHINLHVRGGYILPWQEPALNTHLSRQKFMGFKIALDDEGTAGGWLFWDDGQSIDTYGKGLYYLASFSASQNTMQSHIIFNNYITGTNPLKLGYIEIWGVGSVPVTSVSISVSGMVITPSFNNDPTTQVLSIDVTDRNISLHNFTSLTWISTL

SEQ ID NO: 15289 - protein, 3026 aa, Homo sapiens
MEEKQQIILANQDGGTVAGAAPTFFVILKQPGNGKTDQGILVTNQDACALASSVSSPVKSKGKICLPADCTVGGITVTLDNNSMWNEFYHRSTEMILTKQGRRMFPYCRYWITGLDSNLKYILVMDISPVDNHRYKWNGRWWEPSGKAEPHVLGRVFIHPESPSTGHYWMHQPVSFYKLKLTNNTLDQEGHIILHSMHRYLPRLHLVPAEKAVEVIQLNGPGVHTFTFPQTEFFAVTAYQNIQITQLKIDYNPFAKGFRDDGLNNKPQRDGKQKNSSDQEGNNISSSSGHRVRLTEGQGSEIQPGDLDPLSRGHETSGKGLEKTSLNIKRDFLGFMDTDSALSEVPQLKQEISECLIASSFEDDSRVASPLDQNGSFNVVIKEEPLDDYDYELGECPEGVTVKQEETDEETDVYSNSDDDPILEKQLKRHNKVDNPEADHLSSKWLPSSPSGVAKAKMFKLDTGKMPVVYLEPCAVTRSTVKISELPDNMLSTSRKDKSSMLAELEYLPTYIENSNETAFCLGKESENGLRKHSPDLRVVQKYPLLKEPQWKYPDISDSISTERILDDSKDSVGDSLSGKEDLGRKRTTMLKIATAAKVVNANQNASPNVPGKRGRPRKLKLCKAGRPPKNTGKSLISTKNTPVSPGSTFPDVKPDLEDVDGVLFVSFESKEALDIHAVDGTTEESSSLQASTTNDSGYRARISQLEKELIEDLKTLRHKQVIHPGLQEVGLKLNSVDPTMSIDLKYLGVQLPLAPATSFPFWNLTGTNPASPDAGFPFVSRTGKTNDFTKIKGWRGKFHSASASRNEGGNSESSLKNRSAFCSDKLDEYLENEGKLMETSMGFSSNAPTSPVVYQLPTKSTSYVRTLDSVLKKQSTISPSTSYSLKPHSVPPVSRKAKSQNRQATFSGRTKSSYKSILPYPVSPKQKYSHVILGDKVTKNSSGIISENQANNFVVPTLDENIFPKQISLRQAQQQQQQQQGSRPPGLSKSQVKLMDLEDCALWEGKPRTYITEERADVSLTTLLTAQASLKTKPIHTIIRKRAPPCNNDFCRLGCVCSSLALEKRQPAHCRRPDCMFGCTCLKRKVVLVKGGSKTKHFQRKAAHRDPVFYDTLGEEAREEEEGIREEEEQLKEKKKRKKLEYTICETEPEQPVRHYPLWVKVEGEVDPEPVYIPTPSVIEPMKPLLLPQPEVLSPTVKGKLLTGIKSPRSYTPKPNPVIREEDKDPVYLYFESMMTCARVRVYERKKEDQRQPSSSSSPSPSFQQQTSCHSSPENHNNAKEPDSEQQPLKQLTCDLEDDSDKLQEKSWKSSCNEGESSSTSYMHQRSPGGPTKLIEIISDCNWEEDRNKILSILSQHINSNMPQSLKVGSFIIELASQRKSRGEKNPPVYSSRVKISMPSCQDQDDMAEKSGSETPDGPLSPGKMEDISPVQTDALDSVRERLHGGKGLPFYAGLSPAGKLVAYKRKPSSSTSGLIQVASNAKVAASRKPRTLLPSTSNSKMASSSGTATNRPGKNLKAFVPAKRPIAARPSPGGVFTQFVMSKVGALQQKIPGVSTPQTLAGTQKFSIRPSPVMVVTPVVSSEPVQVCSPVTAAVTTTTPQVFLENTTAVTPMTAISDVETKETTYSSGATTTGVVEVSETNTSTSVTSTQSTATVNLTKTTGITTPVASVAFPKSLVASPSTITLPVASTASTSLVVVTAAASSSMVTTPTSSLGSVPIILSGINGSPPVSQRPENAAQIPVATPQVSPNTVKRAGPRLLHPNGQIVQLLPLHQLRGSNTQPNLQPVMFRNPGSVMGIRLPAPSKPSETPPSSTSSSAFSVMNPVIQAVGSSSAVNVITQAPSLLSSGASFVSQAGTLTLRISPPEPQSFASKTGSETKITYSSGGQPVGTASLIPLQSGSFALLQLPGQKPVPSSILQHVASLQMKRESQNPDQKDETNSIKREQETKKVLQSEGEAVDPEANVIKQNSGAATSEETLNDSLEDRGDHLDEECLPEEGCATVKPSEHSCITGSHTDQDYKDVNEEYGARNRKSSKEKVAVLEVRTISEKASNKTVQNLSKVQHQKLGDVKVEQQKGFDNPEENSSEFPVTFKEESKFELSGSKVMEQQSNLQPEAKEKECGDSLEKDRERWRKHLKGPLTRKCVGASQECKKEADEQLIKETKTCQENSDVFQQEQGISDLLGKSGITEDARVLKTECDSWSRISNPSAFSIVPRRAAKSSRGNGHFQGHLLLPGEQIQPKQEKKGGRSSADFTVLDLEEDDEDDNEKTDDSIDEIVDVVSDYQSEEVDDVEKNNCVEYIEDDEEHVDIETVEELSEEINVAHLKTTAAHTQSFKQPSCTHISADEKAAERSRKAPPIPLKLKPDYWSDKLQKEAEAFAYYRRTHTANERRRRGEMRDLFEKLKITLGLLHSSKVSKSLILTRAFSEIQGLTDQADKLIGQKNLLTRKRNILIRKVSSLSGKTEEVVLKKLEYIYAKQQALEAQKRKKKMGSDEFDISPRISKQQEGSSASSVDLGQMFINNRRGKPLILSRKKDQATENTSPLNTPHTSANLVMTPQGQLLTLKGPLFSGPVVAVSPDLLESDLKPQVAGSAVALPENDDLFMMPRIVNVTSLATEGGLVDMGGSKYPHEVPDSKPSDHLKDTVRNEDNSLEDKGRISSRGNRDGRVTLGPTQVFLANKDSGYPQIVDVSNMQKAQEFLPKKISGDMRGIQYKWKESESRGERVKSKDSSFHKLKMKDLKDSSIEMELRKVTSAIEEAALDSSELLTNMEDEDDTDETLTSLLNEIAFLNQQLNDDSVGLAELPSSMDTEFPGDARRAFISKVPPGSRATFQVEHLGTGLKELPDVQGESDSISPLLLHLEDDDFSENEKQLAEPASEPDVLKIVIDSEIKDSLLSNKKAIDGGKNTSGLPAEPESVSSPPTLHMKTGLENSNSTDTLWRPMPKLAPLGLKVANPSSDADGQSLKVMPCLAPIAAKVGSVGHKMNLTGNDQEGRESKVMPTLAPVVAKLGNSGASPSSAGK

SEQ ID NO: 15290 - protein, 512 aa, Homo sapiens; identical to SEQ ID NO: 8725

SEQ ID NO: 15291 - protein, 545 aa, Homo sapiens
MAEASSLGRQSPRVVSCLEHSLCPGEPGLQTTAVVSMGSGDHQFNLAEILSQNYSVRGECEEASRCPDKPKEELEKDFISQSNDMPFDELLALYGYEASDPISDRESEGGDVAPNLPDMTLDKEQIAKDLLSGEEEEETQSSADDLTPSVTSHEASDLFPNRSGSRFLADEDREPGSSASSDTEEDSLPANKCKKEIMVGPQFQADLSNLHLNRHCEKIYENEDQLLWDPSVLPEREVEEFLYRAVKRRWHEMAGPQLPEGEAVKDSEQALYELVKCNFNVEEALRRLRFNVKVIRDGLCAWSEEECRNFEHGFRVHGKNFHLIQANKVRTRSVGECVEYYYLWKKSERYDYFAQQTRLGRRKYVPSGTTDADQDLDGSDPDGPGRPRPEQDTLTGMRTDPLSVDGTAGGLDEPGVASDGLPSSEPGPCSFQQLDESPAVPLSHRPPALADPASYQPAVTAPEPDASPRLAVDFALPKELPLISSHVDLSGDPEETVAPAQVALSVTEFGLIGIGDVNPFLAAHPTCPAPGLHSEPLSHCNVMTC

SEQ ID NO: 15292 - protein, 550 aa, Homo sapiens
MAEASFGSSSPVGSLSSEDHDFDPTAEMLVHDYDDERTLEEEEMMDEGKNFSSEIEDLEKEGTMPLEDLLAFYGYEPTIPAVANSSANSSPSELADELPDMTLDKEEIAKDLLSGDDEETQSSADDLTPSVTSHETSDFFPRPLRSNTACDGDKESEVEDVETDSGNSPEDLRKEIMIGLQYQAEIPPYLGEYDGNEKVYENEDQLLWCPDVVLESKVKEYLVETSLRTGSEKIMDRISAGTHTRDNEQALYELLKCNHNIKEAIERYCCNGKASQEGMTAWTEEECRSFEHALMLFGKDFHLIQKNKVRTRTVAECVAFYYMWKKSERYDYFAQQTRFGKKRYNHHPGVTDYMDRLVDETEALGGTVNASALTSNRPEPIPDQQLNILNSFTASDLTALTNSVATVCDPTDVNCLDDSFPPLGNTPRGQVNHVPVVTEELLTLPSNGESDCFNLFETGFYHSELNPMNMCSEESERPAKRLKMGIAVPESFMNEVSVNNLGVDFENHTHHITSAKMAVSVADFGSLSANETNGFISAHALHQHAALHSE

SEQ ID NO: 15293 - protein, 1132 aa, Homo sapiens
MIATPLKHSRIYLPPEASSQRRNLPMDAIFFDSIPSGTLTPVKDLVKYQNSSLKLNDHKKNQFLKMTTFNNKNIFQSTMLTEATTSNSSLDISAIKPNKDGLKNKANYESPGKIFLRMKEKVLRDKQEQPSRNSSLLEPQKSGNNETFTPNRVEKKKLQHTYLCEEKENNKSFQSDDSSLRASVQGVPLESSNNDIFLPVKQKIQCQQEKKAPLHNLTYELPTLNQEQENFLAVEARNKTLTRAQLAKQIFHSKESIVATTKSKKDTFVLESVDSADEQFQNTNAETLSTNCIPIKNGSLLMVSDSERTTEGTSQQKVKEGNGKTVPGETGLPGSMKDTCKIVLATPRLHITIPRRSKRNISKLSPPRIFQTVTNGLKKNQVVQLQEWMIKSINNNTAICVEGKLIDVTNIYWHSNVIIERIEHNKLRTISGNVYILKGMIDQISMKEAGYPNYLIRKFMFGFPENWKEHIDNFLEQLRAGEKNREKTKQKQKTGRSVRDIRKSMKNDARENQTDTAQRATTTYDFDCDNLELKSNKHSESPGATELNMCHSNCQNKPTLRFPDDQVNNTIQNGGGDDLSNQELIGKKEYKMSSKKLKIGERTNERIIKSQKQETTEELDVSIDILTSREQFFSDEERKYMAINQKKAYILVTPLKSRKVIEQRCMRYNLSAGTIKAVTDFVIPECQKKSPISKSMGTLENTFEGHKSKNKEDCDERDLLTVNRKIKISNLEKEQMLTSDFKKNTRLLPKLKKIENQVAMSFYKHQSSPDLSSEESETEKEIKRKAEVKKTKAGNTKEAVVHLRKSTRNTSNIPVILEPETEESENEFYIKQKKARPSVKETLQKSGVRKEFPITEAVGSDKTNRHPLECLPGLIQDKEWNEKELQKLHCAFASLPKHKPGFWSEVAAAVGSRSPEECQRKYMENPRGKGSQKHVTKKKPANSKGQNGKRGDADQKQTIKITAKVGTLKRKQQMREFLEQLPKDDHDDFFSTTPLQHQRILLPSFQDSEDDDDILPNMDKNPTTPSSVIFPLVKTPQCQHVSPGMLGSINRNDCDKYVFRMQKYHKSNGGIVWGNIKKKLVETDFSTPTPRRKTPFNTDLGENSGIGKLFTNAVESLDEEEKDYYFSNSDSA

SEQ ID NO: 15294 - protein, 526 aa, Homo sapiens
MQSESGIVPDFEVGEEFHEEPKTYYELKSQPLKSSSSAEHPGASKPPISSSSMTSRILLRQQLMREQMQEQERREQQQKLQAAQFMQQRVPVSQTPAINVSVPTTLPSATQVPMEVLKVQTHLENPTKYHIQQAQRQQVKQYLSTTLANKHANQVLSLPCPNQPGDHVMPPVPGSSAPNSPMAMLTLNSNCEKEGFYKFEEQNRAESECPGMNTHSRASCMQMDDVIDDIISLESSYNEEILGLMDPALQMANTLPVSGNLIDLYGNQGLPPPGLTISNSCPANLPNIKRELTACIFPTESEARALAKERQKKDNHNLIERRRRFNINDRIKELGTLIPKSNDPDMRWNKGTILKASVDYIRKLQREQQRAKELENRQKKLEHANRHLLLRIQELEMQARAHGLSLIPSTGLCSPDLVNRIIKQEPVLENCSQDLLQHHADLTCTTTLDLTDGTITFNNNLGTGTEANQAYSVPTKMGSKLEDILMDDTLSPVGVTDPLLSSVSPGASKTSSRRSSMSMEETEHTC

SEQ ID NO: 15295 - protein, 232 aa, Homo sapiens
MATAESRALQFAEGAAFPAYRAPHAGGALLPPPSPAAALLPAPPAGPGPATFAGFLGRDPGPAPPPPASLGSPAPPKGAAAPSASQRRKRTSFSAEQLQLLELVFRRTRYPDIHLRERLAALTLLPESRIQVWFQNRRAKSRRQSGKSFQPLARPEIILNHCAPGTETKCLKPQLPLEVDVNCLPEPNGVGGGISDSSSQGQNFETCSPLSEDIGSKLDSWEEHIFSAFGNF

SEQ ID NO: 15296 - protein, 352 aa, Homo sapiens
MNTIVFNKLSGAVLFEDGGASERERGGRPYSGVLDSPHARPEVGIPDGPPLKDNLGLRHRRTGARQNGGKVRHKRQALQDMARPLKQWLYKHRDNPYPTKTEKILLALGSQMTLVQVSNWFANARRRLKNTVRQPDLSWALRIKLYNKYVQGNAERLSVSSDDSCSEDGENPPRTHMNEGGYNTPVHHPVIKSENSVIKAGVRPESRASEDYVAPPKYKSSLLNRYLNDSLRHVMATNTTMMGKTRQRNHSGSFSSNEFEEELVSPSSSETEGNFVYRTDTLENGSNKGESAANRKGPSKDDTYWKEINAAMALTNLAQGKDKLQGTTSCIIQKSSHIAEVKTVKVPLVQQF

SEQ ID NO: 15297 - protein, 559 aa, Homo sapiens
MDNQCTVQVRLELGHRAQLRKKPTTEGFTHDWMVFVRGPEQCDIQHFVEKVVFWLHDSFPKPRRVCKEPPYKVEESGYAGFIMPIEVHFKNKEEPRKVCFTYDLFLNLEGNPPVNHLRCEKLTFNNPTTEFRYKLLRAGGVMVMPEGADTVSRPSPDYPMLPTIPLSAFSDPKKTKPSHGSKDANKESSKTSKPHKVTKEHRERPRKDSESKSSSKELEREQAKSSKDTSRKLGEGRLPKEEKAPPPKAAFKEPKMALKETKLESTSPKGGPPPPPPPPPRASSKRPATADSPKPSAKKQKKSSSKGSRSAPGTSPRTSSSSSFSDKKPAKDKSSTRGEKVKAESEPREAKKALEVEESNSEDEASFKSESAQSSPSNSSSSSDSSSDSDFEPSQNHSQGPLRSMVEDLQSEESDEDDSSSGEEAAGKTNPGRDSRLSFSDSESDNSADSSLPSREPPPPQKPPPPNSKVSGRRSPESCSKPEKILKKGTYDKAYTDELVELHRRLMALRERNVLQQIVNLIEETGHFNVTNTTFDFDLFSLDETTVRKLQSCLEAVAT

SEQ ID NO: 15298 - protein, 1068 aa, Homo sapiens
MVSSDRPVSLEDEVSHSMKEMIGGCCVCSDERGWAENPLVYCDGHGCSVAVHQACYGIVQVPTGPWFCRKCESQERAARVRCELCPHKDGALKRTDNGGWAHVVCALYIPEVQFANVSTMEPIVLQSVPHDRYNKTCYICDEQGRESKAATGACMTCNKHGCRQAFHVTCAQFAGLLCEEEGNGADNVQYCGYCKYHFSKLKKSKRGSNRSYDQSLSDSSSHSQDKHHEKEKKKYKEKDKHKQKHKKQPEPSPALVPSLTVTTEKTYTSTSNNSISGSLKRLEDTTARFTNANFQEVSAHTSSGKDVSETRGSEGKGKKSSAHSSGQRGRKPGGGRNPGTTVSAASPFPQGSFSGTPGSVKSSSGSSVQSPQDFLSFTDSDLRNDSYSHSQQSSATKDVHKGESGSQEGGVNSFSTLIGLPSTSAVTSQPKSFENSPGDLGNSSLPTAGYKRAQTSGIEEETVKEKKRKGNKQSKHGPGRPKGNKNQENVSHLSVSSASPTSSVASAAGSITSSSLQKSPTLLRNGSLQSLSVGSSPVGSEISMQYRHDGACPTTTFSELLNAIHNGIYNSNDVAVSFPNVVSGSGSSTPVSSSHLPQQSSGHLQQVGALSPSAVSSAAPAVATTQANTLSGSSLSQAPSHMYGNRSNSSMAALIAQSENNQTDQDLGDNSRNLVGRGSSPRGSLSPRSPVSSLQIRYDQPGNSSLENLPPVAASIEQLLERQWSEGQQFLLEQGTPSDILGMLKSLHQLQVENRRLEEQIKNLTAKKERLQLLNAQLSVPFPTITANPSPSHQIHTFSAQTAPTTDSLNSSKSPHIGNSFLPDNSLPVLNQDLTSSGQSTSSSSALSTPPPAGQSPAQQGSGVSGVQQVNGVTVGALASGMQPVTSTIPAVSAVGGIIGALPGNQLAINGIVGALNGVMQTPVTMSQNPTPLTHTTVPPNATHPMPATLTNSASGLGLLSDQQRQILIHQQQFQQLLNSQQLTPEQHQAFLYQLMQHHHQQHHQPELQQLQIPGPTQIPINNLLAGTQAPPLHTATTNPFLTIHGDNASQKVARLSDKTGPVAQEKS

SEQ ID NO: 15299 - protein, 90 aa, Homo sapiens
MRDPVSSQYSSFLFWRMPIPELDLSELEGLGLSDTATYKVKDSSVGKMIGQATAADQEKNPEGDGLLEYSTFNFWRAPIASIHSFELDLL

SEQ ID NO: 15300 - protein, 568 aa, Homo sapiens
MASSCAVQVKLELGHRAQVRKKPTVEGFTHDWMVFVRGPEHSNIQHFVEKVVFHLHESFPRPKRVCKDPPYKVEESGYAGFILPIEVYFKNKEEPRKVRFDYDLFLHLEGHPPVNHLRCEKLTFNNPTEDFRRKLLKAGGDPNRSIHTSSSSSSSSSSSSSSSSSSSSSSSSSSSSSSSSSSSSSSSSSSTSFSKPHKLMKEHKEKPSKDSREHKSAFKEPSRDHNKSSKESSKKPKENKPLKEEKIVPKMAFKEPKPMSKEPKPDSNLLTITSGQDKKAPSKRPPISDSEELSAKKRKKSSSEALFKSFSSAPPLILTCSADKKQIKDKSHVKMGKVKIESETSEKKKSTLPPFDDIVDPNDSDVEENISSKSDSEQPSPASSSSSSSSSFTPSQTRQQGPLRSIMKDLHSDDNEEESDEVEDNDNDSEMERPVNRGGSRSRRVSLSDGSDSESSSASSPLHHEPPPPLLKTNNNQILEVKSPIKQSKSDKQIKNGECDKAYLDELVELHRRLMTLRERHILQQIVNLIEETGHFHITNTTFDFDLCSLDKTTVRKLQSYLETSGTS

SEQ ID NO: 15301 - protein, 1824 aa, Homo sapiens
MSAGGRDEERRKLADIIHHWNANRLDLFEISQPTEDLEFHGVMRFYFQDKAAGNFATKCIRVSSTATTQDVIETLAEKFRPDMRMLSSPKYSLYEVHVSGERRLDIDEKPLVVQLNWNKDDREGRFVLKNENDAIPPKKAQSNGPEKQEKEGVIQNFKRTLSKKEKKEKKKREKEALRQASDKDDRPFQGEDVENSRLAAEVYKDMPETSFTRTISNPEVVMKRRRQQKLEKRMQEFRSSDGRPDSGGTLRIYADSLKPNIPYKTILLSTTDPADFAVAEALEKYGLEKENPKDYCIARVMLPPGAQHSDEKGAKEIILDDDECPLQIFREWPSDKGILVFQLKRRPPDHIPKKTKKHLEGKTPKGKERADGSGYGSTLPPEKLPYLVELSPGRRNHFAYYNYHTYEDGSDSRDKPKLYRLQLSVTEVGTEKLDDNSIQLFGPGIQPHHCDLTNMDGVVTVTPRSMDAETYVEGQRISETTMLQSGMKVQFGASHVFKFVDPSQDHALAKRSVDGGLMVKGPRHKPGIVQETTFDLGGDIHSGTALPTSKSTTRLDSDRVSSASSTAERGMVKPMIRVEQQPDYRRQESRTQDASGPELILPASIEFRESSEDSFLSAIINYTNSSTVHFKLSPTYVLYMACRYVLSNQYRPDISPTERTHKVIAVVNKMVSMMEGVIQKQKNIAGALAFWMANASELLNFIKQDRDLSRITLDAQDVLAHLVQMAFKYLVHCLQSELNNYMPAFLDDPEENSLQRPKIDDVLHTLTGAMSLLRRCRVNAALTIQLFSQLFHFINMWLFNRLVTDPDSGLCSHYWGAIIRQQLGHIEAWAEKQGLELAADCHLSRIVQATTLLTMDKYAPDDIPNINSTCFKLNSLQLQALLQNYHCAPDEPFIPTDLIENVVTVAENTADELARSDGREVQLEEDPDLQLPFLLPEDGYSCDVVRNIPNGLQEFLDPLCQRGFCRLIPHTRSPGTWTIYFEGADYESHLLRENTELAQPLRKEPEIITVTLKKQNGMGLSIVAAKGAGQDKLGIYVKSVVKGGAADVDGRLAAGDQLLSVDGRSLVGLSQERAAELMTRTSSVVTLEVAKQGAIYHGLATLLNQPSPMMQRISDRRGSGKPRPKSEGFELYNNSTQNGSPESPQLPWAEYSEPKKLPGDDRLMKNRADHRSSPNVANQPPSPGGKSAYASGTTAKITSVSTGNLCTEEQTPPPRPEAYPIPTQTYTREYFTFPASKSQDRMAPPQNQWPNYEEKPHMHTDSNHSSIAIQRVTRSQEELREDKAYQLERHRIEAAMDRKSDSDMWINQSSSLDSSTSSQEHLNHSSKSVTPASTLTKSGPGRWKTPAAIPATPVAVSQPIRTDLPPPPPPPPVHYAGDFDGMSMDLPLPPPPSANQIGLPSAQVAAAERRKREEHQRWYEKEKARLEEERERKRREQERKLGQMRTQSLNPAPFSPLTAQQMKPEKPSTLQRPQETVIRELQPQQQPRTIERRDLQYITVSKEELSSGDSLSPDPWKRDAKEKLEKQQQMHIVDMLSKEIQELQSKPDRSAEESDRLRKLMLEWQFQKRLQESKQKDEDDEEEEDDDVDTMLIMQRLEAERRARLQDEERRRQQQLEEMRKREAEDRARQEEERRRQEEERTKRDAEEKRRQEEGYYSRLEAERRRQHDEAARRLLEPEAPGLCRPPLPRDYEPPSPSPAPGAPPPPPQRNASYLKTQVLSPDSLFTAKFVAYNEEEEEEDCSLAGPNSYPGSTGAAVGAHDACRDAKEKRSKSQDADSPGSSGAPENLTFKERQRLFSQGQDVSNKVKASRKLTELENELNTK

SEQ ID NO: 15302 - protein, 1093 aa, Homo sapiens
MKEMVGGCCVCSDERGWAENPLVYCDGHACSVAVHQACYGIVQVPTGPWFCRKCESQERAARVRCELCPHKDGALKRTDNGGWAHVVCALYIPEVQFANVLTMEPIVLQYVPHDRFNKTCYICEEQGRESKAASGACMTCNRHGCRQAFHVTCAQMAGLLCEEEVLEVDNVKYCGYCKYHFSKMKTSRHSSGGGGGGAGGGGGSMGGGGSGFISGRRSRSASPSTQQEKHPTHHERGQKKSRKDKERLKQKHKKRPESPPSILTPPVVPTADKVSSSASSSSHHEASTQETSESSRESKGKKSSSHSLSHKGKKLSSGKGVSSFTSASSSSSSSSSSSGGPFQPAVSSLQSSPDFSAFPKLEQPEEDKYSKPTAPAPSAPPSPSAPEPPKADLFEQKVVFSGFGPIMRFSTTTSSSGRARAPSPGDYKSPHVTGSGASAGTHKRMPALSATPVPADETPETGLKEKKHKASKRSRHGPGRPKGSRNKEGTGGPAAPSLPSAQLAGFTATAASPFSGGSLVSSGLGGLSSRTFGPSGSLPSLSLESPLLGAGIYTSNKDPISHSGGMLRAVCSTPLSSSLLGPPGTSALPRLSRSPFTSTLPSSSASISTTQVFSLAGSTFSLPSTHIFGTPMGAVNPLLSQAESSHTEPDLEDCSFRCRGTSPQESLSSMSPISSLPALFDQTASAPCGGGQLDPAAPGTTNMEQLLEKQGDGEAGVNIVEMLKALHALQKENQRLQEQILSLTAKKERLQILNVQLSVPFPALPAALPAANGPVPGPYGLPPQAGSSDSLSTSKSPPGKSSLGLDNSLSTSSEDPHSGCPSRSSSSLSFHSTPPPLPLLQQSPATLPLALPGAPAPLPPQPQNGLGRAPGAAGLGAMPMAEGLLGGLAGSGGLPLNGLLGGLNGAAAPNPASLSQAGGAPTLQLPGCLNSLTEQQRHLLQQQEQQLQQLQQLLASPQLTPEHQTVVYQMIQQIQQKRELQRLQMAGGSQLPMASLLAGSSTPLLSAGTPGLLPTASAPPLLPAGALVAPSLGNNTSLMAAAAAAAAVAAAGGPPVLTAQTNPFLSLSGAEGSGGGPKGGTADKGASANQEKG

SEQ ID NO: 15303 - protein, 298 aa, Homo sapiens
MTEPGASPEDPWVKASPVGAHAGEGRAGRARARRGAGRRGASLLSPKSPTLSVPRGCREDSSHPACAKVEYAYSDNSLDPGLFVESTRKGSVVSRANSIGSTSASSVPNTDDEDSDYHQEAYKESYKDRRRRAHTQAEQKRRDAIKRGYDDLQTIVPTCQQQDFSIGSQKLSKAIVLQKTIDYIQFLHKEKKKQEEEVSTLRKDVTALKIMKVNYEQIVKAHQDNPHEGEDQVSDQVKFNVFQGIMDSLFQSFNASISVASFQELSACVFSWIEEHCKPQTLREIVIGVLHQLKNQLY

SEQ ID NO: 15304 - protein, 919 aa, Homo sapiens; identical to SEQ ID NO: 8747

SEQ ID NO: 15305 - protein, 852 aa, Homo sapiens; identical to SEQ ID NO: 8755

SEQ ID NO: 15306 - protein, 582 aa, Homo sapiens
MSIETLLEAARFLEWQAQQQQRAREEQERLRLEQEREQEQKKANSLARLAHTLPVEEPRMEAPPLPLSPPAPPPAPPPPLATPAPLTVIPIPVVTNSPQPLPPPPPLPAAAQPLPLAPRQPALVGAPGLSIKEPAPLPSRPQVPTPAPLLPDSKATIPPNGSPKPLQPLPTPVLTIAPHPGVQPQLAPQQPPPPTLGTLKLAPAEEVKSSEQKKRPGGIGTREVHNKLEKNRRAHLKECFETLKRNIPNVDDKKTSNLSVLRTALRYIQSLKRKEKEYEHEMERLAREKIATQQRLAELKHELSQWMDVLEIDRVLRQTGQPEDDQASTSTASEGEDNIDEDMEEDRAGLGPPKLSHRPQPELLKSTLPPPSTTPAPLPPHPHPHPHSVALPPAHLPVQQQQPQQKTPLPAPPPPPAAPAQTLVPAPAHLVATAGGGSTVIAHTATTHASVIQTVNHVLQGPGGKHIAHIAPSAPSPAVQLAPATPPIGHITVHPATLNHVAHLGSQLPLYPQPVAVSHIAHTLSHQQVNGTAGLGPPATVMAKPAVGAQVVHHPQLVGQTVLNPVTMVTMPSFPVSTLKLA

SEQ ID NO: 15307 - protein, 401 aa, Homo sapiens
MEKSKNFRIDALLAVDPPRAASAQSAPLALVTSLAAAASGTGGGGGGGGASGGTSGSCSPASSEPPAAPADRLRAESPSPPRLLAAHCALLPKPGFLGAGGGGGGTGGGHGGPHHHAHPGAAAAAAAAAAAAAAGGLALGLHPGGAQGGAGLPAQAALYGHPVYGYSAAAAAAALAGQHPALSYSYPQVQGAHPAHPADPIKLGAGTFQLDQWLRASTAGMILPKMPDFNSQAQSNLLGKCRRPRTAFTSQQLLELEHQFKLNKYLSRPKRFEVATSLMLTETQVKIWFQNRRMKWKRSKKAKEQAAQEAEKQKGGGGGAGKGGAEEPGAEELLGPPAPGDKGSGRRLRDLRDSDPEEDEDEDDEDHFPYSNGASVHAASSDCSSEDDSPPPRPSHQPAPQ

SEQ ID NO: 15308 - protein, 206 aa, Homo sapiens
MSTGSVSDPEEMELRGLQREYPVPASKRPPLRGVERSYASPSDNSSAEEEDPDGEEERCALGTAGSAEGCKRKRPRVAGGGGAGGSAGGGGKKPLPAKGSAAECKQSQRNAANARERARMRVLSKAFSRLKTSLPWVPPDTKLSKLDTLRLASSYIAHLRQLLQEDRYENGYVHPVNLTWPFVVSGRPDSDTKEVSAANRLCGTTA

SEQ ID NO: 15309 - protein, 193 aa, Homo sapiens
MDNLRETFLSLEDGLGSSDSPGLLSSWDWKDRAGPFELNQASPSQSLSPAPSLESYSSSPCPAVAGLPCEHGGASSGGSEGCSVGGASGLVEVDYNMLAFQPTHLQGGGGPKAQKGTKVRMSVQRRRKASEREKLRMRTLADALHTLRNYLPPVYSQRGQPLTKIQTLKYTIKYIGELTDLLNRGREPRAQSA

SEQ ID NO: 15310 - protein, 303 aa, Homo sapiens
MAPAADMTSLPLGVKVEDSAFGKPAGGGAGQAPSAAAATAAAMGADEEGAKPKVSPSLLPFSVEALMADHRKPGAKESALAPSEGVQAAGGSAQPLGVPPGSLGAPDAPSSPRPLGHFSVGGLLKLPEDALVKAESPEKPERTPWMQSPRFSPPPARRLSPPACTLRKHKTNRKPRTPFTTAQLLALERKFRQKQYLSIAERAEFSSSLSLTETQVKIWFQNRRAKAKRLQEAELEKLKMAAKPMLPPAAFGLSFPLGGPAAVAAAAGASLYGASGPFQRAALPVAPVGLYTAHVGYSMYHLT

SEQ ID NO: 15311 - protein, 267 aa, Homo sapiens
MASPSKGNDLFSPDEEGPAVVAGPGPGPGGAEGAAEERRVKVSSLPFSVEALMSDKKPPKEASPLPAESASAGATLRPLLLSGHGAREAHSPGPLVKPFETASVKSENSEDGAAWMQEPGRYSPPPRHMSPTTCTLRKHKTNRKPRTPFTTSQLLALERKFRQKQYLSIAERAEFSSSLNLTETQVKIWFQNRRAKAKRLQEAELEKLKMAAKPMLPSSFSLPFPISSPLQAASIYGASYPFHRPVLPIPPVGLYATPVGYGMYHLS

SEQ ID NO: 15312 - protein, 715 aa, Homo sapiens
MAANMYRVGDYVYFENSSSNPYLIRRIEELNKTANGNVEAKVVCFYRRRDISSTLIALADKHATLSVCYKAGPGADNGEEGEIEEEMENPEMVDLPEKLKHQLRHRELFLSRQLESLPATHIRGKCSVTLLNETESLKSYLEREDFFFYSLVYDPQQKTLLADKGEIRVGNRYQADITDLLKEGEEDGRDQSRLETQVWEAHNPLTDKQIDQFLVVARSVGTFARALDCSSSVRQPSLHMSAAAASRDITLFHAMDTLHKNIYDISKAISALVPQGGPVLCRDEMEEWSASEANLFEEALEKYGKDFTDIQQDFLPWKSLTSIIEYYYMWKTTDRYVQQKRLKAAEAESKLKQVYIPNYNKPNPNQISVNNVKAGVVNGTGAPGQSPGAGRACESCYTTQSYQWYSWGPPNMQCRLCASCWTYWKKYGGLKMPTRLDGERPGPNRSNMSPHGLPARSSGSPKFAMKTRQAFYLHTTKLTRIARRLCREILRPWHAARHPYLPINSAAIKAECTARLPEASQSPLVLKQAVRKPLEAVLRYLETHPRPPKPDPVKSVSSVLSSLTPAKVAPVINNGSPTILGKRSYEQHNGVDGNMKKRLLMPSRGLANHGQARHMGPSRNLLLNGKSYPTKVRLIRGGSLPPVKRRRMNWIDAPDDVFYMATEETRKIRKLLSSSETKRAARRPYKPIALRQSQALPPRPPPPAPVNDEPIVIED

SEQ ID NO: 15313 - protein, 668 aa, Homo sapiens
MAANMYRVGDYVYFENSSSNPYLVRRIEELNKTANGNVEAKVVCLFRRRDISSSLNSLADSNAREFEEESKQPGVSEQQRHQLKHRELFLSRQFESLPATHIRGKCSVTLLNETDILSQYLEKEDCFFYSLVFDPVQKTLLADQGEIRVGCKYQAEIPDRLVEGESDNRNQQKMEMKVWDPDNPLTDRQIDQFLVVARAVGTFARALDCSSSIRQPSLHMSAAAASRDITLFHAMDTLQRNGYDLAKAMSTLVPQGGPVLCRDEMEEWSASEAMLFEEALEKYGKDFNDIRQDFLPWKSLASIVQFYYMWKTTDRYIQQKRLKAAEADSKLKQVYIPTYTKPNPNQIISVGSKPGMNGAGFQKGLTCESCHTTQSAQWYAWGPPNMQCRLCASCWIYWKKYGGLKTPTQLEGATRGTTEPHSRGHLSRPEAQSLSPYTTSANRAKLLAKNRQTFLLQTTKLTRLARRMCRDLLQPRRAARRPYAPINANAIKAECSIRLPKAAKTPLKIHPLVRLPLATIVKDLVAQAPLKPKTPRGTKTPINRNQLSQNRGLGGIMVKRAYETMAGAGVPFSANGRPLASGIRSSSQPAAKRQKLNPADAPNPVVFVATKDTRALRKALTHLEMRRAARRPNLPLKVKPTLIAVRPPVPLPAPSHPASTNEPIVLED

SEQ ID NO: 15314 - protein, 594 aa, Homo sapiens
MAANMYRVGDYVYFENSSSNPYLIRRIEELNKTASGNVEAKVVCFYRRRDISNTLIMLADKHAKEIEEESETTVEADLTDKQKHQLKHRELFLSRQYESLPATHIRGKCSVALLNETESVLSYLDKEDTFFYSLVYDPSLKTLLADKGEIRVGPRYQADIPEMLLEGESDEREQSKLEVKVWDPNSPLTDRQIDQFLVVARAVGTFARALDCSSSVRQPSLHMSAAAASRDITLFHAMDTLYRHSYDLSSAISVLVPLGGPVLCRDEMEEWSASEASLFEEALEKYGKDFNDIRQDFLPWKSLTSIIEYYYMWKTTDRYVQQKRLKAAEAESKLKQVYIPTYSKPNPNQISTSNGKPGAVNGAVGTTFQPQNPLLGRACESCYATQSHQWYSWGPPNMQCRLCAICWLYWKKYGGLKMPTQSEEEKLSPSPTTEDPRVRSHVSRQAMQGMPVRNTGSPKSAVKTRQAFFLHTTYFTKFARQVCKNTLRLRQAARRPFVAINYAAIRAEYADRHAELSGSPLKSKSTRKPLACIIGYLEIHPAKKPNVIRSTPSLQTPTTKRMLTTPNHTSLSILGKRNYSHHNGLDELTCCVSD

SEQ ID NO: 15315 - protein, 753 aa, Homo sapiens
MGEHSPDNNIIYFEAEEDELTPDDKMLRFVDKNGLVPSSSGTVYDRTTVLIEQDPGTLEDEDDDGQCGEHLPFLVGGEEGFHLIDHEAMSQGYVQHIISPDQIHLTINPGSTPMPRNIEGATLTLQSECPETKRKEVKRYQCTFEGCPRTYSTAGNLRTHQKTHRGEYTFVCNQEGCGKAFLTSYSLRIHVRVHTKEKPFECDVQGCEKAFNTLYRLKAHQRLHTGKTFNCESEGCSKYFTTLSDLRKHIRTHTGEKPFRCDHDGCGKAFAASHHLKTHVRTHTGERPFFCPSNGCEKTFSTQYSLKSHMKGHDNKGHSYNALPQHNGSEDTNHSLCLSDLSLLSTDSELRENSSTTQGQDLSTISPAIIFESMFQNSDDTAIQEDPQQTASLTESFNGDAESVSDVPPSTGNSASLSLPLVLQPGLSEPPQPLLPASAPSAPPPAPSLGPGSQQAAFGNPPALLQPPEVPVPHSTQFAANHQEFLPHPQAPQPIVPGLSVVAGASASAAAVASAVAAPAPPQSTTEPLPAMVQTLPLGANSVLTNNPTITITPTPNTAILQSSLVMGEQNLQWILNGATSSPQNQEQIQQASKVEKVFFTTAVPVASSPGSSVQQIGLSVPVIIIKQEEACQCQCACRDSAKERASSRRKGCSSPPPPEPSPQAPDGPSLQLPAQTFSSAPVPGSSSSTLPSSCEQSRQAETPSDPQTETLSAMDVSEFLSLQSLDTPSNLIPIEALLQGEEEMGLTSSFSK

SEQ ID NO: 15316 - protein, 593 aa, Homo sapiens
MRDSTGAGNSLVHKRSPLRRNQKTPTSLTKLSLQDGHKAKKPACKFEEGQDVLARWSDGLFYLGTIKKINILKQSCFIIFEDSSKSWVLWKDIQTGATGSGEMVCTICQEEYSEAPNEMVICDKCGQGYHQLCHTPHIDSSVIDSDEKWLCRQCVFATTTKRGGALKKGPNAKALQVMKQTLPYSVADLEWDAGHKTNVQQCYCYCGGPGDWYLKMLQCCKCKQWFHEACVQCLQKPMLFGDRFYTFICSVCSSGPEYLKRLPLQWVDIAHLCLYNLSVIHKKKYFDSELELMTYINENWDRLHPGELADTPKSERYEHVLEALNDYKTMFMSGKEIKKKKHLFGLRIRVPPVPPNVAFKAEKEPEGTSHEFKIKGRKASKPISDSREVSNGIEKKGKKKSVGRPPGPYTRKMIQKTAEPLLDKESISENPTLDLPCSIGRTEGTAHSSNTSDVDFTGASSAKETTSSSISRHYGLSDSRKRTRTGRSWPAAIPHLRRRRGRLPRRALQTQNSEIVKDDEGKEDYQFDELNTEILNNLADQELQLNHLKNSITSYFGAAGRIACGEKYRVLARRVTLDGKVQYLVEWEGATAS

SEQ ID NO: 15317 - protein, 221 aa, Homo sapiens
MAAAVRMNIQMLLEAADYLERREREAEHGYASMLPYNNKDRDALKRRNKSKKNNSSSRSTHNEMEKNRRAHLRLCLEKLKGLVPLGPESSRHTTLSLLTKAKLHIKKLEDCDRKAVHQIDQLQREQRHLKRQLEKLGIERIRMDSIGSTVSSERSDSDREEIDVDVESTDYLTGDLDWSSSSVSDSDERGSMQSLGSDEGYSSTSIKRIKLQDSHKACLGL

SEQ ID NO: 15318 - protein, 206 aa, Homo sapiens
MEPLASNIQVLLQAAEFLERREREAEHGYASLCPHRSPGPIHRRKKRPPQAPGAQDSGRSVHNELEKRRRAQLKRCLERLKQQMPLGADCARYTTLSLLRRARMHIQKLEDQEQRARQLKERLRSKQQSLQRQLEQLRGLAGAAERERLRADSLDSSGLSSERSDSDQEELEVDVESLVFGGEAELLRGFVAGQEHSYSHGGGAWL

SEQ ID NO: 15319 - protein, 209 aa, Homo sapiens
MELNSLLILLEAAEYLERRDREAEHGYASVLPFDGDFAREKTKAAGLVRKAPNNRSSHNELEKHRRAKLRLYLEQLKQLVPLGPDSTRHTTLSLLKRAKVHIKKLEEQDRRALSIKEQLQQEHRFLKRRLEQLSVQSVERVRTDSTGSAVSTDDSEQEVDIEGMEFGPGELDSVGSSSDADDHYSLQSGTGGDSGFGPHCRRLGRPALS

SEQ ID NO: 15320 - protein, 228 aa, Homo sapiens
MERVKMINVQRLLEAAEFLERRERECEHGYASSFPSMPSPRLQHSKPPRRLSRAQKHSSGSSNTSTANRSTHNELEKNRRAHLRLCLERLKVLIPLGPDCTRHTTLGLLNKAKAHIKKLEEAERKSQHQLENLEREQRFLKWRLEQLQGPQEMERIRMDSIGSTISSDRSDSEREEIEVDVESTEFSHGEVDNISTTSISDIDDHSSLPSIGSDEGYSSASVKLSFTS

SEQ ID NO: 15321 - protein, 640 aa, Homo sapiens
MARRPRHSIYSSDEDDEDFEMCDHDYDGLLPKSGKRHLGKTRWTREEDEKLKKLVEQNGTDDWKVIANYLPNRTDVQCQHRWQKVLNPELIKGPWTKEEDQRVIELVQKYGPKRWSVIAKHLKGRIGKQCRERWHNHLNPEVKKTSWTEEEDRIIYQAHKRLGNRWAEIAKLLPGRTDNAIKNHWNSTMRRKVEQEGYLQESSKASQPAVATSFQKNSHLMGFAQAPPTAQLPATGQPTVNNDYSYYHISEAQNVSSHVPYPVALHVNIVNVPQPAAAAIQRHYNDEDPEKEKRIKELELLLMSTENELKGQQVLPTQNHTCSYPGWHSTTIADHTRPHGDSAPVSCLGEHHSTPSLPADPGSLPEESASPARCMIVHQGTILDNVKNLLEFAETLQFIDSFLNTSSNHENSDLEMPSLTSTPLIGHKLTVTTPFHRDQTVKTQKENTVFRTPAIKRSILESSPRTPTPFKHALAAQEIKYGPLKMLPQTPSHLVEDLQDVIKQESDESGIVAEFQENGPPLLKKIKQEVESPTDKSGNFFCSHHWEGDSLNTQLFTQTSPVADAPNILTSSVLMAPASEDEDNVLKAFTVPKNRSLASPLQPCSSTWEPASCGKMEEQMTSSSQARKYVNAFSARTLVM

SEQ ID NO: 15322 - protein, 752 aa, Homo sapiens
MAKRSRSEDEDDDLQYADHDYEVPQQKGLKKLWNRVKWTRDEDDKLKKLVEQHGTDDWTLIASHLQNRSDFQCQHRWQKVLNPELIKGPWTKEEDQRVIELVQKYGPKRWSLIAKHLKGRIGKQCRERWHNHLNPEVKKSSWTEEEDRIIYEAHKRLGNRWAEIAKLLPGRTDNSIKNHWNSTMRRKVEQEGYLQDGIKSERSSSKLQHKPCAAMDHMQTQNQFYIPVQIPGYQYVSPEGNCIEHVQPTSAFIQQPFIDEDPDKEKKIKELEMLLMSAENEVRRKRIPSQPGSFSSWSGSFLMDDNMSNTLNSLDEHTSEFYSMDENQPVSAQQNSPTKFLAVEANAVLSSLQTIPEFAETLELIESDPVAWSDVTSFDISDAAASPIKSTPVKLMRIQHNEGAMECQFNVSLVLEGKKNTCNGGNSEAVPLTSPNIAKFSTPPAILRKKRKMRVGHSPGSELRDGSLNDGGNMALKHTPLKTLPFSPSQFFNTCPGNEQLNIENPSFTSTPICGQKALITTPLHKETTPKDQKENVGFRTPTIRRSILGTTPRTPTPFKNALAAQEKKYGPLKIVSQPLAFLEEDIREVLKEETGTDLFLKEEDEPAYKSCKQENTASGKKVRKSLVLDNWEKEESGTQLLTEDISDMQSENRFTTSLLMIPLLEIHDNRCNLIPEKQDINSTNKTYTLTKKKPNPNTSKVVKLEKNLQSNCEWETVVYGKTEDQLIMTEQARRYLSTYTATSSTSRALIL

SEQ ID NO: 15323 - protein, 700 aa, Homo sapiens
MSRRTRCEDLDELHYQDTDSDVPEQRDSKCKVKWTHEEDEQLRALVRQFGQQDWKFLASHFPNRTDQQCQYRWLRVLNPDLVKGPWTKEEDQKVIELVKKYGTKQWTLIAKHLKGRLGKQCRERWHNHLNPEVKKSCWTEEEDRIICEAHKVLGNRWAEIAKMLPGRTDNAVKNHWNSTIKRKVDTGGFLSESKDCKPPVYLLLELEDKDGLQSAQPTEGQGSLLTNWPSVPPTIKEEENSEEELAAATTSKEQEPIGTDLDAVRTPEPLEEFPKREDQEGSPPETSLPYKWVVEAANLLIPAVGSSLSEALDLIESDPDAWCDLSKFDLPEEPSAEDSINNSLVQLQASHQQQVLPPRQPSALVPSVTEYRLDGHTISDLSRSSRGELIPISPSTEVGGSGIGTPPSVLKRQRKRRVALSPVTENSTSLSFLDSCNSLTPKSTPVKTLPFSPSQFLNFWNKQDTLELESPSLTSTPVCSQKVVVTTPLHRDKTPLHQKHAAFVTPDQKYSMDNTPHTPTPFKNALEKYGPLKPLPQTPHLEEDLKEVLRSEAGIELIIEDDIRPEKQKRKPGLRRSPIKKVRKSLALDIVDEDVKLMMSTLPKSLSLPTTAPSNSSSLTLSGIKEDNSLLNQGFLQAKPEKAAVAQKPRSHFTTPAPMSSAWKTVACGGTRDQLFMQEKARQLLGRLKPSHTSRTLILS

SEQ ID NO: 15324 - protein, 439 aa, Homo sapiens
MPLNVSFTNRNYDLDYDSVQPYFYCDEEENFYQQQQQSELQPPAPSEDIWKKFELLPTPPLSPSRRSGLCSPSYVAVTPFSLRGDNDGGGGSFSTADQLEMVTELLGGDMVNQSFICDPDDETFIKNIIIQDCMWSGFSAAAKLVSEKLASYQAARKDSGSPNPARGHSVCSTSSLYLQDLSAAASECIDPSVVFPYPLNDSSSPKSCASQDSSAFSPSSDSLLSSTESSPQGSPEPLVLHEETPPTTSSDSEEEQEDEEEIDVVSVEKRQAPGKRSESGSPSAGGHSKPPHSPLVLKRCHVSTHQHNYAAPPSTRKDYPAAKRVKLDSVRVLRQISNNRKCTSPRSSDTEENVKRRTHNVLERQRRNELKRSFFALRDQIPELENNEKAPKVVILKKATAYILSVQAEEQKLISEEDLLRKRREQLKHKLEQLRNSCA

SEQ ID NO: 15325 - protein, 364 aa, Homo sapiens
MDYDSYQHYFYDYDCGEDFYRSTAPSEDIWKKFELVPSPPTSPPWGLGPGAGDPAPGIGPPEPWPGGCTGDEAESRGHSKGWGRNYASIIRRDCMWSGFSARERLERAVSDRLAPGAPRGNPPKASAAPDCTPSLEAGNPAPAAPCPLGEPKTQACSGSESPSDSENEEIDVVTVEKRQSLGIRKPVTITVRADPLDPCMKHFHISIHQQQHNYAARFPPESCSQEEASERGPQEEVLERDAAGEKEDEEDEEIVSPPPVESEAAQSCHPKPVSSDTEDVTKRKNHNFLERKRRNDLRSRFLALRDQVPTLASCSKAPKVVILSKALEYLQALVGAEKRMATEKRQLRCRQQQLQKRIAYLTGY

SEQ ID NO: 15326 - protein, 358 aa, Homo sapiens
MDRDSYHHYFYDYDGGEDFYRSTTPSEDIWKKFELVPPPWDLGPAAGNPALSFGLLEPWPVGCAGDETESQDYWKAWDANYASLIRRDCMWSGFSTQEPLERAVSDLLAVGAPSGYSPKEFATPDYTPELEAGNLAPIFPCLLGEPKIQACSRSESPSDSEGEEIDVTVKKRQSLSTRKPVIIAVRADLLDPRMNLFHISIHQQQHNYAAPFPPESCFQEGAPKRMPPKEALEREAPGGKDDKEDEEIVSLPPVESEAAQSCQPKPIHYDTENWTKKKYHSYLERKRRNDQRSRFLALRDEVPALASCSRVSKVMILVKATEYLHELAEAEERMATEKRQLECQRRQLQKRIEYLSSY

SEQ ID NO: 15327 - protein, 464 aa, Homo sapiens
MPSCSTSTMPGMICKNPDLEFDSLQPCFYPDEDDFYFGGPDSTPPGEDIWKKFELLPTPPLSPSRGFAEHSSEPPSWVTEMLLENELWGSPAEEDAFGLGGLGGLTPNPVILQDCMWSGFSAREKLERAVSEKLQHGRGPPTAGSTAQSPGAGAASPAGRGHGGAAGAGRAGAALPAELAHPAAECVDPAVVFPFPVNKREPAPVPAAPASAPAAGPAVASGAGIAAPAGAPGVAPPRPGGRQTSGGDHKALSTSGEDTLSDSDDEDDEEEDEEEEIDVVTVEKRRSSSNTKAVTTFTITVRPKNAALGPGRAQSSELILKRCLPIHQQHNYAAPSPYVESEDAPPQKKIKSEASPRPLKSVIPPKAKSLSPRNSDSEDSERRRNHNILERQRRNDLRSSFLTLRDHVPELVKNEKAAKVVILKKATEYVHSLQAEEHQLLLEKEKLQARQQQLLKKIEHARTC

SEQ ID NO: 15328 - protein, 255 aa, Homo sapiens
MDVMDGCQFSPSEYFYDGSCIPSPEGEFGDEFVPRVAAFGAHKAELQGSDEDEHVRAPTGHHQAGHCLMWACKACKRKSTTMDRRKAATMRERRRLKKVNQAFETLKRCTTTNPNQRLPKVEILRNAIRYIESLQELLREQVENYYSLPGQSCSEPTSPTSNCSDGMPECNSPVWSRKSSTFDSIYCPDVSNVYATDKNSLSSLDCLSNIVDRITSSEQPGLPLQDLASLSPVASTDSQPATPGASSSRLIYHVL

SEQ ID NO: 15329 - protein, 242 aa, Homo sapiens
MMMDLFETGSYFFYLDGENVTLQPLEVAEGSPLYPGSDGTLSPCQDQMPPEAGSDSSGEEHVLAPPGLQPPHCPGQCLIWACKTCKRKSAPTDRRKAATLRERRRLKKINEAFEALKRRTVANPNQRLPKVEILRSAISYIERLQDLLHRLDQQEKMQELGVDPFSYRPKQENLEGADFLRTCSSQWPSVSDHSRGLVITAKEGGASIDSSASSSLRCLSSIVDSISSEERKLPCVEEVVEK

SEQ ID NO: 15330 - protein, 610 aa, Homo sapiens
MQYSHHCEHLLERLNKQREAGFLCDCTIVIGEFQFKAHRNVLASFSEYFGAIYRSTSENNVFLDQSQVKADGFQKLLEFIYTGTLNLDSWNVKEIHQAADYLKVEEVVTKCKIKMEDFAFIANPSSTEISSITGNIELNQQTCLLTLRDYNNREKSEVSTDLIQANPKQGALAKKSSQTKKKKKAFNSPKTGQNKTVQYPSDILENASVELFLDANKLPTPVVEQVAQINDNSELELTSVVENTFPAQDIVHTVTVKRKRGKSQPNCALKEHSMSNIASVKSPYEAENSGEELDQRYSKAKPMCNTCGKVFSEASSLRRHMRIHKGVKPYVCHLCGKAFTQCNQLKTHVRTHTGEKPYKCELCDKGFAQKCQLVFHSRMHHGEEKPYKCDVCNLQFATSSNLKIHARKHSGEKPYVCDRCGQRFAQASTLTYHVRRHTGEKPYVCDTCGKAFAVSSSLITHSRKHTGEKPYICGICGKSFISSGELNKHFRSHTGERPFICELCGNSYTDIKNLKKHKTKVHSGADKTLDSSAEDHTLSEQDSIQKSPLSETMDVKPSDMTLPLALPLGTEDHHMLLPVTDTQSPTSDTLLRSTVNGYSEPQLIFLQQLY

SEQ ID NO: 15331 - protein, 320 aa, Homo sapiens
MELLSPPLRDVDLTAPDGSLCSFATTDDFYDDPCFDSPDLRFFEDLDPRLMHVGALLKPEEHSHFPAAVHPAPGAREDEHVRAPSGHHQAGRCLLWACKACKRKTTNADRRKAATMRERRRLSKVNEAFETLKRCTSSNPNQRLPKVEILRNAIRYIEGLQALLRDQDAAPPGAAAAFYAPGPLPPGRGGEHYSGDSDASSPRSNCSDGMMDYSGPPSGARRRNCYEGAYYNEAPSEPRPGKSAAVSSLDCLSSIVERISTESPAAPALLLADVPSESPPRRQEAAAPSEGESSGDPTQSPDAAPQCPAGANPNPIYQVL

SEQ ID NO: 15332 - protein, 224 aa, Homo sapiens
MELYETSPYFYQEPRFYDGENYLPVHLQGFEPPGYERTELTLSPEAPGPLEDKGLGTPEHCPGQCLPWACKVCKRKSVSVDRRRAATLREKRRLKKVNEAFEALKRSTLLNPNQRLPKVEILRSAIQYIERLQALLSSLNQEERDLRYRGGGGPQPGVPSECSSHSASCSPEWGSALEFSANPGDHLLTADPTDAHNLHSLTSIVDSITVEDVSVAFPDETMPN

SEQ ID NO: 15333 - protein, 1151 aa, Homo sapiens
MEVVDETEALQRFFEGHDINGALEPSNIDTSILEEYISKEDASDLCFPDISAPASSASYSHGQPAMPGSSGVHHLSPPGGGPSPGRHGPLPPPGYGTPLNCNNNNGMGAAPKPFPGGTGPPIKAEPKAPYAPGTLPDSPPDSGSEAYSPQQVNEPHLLRTITPETLCHVGVPSRLEHPPPPPAHLPGPPPPPPPPPHYPVLQRDLYMKAEPPIPHYAAMGQGLVPTDLHHTQQSQMLHQLLQQHGAELPTHPSKKRKHSESPPSTLNAQMLNGMIKQEPGTVTALPLHPTRAPSPPWPPQGPLSPGPGSLPLSIARVQTPPWHPPGAPSPGLLQDSDSLSGSYLDPNYQSIKWQPHQQNKWATLYDANYKELPMLTYRVDADKGFNFSVGDDAFVCQKKNHFQVTVYIGMLGEPKYVKTPEGLKPLDCFYLKLHGVKLEALNQSINIEQSQSDRSKRPFNPVTVNLPPEQVTKVTVGRLHFSETTANNMRKKGKPNPDQRYFMLVVALQAHAQNQNYTLAAQISERIIVRASNPGQFESDSDVLWQRAQVPDTVFHHGRVGINTDRPDEALVVHGNVKVMGSLMHPSDLRAKEHVQEVDTTEQLKRISRMRLVHYRYKPEFAASAGIEATAPETGVIAQEVKEILPEAVKDTGDMVFANGKTIENFLVVNKERIFMENVGAVKELCKLTDNLETRIDELERWSHKLAKLRRLDSLKSTGSSGAFSHAGSQFSRAGSVPHKKRPPKVASKSSSVVPDQACISQRFLQGTIIALVVVMAFSVVSMSTLYVLSLRTEEDLVDTDGSFAVSTSCLLALLRPQPPGGSEALCPWSSQSFGTTQLRQSPLTTGLPGIQPSLLLVTTSLTSSAPGSAVRTLDMCSSHPCPVICCSSPTTNPTTGPSLGPSFNPGHVLSPSPSPSTNRSGPSQMALLPVTNIRAKSWGLSVNGIGHSKHHKSLEPLASPAVPFPGGQGKAKNSPSLGFHGRARRGALQSSVGPAEPTWAQGQSASLLAEPVPSLTSIQVLENSMSITSQYCAPGDACRPGNFTYHIPVSSGTPLHLSLTLQMNSSSPVSVVLCSLRSKEEPCEEGSLPQSLHTHQDTQGTSHRWPITILSFREFTYHFRVALLGQANCSSEALAQPATDYHFHFYRLCD

SEQ ID NO: 15334 - protein, 828 aa, Homo sapiens
MAAEEADVDIEGDVVAAAGAQPGSGENTASVLQKDHYLDSSWRTENGLIPWTLDNTISEENRAVIEKMLLEEEYYLSKKSQPEKVWLDQKEDDKKYMKSLQKTAKIMVHSPTKPASYSVKWTIEEKELFEQGLAKFGRRWTKISKLIGSRTVLQVKSYARQYFKNKVKCGLDKETPNQKTGHNLQVKNEDKGTKAWTPSCLRGRADPNLNAVKIEKLSDDEEVDITDEVDELSSQTPQKNSSSDLLLDFPNSKMHETNQGEFITSDSQEALFSKSSRGCLQNEKQDETLSSSEITLWTEKQSNGDKKSIELNDQKFNELIKNCNKHDGRGIIVDARQLPSPEPCEIQKNLNDNEMLFHSCQMVEESHEEEELKPPEQEIEIDRNIIQEEEKQAIPEFFEGRQAKTPERYLKIRNYILDQWEICKPKYLNKTSVRPGLKNCGDVNCIGRIHTYLELIGAINFGCEQAVYNRPQTVDKVRIRDRKDAVEAYQLAQRLQSMRTRRRRVRDPWGNWCDAKDLEGQTFEHLSAEELAKRREEEKGRPVKSLKVPRPTKSSFDPFQLIPCNFFSEEKQEPFQVKVASEALLIMDLHAHVSMAEVIGLLGGRYSEVDKVVEVCAAEPCNSLSTGLQCEMDPVSQTQASETLAVRGFSVIGWYHSHPAFDPNPSLRDIDTQAKYQSYFSRGGAKFIGMIVSPYNRNNPLPYSQITCLVISEEISPDGSYRLPYKFEVQQMLEEPQWGLVFEKTRWIIEKYRLSHSSVPMDKIFRRDSDLTCLQKLLECMRKTLSKVTNCFMAEEFLTEIENLFLSNYKSNQENGVTEENCTKELLM

SEQ ID NO: 15335 - protein, 1121 aa, Homo sapiens
MSLENEDKRARTRSKALRGPPETTAADLSCPTPGCTGSGHVRGKYSRHRSLQSCPLAKKRKLEGAEAEHLVSKRKSHPLKLALDEGYGVDSDGSEDTEVKDASVSDESEGTLEGAEAETSGQDEIHRPETAEGRSPVKSHFGSNPIGSATASSKGSYSSYQGIIATSLLNLGQIAEETLVEEDLGQAAKPGPGIVHLLQEAAEGAASEEGEKGLFIQPEDAEEVVEVTTERSQDLCPQSLEDAASEESSKQKGILSHEEEDEEEEEEEEEEEEDEEEEEEEEEEEEEEEEEEEEEEEEEEEEEEEEAAPDVIFQEDTSHTSAQKAPELRGPESPSPKPEYSVIVEVRSDDDKDEDTHSRKSTVTDESEMQDMMTRGNLGLLEQAIALKAEQVRTVCEPGCPPAEQSQLGLGEPGKAAKPLDTVRKSYYSKDPSRAEKREIKCPTPGCDGTGHVTGLYPHHRSLSGCPHKDRIPPEILAMHENVLKCPTPGCTGQGHVNSNRNTHRSLSGCPIAAAEKLAKSHEKQQPQTGDPSKSSSNSDRILRPMCFVKQLEVPPYGSYRPNVAPATPRANLAKELEKFSKVTFDYASFDAQVFGKRMLAPKIQTSETSPKAFQCFDYSQDAEAAHMAATAILNLSTRCWEMPENLSTKPQDLPSKSVDIEVDENGTLDLSMHKHRKRENAFPSSSSCSSSPGVKSPDASQRHSSTSAPSSSMTSPQSSQASRQDEWDRPLDYTKPSRLREEEPEESEPAAHSFASSEADDQEVSEENFEERKYPGEVTLTNFKLKFLSKDIKKELLTCPTPGCDGSGHITGNYASHRSLSGCPLADKSLRNLMAAHSADLKCPTPGCDGSGHITGNYASHRSLSGCPRAKKSGVKVAPTKDDKEDPELMKCPVPGCVGLGHISGKYASHRSASGCPLAARRQKEGSLNGSSFSWKSLKNEGPTCPTPGCDGSGHANGSFLTHRSLSGCPRATFAGKKGKLSGDEVLSPKFKTSDVLENDEEIKQLNQEIRDLNESNSEMEAAMVQLQSQISSMEKNLKNIEEENKLIEEQNEALFLELSGLSQALIQSLANIRLPHMEPICEQNFDAYVSTLTDMYSNQDPENKDLLESIKQAVRGIQV

SEQ ID NO: 15336 - protein, 499 aa, Homo sapiens
MLERPPALAMPMPTEGTPPPLSGTPIPVPAYFRHAEPGFSLKRPRGLSRSLPPPPPAKGSIPISRLFPPRTPGWHQLQPRRVSFRGEASETLQSPGYDPSRPESFFQQSFQRLSRLGHGSYGEVFKVRSKEDGRLYAVKRSMSPFRGPKDRARKLAEVGSHEKVGQHPCCVRLEQAWEEGGILYLQTELCGPSLQQHCEAWGASLPEAQVWGYLRDTLLALAHLHSQGLVHLDVKPANIFLGPRGRCKLGDFGLLVELGTAGAGEVQEGDPRYMAPELLQGSYGTAADVFSLGLTILEVACNMELPHGGEGWQQLRQGYLPPEFTAGLSSELRSVLVMMLEPDPKLRATAEALLALPVLRQPRAWGVLWCMAAEALSRGWALWQALLALLCWLWHGLAHPASWLQPLGPPATPPGSPPCSLLLDSSLSSNWDDDSLGPSLSPEAVLARTVGSTSTPRSRCTPRDALDLSDINSEPPRGSFPSFEPRNLLSLFEDTLDPT

SEQ ID NO: 15337 - protein, 1186 aa, Homo sapiens
MEVDTEEKRHRTRSKGVRVPVEPAIQELFSCPTPGCDGSGHVSGKYARHRSVYGCPLAKKRKTQDKQPQEPAPKRKPFAVKADSSSVDECDDSDGTEDMDEKEEDEGEEYSEDNDEPGDEDEEDEEGDREEEEEIEEEDEDDDEDGEDVEDEEEEEEEEEEEEEEEENEDHQMNCHNTRIMQDTEKDDNNNDEYDNYDELVAKSLLNLGKIAEDAAYRARTESEMNSNTSNSLEDDSDKNENLGRKSELSLDLDSDVVRETVDSLKLLAQGHGVVLSENMNDRNYADSMSQQDSRNMNYVMLGKPMNNGLMEKMVEESDEEVCLSSLECLRNQCFDLARKLSETNPQERNPQQNMNIRQHVRPEEDFPGRTPDRNYSDMLNLMRLEEQLSPRSRVFASCAKEDGCHERDDDTTSVNSDRSEEVFDMTKGNLTLLEKAIALETERAKAMREKMAMEAGRRDNMRSYEDQSPRQLPGEDRKPKSSDSHVKKPYYGKDPSRTEKKESKCPTPGCDGTGHVTGLYPHHRSLSGCPHKDRVPPEILAMHESVLKCPTPGCTGRGHVNSNRNSHRSLSGCPIAAAEKLAKAQEKHQSCDVSKSSQASDRVLRPMCFVKQLEIPQYGYRNNVPTTTPRSNLAKELEKYSKTSFEYNSYDNHTYGKRAIAPKVQTRDISPKGYDDAKRYCKDPSPSSSSTSSYAPSSSSNLSCGGGSSASSTCSKSSFDYTHDMEAAHMAATAILNLSTRCREMPQNLSTKPQDLCATRNPDMEVDENGTLDLSMNKQRPRDSCCPILTPLEPMSPQQQAVMNNRCFQLGEGDCWDLPVDYTKMKPRRIDEDESKDITPEDLDPFQEALEERRYPGEVTIPSPKPKYPQCKESKKDLITLSGCPLADKSIRSMLATSSQELKCPTPGCDGSGHITGNYASHRSLSGCPRAKKSGIRIAQSKEDKEDQEPIRCPVPGCDGQGHITGKYASHRSASGCPLAAKRQKDGYLNGSQFSWKSVKTEGMSCPTPGCDGSGHVSGSFLTHRSLSGCPRATSAMKKAKLSGEQMLTIKQRASNGIENDEEIKQLDEEIKELNESNSQMEADMIKLRTQITTMESNLKTIEEENKVIEQQNESLLHELANLSQSLIHSLANIQLPHMDPINEQNFDAYVTTLTEMYTNQDRYQSPENKALLENIKQAVRGIQV

SEQ ID NO: 15338 - protein, 734 aa, Homo sapiens
MRPAVLGSPDRAPPEDEGPVMVKLEDSEEEGEAALWDPGPEAARLRFRCFRYEEATGPQEALAQLRELCRQWLRPEVRSKEQMLELLVLEQFLGALPPEIQARVQGQRPGSPEEAAALVDGLRREPGGPRRWVTVQVQGQEVLSEKMEPSSFQPLPETEPPTPEPGPKTPPRTMQESPLGLQVKEESEVTEDSDFLESGPLAATQESVPTLLPEEAQRCGTVLDQIFPHSKTGPEGPSWREHPRALWHEEAGGIFSPGFALQLGSISAGPGSVSPHLHVPWDLGMAGLSGQIQSPSREGGFAHALLLPSDLRSEQDPTDEDPCRGVGPALITTRWRSPRGRSRGRPSTGGGVVRGGRCDVCGKVFSQRSNLLRHQKIHTGERPFVCSECGRSFSRSSHLLRHQLTHTEERPFVCGDCGQGFVRSARLEEHRRVHTGEQPFRCAECGQSFRQRSNLLQHQRIHGDPPGPGAKPPAPPGAPEPPGPFPCSECRESFARRAVLLEHQAVHTGDKSFGCVECGERFGRRSVLLQHRRVHSGERPFACAECGQSFRQRSNLTQHRRIHTGERPFACAECGKAFRQRPTLTQHLRVHTGEKPFACPECGQRFSQRLKLTRHQRTHTGEKPYHCGECGLGFTQVSRLTEHQRIHTGERPFACPECGQSFRQHANLTQHRRIHTGERPYACPECGKAFRQRPTLTQHLRTHRREKPFACQDCGRRFHQSTKLIQHQRVHSAE

SEQ ID NO: 15339 - protein, 305 aa, Homo sapiens
MSVDPACPQSLPCFEASDCKESSPMPVICGPEENYPSLQMSSAEMPHTETVSPLPSSMDLLIQDSPDSSTSPKGKQPTSAEKSVAKKEDKVPVKKQKTRTVFSSTQLCVLNDRFQRQKYLSLQQMQELSNILNLSYKQVKTWFQNQRMKSKRWQKNNWPKNSNGVTQKASAPTYPSLYSSYHQGCLVNPTGNLPMWSNQTWNNSTWSNQTQNIQSWSNHSWNTQTWCTQSWNNQAWNSPFYNCGEESLQSCMQFQPNSPASDLEAALEAAGEGLNVIQQTTRYFSTPQTMDLFLNYSMNMQPEDV

SEQ ID NO: 15340 - protein, 188 aa, Homo sapiens
MHRARWLTPVIPALWEAEAGRSRGQEIETILANKKQSAMPWDQDPEQSTGNYSEDEQNGKQKWREEGEAGRKREREKEEKNEKELQDEQENKRKRENEKQKQYPEKRLVSKSLMHTLWAKFKLNRCPTIQESLSLSFEFDMTHKQISQWFCKTRKKYNKEMSKRKHKKKHMRWRSLCCQGWSRTPALK

SEQ ID NO: 15341 - protein, 232 aa, Homo sapiens
MDLPIQDSHDSSTSPKGKQPTTAEKSATKKEDKVPVKKQKTRTVFSSTQLCVLNDRFQRQKYLSLQQMQELSNILNLSYKQVKTWFQNQRMKSKRWQKNNWLKNSNGVTQGCLVNPTGNLPMWSNQTWNNSTWSNQTQNIQSWSNHSWNTQTWCTQSWNNQAWNSPFYNCGEESLQSCMQFQPNSPASDLQAALEAAGEGLNVIQQTTRYFNTPQTMDLFLNYSMNMQPEDV

SEQ ID NO: 15342 - protein, 305 aa, Homo sapiens
MSVDPACPQSLPCFEESDCKESSPMPVICGPEENYPSLQMSSAEMPHTETVSPLPSSMDLLIQDSPDSSTSPKGKQPTSAENSVAKKEDKVPVKKQKTRTVFSSTQLCVLNDRFQRQKYLSLQQMQELSNILNLSYKQVKTWFQNQRMKSKRWQKNNWPKNSNGVTQKASAPTYPSLYSSYHQGCLVNPTGNLPMWSNQTWNNSTWSNQTQNIQSWSNHSWNTQTWCTQSWNNQAWNSPFYNCGEESLQSCMHFQPNSPASDLEAALEAAGEGLNVIQQTTRYFSTPQTMDLFLNYSMNMQPEDV

SEQ ID NO: 15343 - protein, 1441 aa, Homo sapiens
MSGLGDSSSDPANPDSHKRKGSPCDTLASSTEKRRREQENKYLEELAELLSANISDIDSLSVKPDKCKILKKTVDQIQLMKRMEQEKSTTDDDVQKSDISSSSQGVIEKESLGPLLLEALDGFFFVVNCEGRIVFVSENVTSYLGYNQEELMNTSVYSILHVGDHAEFVKNLLPKSLVNGVPWPQEATRRNSHTFNCRMLIHPPDEPGTENQEACQRYEVMQCFTVSQPKSIQEDGEDFQSCLICIARRLPRPPAITGVESFMTKQDTTGKIISIDTSSLRAAGRTGWEDLVRKCIYAFFQPQGREPSYARQLFQEVMTRGTASSPSYRFILNDGTMLSAHTKCKLCYPQSPDMQPFIMGIHIIDREHSGLSPQDDTNSGMSIPRVNPSVNPSISPAHGVARSSTLPPSNSNMVSTRINRQQSSDLHSSSHSNSSNSQGSFGCSPGSQIVANVALNQGQASSQSSNPSLNLNNSPMEGTGISLAQFMSPRRQVTSGLATRPRMPNNSFPPNISTLSSPVGMTSSACNNNNRSYSNIPVTSLQGMNEGPNNSVGFSASSPVLRQMSSQNSPSRLNIQPAKAESKDNKEIASILNEMIQSDNSSSDGKPLDSGLLHNNDRLSDGDSKYSQTSHKLVQLLTTTAEQQLRHADIDTSCKDVLSCTGTSNSASANSSGGSCPSSHSSLTERHKILHRLLQEGSPSDITTLSVEPDKKDSASTSVSVTGQVQGNSSIKLELDASKKKESKDHQLLRYLLDKDEKDLRSTPNLSLDDVKVKVEKKEQMDPCNTNPTPMTKPTPEEIKLEAQSQFTADLDQFDQLLPTLEKAAQLPGLCETDRMDGAVTSVTIKSEILPASLQSATARPTSRLNRLPELELEAIDNQFGQPGTGDQIPWTNNTVTAINQSKSEDQCISSQLDELLCPPTTVEGRNDEKALLEQLVSFLSGKDETELAELDRALGIDKLVQGGGLDVLSERFPPQQATPPLIMEERPNLYSQPYSSPSPTANLPSPFQGMVRQKPSLGTMPVQVTPPRGAFSPGMGMQPRQTLNRPPAAPNQLRLQLQQRLQGQQQLIHQNRQAILNQFAATAPVGINMRSGMQQQITPQPPLNAQMLAQRQRELYSQQHRQRQLIQQQRAMLMRQQSFGNNLPPSSGLPVQMGNPRLPQGAPQQFPYPPNYGTNPGTPPASTSPFSQLAANPEASLANRNSMVSRGMTGNIGGQFGTGINPQMQQNVFQYPGAGMVPQGEANFAPSLSPGSSMVPMPIPPPQSSLLQQTPPASGYQSPDMKAWQQGAIGNNNVFSQAVQNQPTPAQPGVYNNMSITVSMAGGNTNVQNMNPMMAQMQMSSLQMPGMNTVCPEQINDPALRHTGLYCNQLSSTDLLKTEADGTQQVQQVQVFADVQCTVNLVGGDPYLNQPGPLGTQKPTSGPQTPQAQQKSLLQQLLTE

SEQ ID NO: 15344 - protein, 1464 aa, Homo sapiens
MSGMGENTSDPSRAETRKRKECPDQLGPSPKRNTEKRNREQENKYIEELAELIFANFNDIDNFNFKPDKCAILKETVKQIRQIKEQEKAAAANIDEVQKSDVSSTGQGVIDKDALGPMMLEALDGFFFVVNLEGNVVFVSENVTQYLRYNQEELMNKSVYSILHVGDHTEFVKNLLPKSIVNGGSWSGEPPRRNSHTFNCRMLVKPLPDSEEEGHDNQEAHQKYETMQCFAVSQPKSIKEEGEDLQSCLICVARRVPMKERPVLPSSESFTTRQDLQGKITSLDTSTMRAAMKPGWEDLVRRCIQKFHAQHEGESVSYAKRHHHEVLRQGLAFSQIYRFSLSDGTLVAAQTKSKLIRSQTTNEPQLVISLHMLHREQNVCVMNPDLTGQTMGKPLNPISSNSPAHQALCSGNPGQDMTLSSNINFPINGPKEQMGMPMGRFGGSGGMNHVSGMQATTPQGSNYALKMNSPSQSSPGMNPGQPTSMLSPRHRMSPGVAGSPRIPPSQFSPAGSLHSPVGVCSSTGNSHSYTNSSLNALQALSEGHGVSLGSSLASPDLKMGNLQNSPVNMNPPPLSKMGSLDSKDCFGLYGEPSEGTTGQAESSCHPGEQKETNDPNLPPAVSSERADGQSRLHDSKGQTKLLQLLTTKSDQMEPSPLASSLSDTNKDSTGSLPGSGSTHGTSLKEKHKILHRLLQDSSSPVDLAKLTAEATGKDLSQESSSTAPGSEVTIKQEPVSPKKKENALLRYLLDKDDTKDIGLPEITPKLERLDSKTDPASNTKLIAMKTEKEEMSFEPGDQPGSELDNLEEILDDLQNSQLPQLFPDTRPGAPAGSVDKQAIINDLMQLTAENSPVTPVGAQKTALRISQSTFNNPRPGQLGRLLPNQNLPLDITLQSPTGAGPFPPIRNSSPYSVIPQPGMMGNQGMIGNQGNLGNSSTGMIGNSASRPTMPSGEWAPQSSAVRVTCAATTSAMNRPVQGGMIRNPAASIPMRPSSQPGQRQTLQSQVMNIGPSELEMNMGGPQYSQQQAPPNQTAPWPESILPIDQASFASQNRQPFGSSPDDLLCPHPAAESPSDEGALLDQLYLALRNFDGLEEIDRALGIPELVSQSQAVDPEQFSSQDSNIMLEQKAPVFPQQYASQAQMAQGSYSPMQDPNFHTMGQRPSYATLRMQPRPGLRPTGLVQNQPNQLRLQLQHRLQAQQNRQPLMNQISNVSNVNLTLRPGVPTQAPINAQMLAQRQREILNQHLRQRQMHQQQQVQQRTLMMRGQGLNMTPSMVAPSGMPATMSNPRIPQANAQQFPFPPNYGISQQPDPGFTGATTPQSPLMSPRMAHTQSPMMQQSQANPAYQAPSDINGWAQGNMGGNSMFSQQSPPHFGQQANTSMYSNNMNINVSMATNTGGMSSMNQMTGQISMTSVTSVPTSGLSSMGPEQVNDPALRGGNLFPNQLPGMDMIKQEGDTTRKYC

SEQ ID NO: 15345 - protein, 1424 aa, Homo sapiens
MSGLGENLDPLASDSRKRKLPCDTPGQGLTCSGEKRRREQESKYIEELAELISANLSDIDNFNVKPDKCAILKETVRQIRQIKEQGKTISNDDDVQKADVSSTGQGVIDKDSLGPLLLQALDGFLFVVNRDGNIVFVSENVTQYLQYKQEDLVNTSVYNILHEEDRKDFLKNLPKSTVNGVSWTNETQRQKSHTFNCRMLMKTPHDILEDINASPEMRQRYETMQCFALSQPRAMMEEGEDLQSCMICVARRITTGERTFPSNPESFITRHDLSGKVVNIDTNSLRSSMRPGFEDIIRRCIQRFFSLNDGQSWSQKRHYQEAYLNGHAETPVYRFSLADGTIVTAQTKSKLFRNPVTNDRHGFVSTHFLQREQNGYRPNPNPVGQGIRPPMAGCNSSVGGMSMSPNQGLQMPSSRAYGLADPSTTGQMSGARYGGSSNIASLTPGPGMQSPSSYQNNNYGLNMSSPPHGSPGLAPNQQNIMISPRNRGSPKIASHQFSPVAGVHSPMASSGNTGNHSFSSSSLSALQAISEGVGTSLLSTLSSPGPKLDNSPNMNITQPSKVSNQDSKSPLGFYCDQNPVESSMCQSNSRDHLSDKESKESSVEGAENQRGPLESKGHKKLLQLLTCSSDDRGHSSLTNSPLDSSCKESSVSVTSPSGVSSSTSGGVSSTSNMHGSLLQEKHRILHKLLQNGNSPAEVAKITAEATGKDTSSITSCGDGNVVKQEQLSPKKKENNALLRYLLDRDDPSDALSKELQPQVEGVDNKMSQCTSSTIPSSSQEKDPKIKTETSEEGSGDLDNLDAILGDLTSSDFYNNSISSNGSHLGTKQQVFQGTNSLGLKSSQSVQSIRPPYNRAVSLDSPVSVGSSPPVKNISAFPMLPKQPMLGGNPRMMDSQENYGSSMGGPNRNVTVTQTPSSGDWGLPNSKAGRMEPMNSNSMGRPGGDYNTSLPRPALGGSIPTLPLRSNSIPGARPVLQQQQQMLQMRPGEIPMGMGANPYGQAAASNQLGSWPDGMLSMEQVSHGTQNRPLLRNSLDDLVGPPSNLEGQSDERALLDQLHTLLSNTDATGLEEIDRALGIPELVNQGQALEPKQDAFQGQEAAVMMDQKAGLYGQTYPAQGPPMQGGFHLQGQSPSFNSMMNQMNQQGNFPLQGMHPRANIMRPRTNTPKQLRMQLQQRLQGQQFLNQSRQALELKMENPTAGGAAVMRPMMQPQVSSQQGFLNAQMVAQRSRELLSHHFRQQRVAMMMQQQQQQQQQQQQQQQQQQQQQQQQQQQQQTQAFSPPPNVTASPSMDGLLAGPTMPQAPPQQFPYQPNYGMGQQPDPAFGRVSSPPNAMMSSRMGPSQNPMMQHPQAASIYQSSEMKGWPSGNLARNSSFSQQQFAHQGNPAVYSMVHMNGSSGHMGQMNMNPMPMSGMPMGPDQKYC

SEQ ID NO: 15346 - protein, 614 aa, Homo sapiens
MNTFQDQSGSSSNREPLLRCSDARRDLELAIGGVLRAEQQIKDNLREVKAQIHSCISRHLECLRSREVWLYEQVDLIYQLKEETLQQQAQQLYSLLGQFNCLTHQLECTQNKDLANQVSVCLERLGSLTLKPEDSTVLLFEADTITLRQTITTFGSLKTIQIPEHLMAHASSANIGPFLEKRGCISMPEQKSASGIVAVPFSEWLLGSKPASGYQAPYIPSTDPQDWLTQKQTLENSQTSSRACNFFNNVGGNLKGLENWLLKSEKSSYQKCNSHSTTSSFSIEMEKVGDQELPDQDEMDLSDWLVTPQESHKLRKPENGSRETSEKFKLLFQSYNVNDWLVKTDSCTNCQGNQPKGVEIENLGNLKCLNDHLEAKKPLSTPSMVTEDWLVQNHQDPCKVEEVCRANEPCTSFAECVCDENCEKEALYKWLLKKEGKDKNGMPVEPKPEPEKHKDSLNMWLCPRKEVIEQTKAPKAMTPSRIADSFQVIKNSPLSEWLIRPPYKEGSPKEVPGTEDRAGKQKFKSPMNTSWCSFNTADWVLPGKKMGNLSQLSSGEDKWLLRKKAQEVLLNSPLQEEHNFPPDHYGLPAVCDLFACMQLKVDKEKWLYRTPLQM

SEQ ID NO: 15347 - protein, 579 aa, Homo sapiens
MNTAPSRPSPTRRDPYGFGDSRDSRRDRSPIRGSPRREPRDGRNGRDARDSRDIRDPRDLRDHRHSRDLRDHRDSRSVRDVRDVRDLRDFRDLRDSRDFRDQRDPMYDRYRDMRDSRDPMYRREGSYDRYLRMDDYCRRKDDSYFDRYRDSFDGRGPPGPESQSRAKERLKREERRREELYRQYFEEIQRRFDAERPVDCSVIVVNKQTKDYAESVGRKVRDLGMVVDLIFLNTEVSLSQALEDVSRGGSPFAIVITQQHQIHRSCTVNIMFGTPQEHRNMPQADAMVLVARNYERYKNECREKEREEIARQAAKMADEAILQERERGGPEEGVRGGHPPAIQSLINLLADNRYLTAEETDKIINYLRERKERLMRSSTDSLPGPISRQPLGATSGASLKTQPSSQPLQSGQVLPSATPTPSAPPTSQQELQAKILSLFNSGTVTANSSSASPSVAAGNTPNQNFSTAANSQPQQRSQASGNQPPSILGQGGSAQNMGPRPGAPSQGLFGQPSSRLAPASNMTSQRPVSSTGINFDNPSVQKALDTLIQSGPALSHLVSQTTAQMGQPQAPMGSYQRHY

SEQ ID NO: 15348 - protein, 2063 aa, Homo sapiens
MVLDDLPNLEDIYTSLCSSTMEDSEMDFDSGLEDDDTKSDSILEDSTIFVAFKGNIDDKDFKWKLDAILKNVPNLLHMESSKLKVQKVEPWNSVRVTFNIPREAAERLRILAQSNNQQLRDLGILSVQIEGEGAINLALAQNRSQDVRMNGPMGAGNSVRMEAGFPMASGPGIIRMNNPATVMIPPGGNVSSSMMAPGPNPELQPRTPRPASQSDAMDPLLSGLHIQQQSHPSGSLAPPHHPMQPVSVNRQMNPANFPQLQQQQQQQQQQQQQQQQQQQQQQQQQLQARPPQQHQQQQPQGIRPQFTAPTQVPVPPGWNQLPSGALQPPPAQGSLGTMTANQGWKKAPLPGPMQQQLQARPSLATVQTPSHPPPPYPFGSQQASQAHTNFPQMSNPGQFTAPQMKSLQGGPSRVPTPLQQPHLTNKSPASSPSSFQQGSPASSPTVNQTQQQMGPRPPQNNPLPQGFQQPVSSPGRNPMVQQGNVPPNFMVMQQQPPNQGPQSLHPGLGGMPKRLPPGFSAGQANPNFMQGQVPSTTATTPGNSGAPQLQANQNVQHAGGQGAGPPQNQMQVSHGPPNMMQPSLMGIHGNMNNQQAGTSGVPQVNLSNMQGQPQQGPPSQLMGMHQQIVPSQGQMVQQQGTLNPQNPMILSRAQLMPQGQMMVNPPSQNLGPSPQRMTPPKQMLSQQGPQMMAPHNQMMGPQGQVLLQQNPMIEQIMTNQMQGNKQQFNTQNQSNVMPGPAQIMRGPTPNMQGNMVQFTGQMSGQMLPQQGPVNNSPSQVMGIQGQVLRPPGPSPHMAQQHGDPATTANNDVSLSQMMPDVSIQQTNMVPPHVQAMQGNSASGNHFSGHGMSFNAPFSGAPNGNQMSCGQNPGFPVNKDVTLTSPLLVNLLQSDISAGHFGVNNKQNNTNANKPKKKKPPRKKKNSQQDLNTPDTRPAGLEEADQPPLPGEQGINLDNSGPKLPEFSNRPPGYPSQPVEQRPLQQMPPQLMQHVAPPPQPPQQQPQPQLPQQQQPPPPSQPQSQQQQQQQQQMMMMLMMQQDPKSVRLPVSQNVHPPRGPLNPDSQRMPMQQSGSVPVMVSLQGPASVPPSPDKQRMPMPVNTPLGSNSRKMVYQESPQNPSSSPLAEMASLPEASGSEAPSVPGGPNNMPSHVVLPQNQLMMTGPKPGPSPLSATQGATPQQPPVNSLPSSHGHHFPNVAAPTQTSRPKTPNRASPRPYYPQTPNNRPPSTEPSEISLSPERLNASIAGLFPPQINIPLPPRPNLNRGFDQQGLNPTTLKAIGQAPSNLTMNPSNFATPQTHKLDSVVVNSGKQSNSGATKRASPSNSRRSSPGSSRKTTPSPGRQNSKAPKLTLASQTNAALLQNVELPRNVLVSPTPLANPPVPGSFPNNSGLNPQNSTVSVAAVGGVVEDNKESLNVPQDSDCQNSQSRKEQVNIELKAVPAQEVKMVVPEDQSKKDGQPSDPNKLPSVEENKNLVSPAMREAPTSLSQLLDNSGAPNVTIKPPGLTDLEVTPPVVSGEDLKKASVIPTLQDLSSSKEPSNSLNLPHSNELCSSLVHPELSEVSSNVAPSIPPVMSRPVSSSSISTPLPPNQITVFVTSNPITTSANTSAALPTHLQSALMSTVVTMPNAGSKVMVSEGQSAAQSNARPQFITPVFINSSSIIQVMKGSQPSTIPAAPLTTNSGLMPPSVAVVGPLHIPQNIKFSSAPVPPNALSSSPAPNIQTGRPLVLSSRATPVQLPSPPCTSSPVVPSHPPVQQVKELNPDEASPQVNTSADQNTLPSSQSTTMVSPLLTNSPGSSGNRRSPVSSSKGKGKVDKIGQILLTKACKKVTGSLEKGEEQYGADGETEGQGLDTTAPGLMGTEQLSTELDSKTPTPPAPTLLKMTSSPVGPGTASAGPSLPGGALPTSVRSIVTTLVPSELISAVPTTKSNHGGIASESLAGGLVEEKVGSHPELLPSIAPSQNLVSKETSTTALQASVARPELEVNAAIVSGQSSEPKEIVEKSKIPGRRNSRTEEPTVASESVENGHRKRSSRPASASSSTKDITSAVQSKRRKSK

SEQ ID NO: 15349 - protein, 942 aa, Homo sapiens
MDTKEEKKERKQSYFARLKKKKQAKQNAETASAVATRTHTGKEDNNTVVLEPDKCNIAVEEEYMTDEKKKRKSNQLKEIRRTELKRYYSIDDNQNKTHDKKEKKMVVQKPHGTMEYTAGNQDTLNSIALKFNITPNKLVELNKLFTHTIVPGQVLFVPDANSPSSTLRLSSSSPGATVSPSSSDAEYDKLPDADLARKALKPIERVLSSTSEEDEPGVVKFLKMNCRYFTDGKGVVGGVMIVTPNNIMFDPHKSDPLVIENGCEEYGLICPMEEVVSIALYNDISHMKIKDALPSDLPQDLCPLYRPGEWEDLASEKDINPFSKFKSINKEKRQQNGEKIMTSDSRPIVPLEKSTGHTPTKPSGSSVSEKLKKLDSSRETSHGSPTVTKLSKEPSDTSSAFESTAKENFLGEDDDFVDLEELSSQTGGGMHKKDTLKECLSLDPEERKKAESQINNSAVEMQVQSALAFLGTENDVELKGALDLETCEKQDIMPEVDKQSGSPESRVENTLNIHEDLDKVKLIEYYLTKNKEGPQVSENLQKTELSDGKSIEPGGIDITLSSSLSQAGDPITEGNKEPDKTWVKKGEPLPVKLNSSTEANVIKEALDSSLESTLDNSCQGAQMDNKSEVQLWLLKRIQVPIEDILPSKEEKSKTPPMFLCIKVGKPMRKSFATHTAAMVQQYGKRRKQPEYWFAVPRERVDHLYTFFVQWSPDVYGKDAKEQGFVVVEKEELNMIDNFFSEPTTKSWEIITVEEAKRRKSTCSYYEDEDEEVLPVLRPHSALLENMHIEQLARRLPARVQGYPWRLAYSTLEHGTSLKTLYRKSASLDSPVLLVIKDMDNQIFGAYATHPFKFSDHYYGTGETFLYTFSPHFKVFKWSGENSYFINGDISSLELGGGGGRFGLWLDADLYHGRSNSCSTFNNDILSKKEDFIVQDLEVWAFD

SEQ ID NO: 15350 - protein, 2440 aa, Homo sapiens
MSSSGYPPNQGAFSTEQSRYPPHSVQYTFPNTRHQQEFAVPDYRSSHLEVSQASQLLQQQQQQQLRRRPSLLSEFHPGSDRPQERRTSYEPFHPGPSPVDHDSLESKRPRLEQVSDSHFQRVSAAVLPLVHPLPEGLRASADAKKDPAFGGKHEAPSSPISGQPCGDDQNASPSKLSKEELIQSMDRVDREIAKVEQQILKLKKKQQQLEEEAAKPPEPEKPVSPPPVEQKHRSIVQIIYDENRKKAEEAHKIFEGLGPKVELPLYNQPSDTKVYHENIKTNQVMRKKLILFFKRRNHARKQREQKICQRYDQLMEAWEKKVDRIENNPRRKAKESKTREYYEKQFPEIRKQREQQERFQRVGQRGAGLSATIARSEHEISEIIDGLSEQENNEKQMRQLSVIPPMMFDAEQRRVKFINMNGLMEDPMKVYKDRQFMNVWTDHEKEIFKDKFIQHPKNFGLIASYLERKSVPDCVLYYYLTKKNENYKALVRRNYGKRRGRNQQIARPSQEEKVEEKEEDKAEKTEKKEEEKKDEEEKDEKEDSKENTKEKDKIDGTAEETEEREQATPRGRKTANSQGRRKGRITRSMTNEAAAASAAAAAATEEPPPPLPPPPEPISTEPVETSRWTEEEMEVAKKGLVEHGRNWAAIAKMVGTKSEAQCKNFYFNYKRRHNLDNLLQQHKQKTSRKPREERDVSQCESVASTVSAQEDEDIEASNEEENPEDSEVEAVKPSEDSPENATSRGNTEPAVELEPTTETAPSTSPSLAVPSTKPAEDESVETQVNDSISAETAEQMDVDQQEHSAEEGSVCDPPPATKADSVDVEVRVPENHASKVEGDNTKERDLDRASEKVEPRDEDLVVAQQINAQRPEPQSDNDSSATCSADEDVDGEPERQRMFPMDSKPSLLNPTGSILVSSPLKPNPLDLPQLQHRAAVIPPMVSCTPCNIPIGTPVSGYALYQRHIKAMHESALLEEQRQRQEQIDLECRSSTSPCGTSKSPNREWEVLQPAPHQVITNLPEGVRLPTTRPTRPPPPLIPSSKTTVASEKPSFIMGGSISQGTPGTYLTSHNQASYTQETPKPSVGSISLGLPRQQESAKSATLPYIKQEEFSPRSQNSQPEGLLVRAQHEGVVRGTAGAIQEGSITRGTPTSKISVESIPSLRGSITQGTPALPQTGIPTEALVKGSISRMPIEDSSPEKGREEAASKGHVIYEGKSGHILSYDNIKNAREGTRSPRTAHEISLKRSYESVEGNIKQGMSMRESPVSAPLEGLICRALPRGSPHSDLKERTVLSGSIMQGTPRATTESFEDGLKYPKQIKRESPPIRAFEGAITKGKPYDGITTIKEMGRSIHEIPRQDILTQESRKTPEVVQSTRPIIEGSISQGTPIKFDNNSGQSAIKHNVKSLITGPSKLSRGMPPLEIVPENIKVVERGKYEDVKAGETVRSRHTSVVSSGPSVLRSTLHEAPKAQLSPGIYDDTSARRTPVSYQNTMSRGSPMMNRTSDVTISSNKSTNHERKSTLTPTQRESIPAKSPVPGVDPVVSHSPFDPHHRGSTAGEVYRSHLPTHLDPAMPFHRALDPAAAAYLFQRQLSPTPGYPSQYQLYAMENTRQTILNDYITSQQMQVNLRPDVARGLSPREQPLGLPYPATRGIIDLTNMPPTILVPHPGGTSTPPMDRITYIPGTQITFPPRPYNSASMSPGHPTHLAAAASAEREREREREKERERERIAAASSDLYLRPGSEQPGRPGSHGYVRSPSPSVRTQETMLQQRPSVFQGTNGTSVITPLDPTAQLRIMPLPAGGPSISQGLPASRYNTAADALAALVDAAASAPQMDVSKTKESKHEAARLEENLRSRSAAVSEQQQLEQKTLEVEKRSVQCLYTSSAFPSGKPQPHSSVVYSEAGKDKGPPPKSRYEEELRTRGKTTITAANFIDVIITRQIASDKDARERGSQSSDSSSSLSSHRYETPSDAIEVISPASSPAPPQEKLQTYQPEVVKANQAENDPTRQYEGPLHHYRPQQESPSPQQQLPPSSQAEGMGQVPRTHRLITLADHICQIITQDFARNQVSSQTPQQPPTSTFQNSPSALVSTPVRTKTSNRYSPESQAQSVHHQRPGSRVSPENLVDKSRGSRPGKSPERSHVSSEPYEPISPPQVPVVHEKQDSLLLLSQRGAEPAEQRNDARSPGSISYLPSFFTKLENTSPMVKSKKQEIFRKLNSSGGGDSDMAAAQPGTEIFNLPAVTTSGSVSSRGHSFADPASNLGLEDIIRKALMGSFDDKVEDHGVVMSQPMGVVPGTANTSVVTSGETRREEGDPSPHSGGVCKPKLISKSNSRKSKSPIPGQGYLGTERPSSVSSVHSEGDYHRQTPGWAWEDRPSSTGSTQFPYNPLTMRMLSSTPPTPIACAPSAVNQAAPHQQNRIWEREPAPLLSAQYETLSDSDD

SEQ ID NO: 15351 - protein, 2525 aa, Homo sapiens
MSGSTQPVAQTWRATEPRYPPHSLSYPVQIARTHTDVGLLEYQHHSRDYASHLSPGSIIQPQRRRPSLLSEFQPGNERSQELHLRPESHSYLPELGKSEMEFIESKRPRLELLPDPLLRPSPLLATGQPAGSEDLTKDRSLTGKLEPVSPPSPPHTDPELELVPPRLSKEELIQNMDRVDREITMVEQQISKLKKKQQQLEEEAAKPPEPEKPVSPPPIESKHRSLVQIIYDENRKKAEAAHRILEGLGPQVELPLYNQPSDTRQYHENIKINQAMRKKLILYFKRRNHARKQWEQKFCQRYDQLMEAWEKKVERIENNPRRRAKESKVREYYEKQFPEIRKQRELQERMQSRVGQRGSGLSMSAARSEHEVSEIIDGLSEQENLEKQMRQLAVIPPMLYDADQQRIKFINMNGLMADPMKVYKDRQVMNMWSEQEKETFREKFMQHPKNFGLIASFLERKTVAECVLYYYLTKKNENYKSLVRRSYRRRGKSQQQQQQQQQQQQQQQQQPMPRSSQEEKDEKEKEKEAEKEEEKPEVENDKEDLLKEKTDDTSGEDNDEKEAVASKGRKTANSQGRRKGRITRSMANEANSEEAITPQQSAELASMELNESSRWTEEEMETAKKGLLEHGRNWSAIARMVGSKTVSQCKNFYFNYKKRQNLDEILQQHKLKMEKERNARRKKKKAPAAASEEAAFPPVVEDEEMEASGVSGNEEEMVEEAEALHASGNEVPRGECSGPATVNNSSDTESIPSPHTEAAKDTGQNGPKPPATLGADGPPPGPPTPPPEDIPAPTEPTPASEATGAPTPPPAPPSPSAPPPVVPKEEKEEETAAAPPVEEGEEQKPPAAEELAVDTGKAEEPVKSECTEEAEEGPAKGKDAEAAEATAEGALKAEKKEGGSGRATTAKSSGAPQDSDSSATCSADEVDEAEGGDKNRLLSPRPSLLTPTGDPRANASPQKPLDLKQLKQRAAAIPPIQVTKVHEPPREDAAPTKPAPPAPPPPQNLQPESDAPQQPGSSPRGKSRSPAPPADKEAEKPVFFPAFAAEAQKLPGDPPCWTSGLPFPVPPREVIKASPHAPDPSAFSYAPPGHPLPLGLHDTARPVLPRPPTISNPPPLISSAKHPSVLERQIGAISQGMSVQLHVPYSEHAKAPVGPVTMGLPLPMDPKKLAPFSGVKQEQLSPRGQAGPPESLGVPTAQEASVLRGTALGSVPGGSITKGIPSTRVPSDSAITYRGSITHGTPADVLYKGTITRIIGEDSPSRLDRGREDSLPKGHVIYEGKKGHVLSYEGGMSVTQCSKEDGRSSSGPPHETAAPKRTYDMMEGRVGRAISSASIEGLMGRAIPPERHSPHHLKEQHHIRGSITQGIPRSYVEAQEDYLRREAKLLKREGTPPPPPPSRDLTEAYKTQALGPLKLKPAHEGLVATVKEAGRSIHEIPREELRHTPELPLAPRPLKEGSITQGTPLKYDTGASTTGSKKHDVRSLIGSPGRTFPPVHPLDVMADARALERACYEESLKSRPGTASSSGGSIARGAPVIVPELGKPRQSPLTYEDHGAPFAGHLPRGSPVTTREPTPRLQEGSLSSSKASQDRKLTSTPREIAKSPHSTVPEHHPHPISPYEHLLRGVSGVDLYRSHIPLAFDPTSIPRGIPLDAAAAYYLPRHLAPNPTYPHLYPPYLIRGYPDTAALENRQTIINDYITSQQMHHNAATAMAQRADMLRGLSPRESSLALNYAAGPRGIIDLSQVPHLPVLVPPTPGTPATAMDRLAYLPTAPQPFSSRHSSSPLSPGGPTHLTKPTTTSSSERERDRDRERDRDREREKSILTSTTTVEHAPIWRPGTEQSSGSSGSSGGGGGSSSRPASHSHAHQHSPISPRTQDALQQRPSVLHNTGMKGIITAVEPSTPTVLRSTSTSSPVRPAATFPPATHCPLGGTLDGVYPTLMEPVLLPKEAPRVARPERPRADTGHAFLAKPPARSGLEPASSPSKGSEPRPLVPPVSGHATIARTPAKNLAPHHASPDPPAPPASASDPHREKTQSKPFSIQELELRSLGYHGSSYSPEGVEPVSPVSSPSLTHDKGLPKHLEELDKSHLEGELRPKQPGPVKLGGEAAHLPHLRPLPESQPSSSPLLQTAPGVKGHQRVVTLAQHISEVITQDYTRHHPQQLSAPLPAPLYSFPGASCPVLDLRRPPSDLYLPPPDHGAPARGSPHSEGGKRSPEPNKTSVLGGGEDGIEPVSPPEGMTEPGHSRSAVYPLLYRDGEQTEPSRMGSKSPGNTSQPPAFFSKLTESNSAMVKSKKQEINKKLNTHNRNEPEYNISQPGTEIFNMPAITGTGLMTYRSQAVQEHASTNMGLEAIIRKALMGKYDQWEESPPLSANAFNPLNASASLPAAMPITAADGRSDHTLTSPGGGGKAKVSGRPSSRKAKSPAPGLASGDRPPSVSSVHSEGDCNRRTPLTNRVWEDRPSSAGSTPFPYNPLIMRLQAGVMASPPPPGLPAGSGPLAGPHHAWDEEPKPLLCSQYETLSDSE

SEQ ID NO: 15352 - protein, 356 aa, Homo sapiens
MTKSYSESGLMGEPQPQGPPSWTDECLSSQDEEHEADKKEDDLETMNAEEDSLRNGGEEEDEDEDLEEEEEEEEEDDDQKPKRRGPKKKKMTKARLERFKLRRMKANARERNRMHGLNAALDNLRKVVPCYSKTQKLSKIETLRLAKNYIWALSEILRSGKSPDLVSFVQTLCKGLSQPTTNLVAGCLQLNPRTFLPEQNQDMPPHLPTASASFPVHPYSYQSPGLPSPPYGTMDSSHVFHVKPPPHAYSAALEPFFESPLTDCTSPSFDGPLSPPLSINGNFSFKHEPSAEFEKNYAFTMHYPAATLAGAQSHGSIFSGTAAPRCEIPIDNIMSFDSHSHHERVMSAQLNAIFHD

SEQ ID NO: 15353 - protein, 382 aa, Homo sapiens
MLTRLFSEPGLLSDVPKFASWGDGEDDEPRSDKGDAPPPPPPAPGPGAPGPARAAKPVPLRGEEGTEATLAEVKEEGELGGEEEEEEEEEEGLDEAEGERPKKRGPKKRKMTKARLERSKLRRQKANARERNRMHDLNAALDNLRKVVPCYSKTQKLSKIETLRLAKNYIWALSEILRSGKRPDLVSYVQTLCKGLSQPTTNLVAGCLQLNSRNFLTEQGADGAGRFHGSGGPFAMHPYPYPCSRLAGAQCQAAGGLGGGAAHALRTHGYCAAYETLYAAAGGGGASPDYNSSEYEGPLSPPLCLNGNFSLKQDSSPDHEKSYHYSMHYSALPGSRPTGHGLVFGSSAVRGGVHSENLLSYDMHLHHDRGPMYEELNAFFHN

SEQ ID NO: 15354 - protein, 331 aa, Homo sapiens
MSKTFVKSKEMGELVNTPSWMDKGLGSQNEVKEEESRPGTYGMLSSLTEEHDSIEEEEEEEEDGEKPKRRGPKKKKMTKARLERFRARRVKANARERTRMHGLNDALDNLRRVMPCYSKTQKLSKIETLRLARNYIWALSEVLETGQTPEGKGFVEMLCKGLSQPTSNLVAGCLQLGPQSVLLEKHEDKSPICDSAISVHNFNYQSPGLPSPPYGHMETHLLHLKPQVFKSLGESSFGSHLPDCSTPPYEGPLTPPLSISGNFSLKQDGSPDLEKSYSFMPHYPSSSLSSGHVHSTPFQAGTPRYDVPIDMSYDSYPHHGIGTQLNTVFTE

SEQ ID NO: 15355 - protein, 337 aa, Homo sapiens
MLTLPFDESVVMPESQMCRKFSRECEDQKQIKKPESFSKQIVLRGKSIKRAPGEETEKEEEEEDREEEDENGLPRRRGLRKKKTTKLRLERVKFRRQEANARERNRMHGLNDALDNLRKVVPCYSKTQKLSKIETLRLAKNYIWALSEILRIGKRPDLLTFVQNLCKGLSQPTTNLVAGCLQLNARSFLMGQGGEAAHHTRSPYSTFYPPYHSPELTTPPGHGTLDNSKSMKPYNYCSAYESFYESTSPECASPQFEGPLSPPPINYNGIFSLKQEETLDYGKNYNYGMHYCAVPPRGPLGQGAMFRLPTDSHFPYDLHLRSQSLTMQDELNAVFHN

SEQ ID NO: 15356 - protein, 237 aa, Homo sapiens
MPARLETCISDLDCASSSGSDLSGFLTDEEDCARLQQAASASGPPAPARRGAPNISRASEVPGAQDDEQERRRRRGRTRVRSEALLHSLRRSRRVKANDRERNRMHNLNAALDALRSVLPSFPDDTKLTKIETLRFAYNYIWALAETLRLADQGLPGGGARERLLPPQCVPCLPGPPSPASDAESWGSGAAAASPLSDPSSPAASEDFTYRPGDPVFSFPSLPKDLLHTTPCFIPYH

SEQ ID NO: 15357 - protein, 272 aa, Homo sapiens
MFVKSETLELKEEEDVLVLLGSASPALAALTPLSSSADEEEEEEPGASGGARRQRGAEAGQGARGGVAAGAEGCRPARLLGLVHDCKRRPSRARAVSRGAKTAETVQRIKKTRRLKANNRERNRMHNLNAALDALREVLPTFPEDAKLTKIETLRFAHNYIWALTETLRLADHCGGGGGGLPGALFSEAVLLSPGGASAALSSSGDSPSPASTWSCTNSPAPSSSVSSNSTSPYSCTLSPASPAGSDMDYWQPPPPDKHRYAPHLPIARDCI

SEQ ID NO: 15358 - protein, 214 aa, Homo sapiens
MTPQPSGAPTVQVTRETERSFPRASEDEVTCPTSAPPSPTRTRGNCAEAEEGGCRGAPRKLRARRGGRSRPKSELALSKQRRSRRKKANDRERNRMHNLNSALDALRGVLPTFPDDAKLTKIETLRFAHNYIWALTQTLRIADHSLYALEPPAPHCGELGSPGGSPGDWGSLYSPVSQAGSLSPAASLEERPGLLGATFSACLSPGSLAFSDFL

SEQ ID NO: 15359 - protein, 1531 aa, Homo sapiens
MPSDFISLLSADLDLESPKSLYSRESVYDLLPKELQLPPSRETSVASMSQTSGGEAGSPPPAVVAADASSAPSSSSMGGACSSFTTSSSPTIYSTSVTDSKAMQVESCSSAVGVSNRGVSEKQLTSNTVQQHPSTPKRHTVLYISPPPEDLLDNSRMSCQDEGCGLESEQSCSMWMEDSPSNFSNMSTSSYNDNTEVPRKSRKRNPKQRPGVKRRDCEESNMDIFDADSAKAPHYVLSQLTTDNKGNSKAGNGTLENQKGTGVKKSPMLCGQYPVKSEGKELKIVVQPETQHRARYLTEGSRGSVKDRTQQGFPTVKLEGHNEPVVLQVFVGNDSGRVKPHGFYQACRVTGRNTTPCKEVDIEGTTVIEVGLDPSNNMTLAVDCVGILKLRNADVEARIGIAGSKKKSTRARLVFRVNIMRKDGSTLTLQTPSSPILCTQPAGVPEILKKSLHSCSVKGEEEVFLIGKNFLKGTKVIFQENVSDENSWKSEAEIDMELFHQNHLIVKVPPYHDQHITLPVSVGIYVVTNAGRSHDVQPFTYTPDPAAAGALNVNVKKEISSPARPCSFEEAMKAMKTTGCNLDKVNIIPNALMTPLIPSSMIKSEDVTPMEVTAEKRSSTIFKTTKSVGSTQQTLENISNIAGNGSFSSPSSSHLPSENEKQQQIQPKAYNPETLTTIQTQDISQPGTFPAVSASSQLPNSDALLQQATQFQTRETQSREILQSDGTVVNLSQLTEASQQQQQSPLQEQAQTLQQQISSNIFPSPNSVSQLQNTIQQLQAGSFTGSTASGSSGSVDLVQQVLEAQQQLSSVLFSAPDGNENVQEQLSADIFQQVSQIQSGVSPGMFSSTEPTVHTRPDNLLPGRAESVHPQSENTLSNQQQQQQQQQQVMESSAAMVMEMQQSICQAAAQIQSELFPSTASANGNLQQSPVYQQTSHMMSALSTNEDMQMQCELFSSPPAVSGNETSTTTTQQVATPGTTMFQTSSSGDGEETGTQAKQIQNSVFQTMVQMQHSGDNQPQVNLFSSTKSMMSVQNSGTQQQGNGLFQQGNEMMSLQSGNFLQQSSHSQAQLFHPQNPIADAQNLSQETQGSLFHSPNPIVHSQTSTTSSEQMQPPMFHSQSTIAVLQGSSVPQDQQSTNIFLSQSPMNNLQTNTVAQEAFFAAPNSISPLQSTSNSEQQAAFQQQAPISHIQTPMLSQEQAQPPQQGLFQPQVALGSLPPNPMPQSQQGTMFQSQHSIVAMQSNSPSQEQQQQQQQQQQQQQQQQQSILFSNQNTMATMASPKQPPPNMIFNPNQNPMANQEQQNQSIFHQQSNMAPMNQEQQPMQFQSQSTVSSLQNPGPTQSESSQTPLFHSSPQIQLVQGSPSSQEQQVTLFLSPASMSALQTSINQQDMQQSPLYSPQNNMPGIQGATSSPQPQATLFHNTAGGTMNQLQNSPGSSQQTSGMFLFGIQNNCSQLLTSGPATLPDQLMAISQPGQPQNEGQPPVTTLLSQQMPENSPLASSINTNQNIEKIDLLVSLQNQGNNLTGSF

SEQ ID NO: 15360 - protein, 943 aa, Homo sapiens
MPSTSFPVPSKFPLGPAAAVFGRGETLGPAPRAGGTMKSAEEEHYGYASSNVSPALPLPTAHSTLPAPCHNLQTSTPGIIPPADHPSGYGAALDGGPAGYFLSSGHTRPDGAPALESPRIEITSCLGLYHNNNQFFHDVEVEDVLPSSKRSPSTATLSLPSLEAYRDPSCLSPASSLSSRSCNSEASSYESNYSYPYASPQTSPWQSPCVSPKTTDPEEGFPRGLGACTLLGSPRHSPSTSPRASVTEESWLGARSSRPASPCNKRKYSLNGRQPPYSPHHSPTPSPHGSPRVSVTDDSWLGNTTQYTSSAIVAAINALTTDSSLDLGDGVPVKSRKTTLEQPPSVALKVEPVGEDLGSPPPPADFAPEDYSSFQHIRKGGFCDQYLAVPQHPYQWAKPKPLSPTSYMSPTLPALDWQLPSHSGPYELRIEVQPKSHHRAHYETEGSRGAVKASAGGHPIVQLHGYLENEPLMLQLFIGTADDRLLRPHAFYQVHRITGKTVSTTSHEAILSNTKVLEIPLLPENSMRAVIDCAGILKLRNSDIELRKGETDIGRKNTRVRLVFRVHVPQPSGRTLSLQVASNPIECSQRSAQELPLVEKQSTDSYPVVGGKKMVLSGHNFLQDSKVIFVEKAPDGHHVWEMEAKTDRDLCKPNSLVVEIPPFRNQRITSPVHVSFYVCNGKRKRSQYQRFTYLPANVPIIKTEPTDDYEPAPTCGPVSQGLSPLPRPYYSQQLAMPPDPSSCLVAGFPPCPQRSTLMPAAPGVSPKLHDLSPAAYTKGVASPGHCHLGLPQPAGEAPAVQDVPRPVATHPGSPGQPPPALLPQQVSAPPSSSCPPGLEHSLCPSSPSPPLPPATQEPTCLQPCSPACPPATGRPQHLPSTVRRDESPTAGPRLLPEVHEDGSPNLAPIPVTVKREPEELDQLYLDDVNEIIRNDLSSTSTHS

SEQ ID NO: 15361 - protein, 925 aa, Homo sapiens
MNAPERQPQPDGGDAPGHEPGGSPQDELDFSILFDYEYLNPNEEEPNAHKVASPPSGPAYPDDVLDYGLKPYSPLASLSGEPPGRFGEPDRVGPQKFLSAAKPAGASGLSPRIEITPSHELIQAVGPLRMRDAGLLVEQPPLAGVAASPRFTLPVPGFEGYREPLCLSPASSGSSASFISDTFSPYTSPCVSPNNGGPDDLCPQFQNIPAHYSPRTSPIMSPRTSLAEDSCLGRHSPVPRPASRSSSPGAKRRHSCAEALVALPPGASPQRSRSPSPQPSSHVAPQDHGSPAGYPPVAGSAVIMDALNSLATDSPCGIPPKMWKTSPDPSPVSAAPSKAGLPRHIYPAVEFLGPCEQGERRNSAPESILLVPPTWPKPLVPAIPICSIPVTASLPPLEWPLSSQSGSYELRIEVQPKPHHRAHYETEGSRGAVKAPTGGHPVVQLHGYMENKPLGLQIFIGTADERILKPHAFYQVHRITGKTVTTTSYEKIVGNTKVLEIPLEPKNNMRATIDCAGILKLRNADIELRKGETDIGRKNTRVRLVFRVHIPESSGRIVSLQTASNPIECSQRSAHELPMVERQDTDSCLVYGGQQMILTGQNFTSESKVVFTEKTTDGQQIWEMEATVDKDKSQPNMLFVEIPEYRNKHIRTPVKVNFYVINGKRKRSQPQHFTYHPVPAIKTEPTDEYDPTLICSPTHGGLGSQPYYPQHPMVAESPSCLVATMAPCQQFRTGLSSPDARYQQQNPAAVLYQRSKSLSPSLLGYQQPALMAAPLSLADAHRSVLVHAGSQGQSSALLHPSPTNQQASPVIHYSPTNQQLRCGSHQEFQHIMYCENFAPGTTRPGPPPVSQGQRLSPGSYPTVIQQQNATSQRAAKNGPPVSDQKEVLPAGVTIKQEQNLDQTYLDDVNEIIRKEFSGPPARNQT

SEQ ID NO: 15362 - protein, 1075 aa, Homo sapiens
MTTANCGAHDELDFKLVFGEDGAPAPPPPGSRPADLEPDDCASIYIFNVDPPPSTLTTPLCLPHHGLPSHSSVLSPSFQLQSHKNYEGTCEIPESKYSPLGGPKPFECPSIQITSISPNCHQELDAHEDDLQINDPEREFLERPSRDHLYLPLEPSYRESSLSPSPASSISSRSWFSDASSCESLSHIYDDVDSELNEAAARFTLGSPLTSPGGSPGGCPGEETWHQQYGLGHSLSPRQSPCHSPRSSVTDENWLSPRPASGPSSRPTSPCGKRRHSSAEVCYAGSLSPHHSPVPSPGHSPRGSVTEDTWLNASVHGGSGLGPAVFPFQYCVETDIPLKTRKTSEDQAAILPGKLELCSDDQGSLSPARETSIDDGLGSQYPLKKDSCGDQFLSVPSPFTWSKPKPGHTPIFRTSSLPPLDWPLPAHFGQCELKIEVQPKTHHRAHYETEGSRGAVKASTGGHPVVKLLGYNEKPINLQMFIGTADDRYLRPHAFYQVHRITGKTVATASQEIIIASTKVLEIPLLPENNMSASIDCAGILKLRNSDIELRKGETDIGRKNTRVRLVFRVHIPQPSGKVLSLQIASIPVECSQRSAQELPHIEKYSINSCSVNGGHEMVVTGSNFLPESKIIFLEKGQDGRPQWEVEGKIIREKCQGAHIVLEVPPYHNPAVTAAVQVHFYLCNGKRKKSQSQRFTYTPVLMKQEHREEIDLSSVPSLPVPHPAQTQRPSSDSGCSHDSVLSGQRSLICSIPQTYASMVTSSHLPQLQCRDESVSKEQHMIPSPIVHQPFQVTPTPPVGSSYQPMQTNVVYNGPTCLPINAASSQEFDSVLFQQDATLSGLVNLGCQPLSSIPFHSSNSGSTGHLLAHTPHSVHTLPHLQSMGYHCSNTGQRSLSSPVADQITGQPSSQLQPITYGPSHSGSATTASPAASHPLASSPLSGPPSPQLQPMPYQSPSSGTASSPSPATRMHSGQHSTQAQSTGQGGLSAPSSLICHSLCDPASFPPDGATVSIKPEPEDREPNFATIGLQDITLDDVNEIIGRDMSQISVSQGAGVSRQAPLPSPESLDLGRSDGL

SEQ ID NO: 15363 - protein, 902 aa, Homo sapiens
MGAASCEDEELEFKLVFGEEKEAPPLGAGGLGEELDSEDAPPCCRLALGEPPPYGAAPIGIPRPPPPRPGMHSPPPRPAPSPGTWESQPARSVRLGGPGGGAGGAGGGRVLECPSIRITSISPTPEPPAALEDNPDAWGDGSPRDYPPPEGFGGYREAGGQGGGAFFSPSPGSSSLSSWSFFSDASDEAALYAACDEVESELNEAASRFGLGSPLPSPRASPRPWTPEDPWSLYGPSPGGRGPEDSWLLLSAPGPTPASPRPASPCGKRRYSSSGTPSSASPALSRRGSLGEEGSEPPPPPPLPLARDPGSPGPFDYVGAPPAESIPQKTRRTSSEQAVALPRSEEPASCNGKLPLGAEESVAPPGGSRKEVAGMDYLAVPSPLAWSKARIGGHSPIFRTSALPPLDWPLPSQYEQLELRIEVQPRAHHRAHYETEGSRGAVKAAPGGHPVVKLLGYSEKPLTLQMFIGTADERNLRPHAFYQVHRITGKMVATASYEAVVSGTKVLEMTLLPENNMAANIDCAGILKLRNSDIELRKGETDIGRKNTRVRLVFRVHVPQGGGKVVSVQAASVPIECSQRSAQELPQVEAYSPSACSVRGGEELVLTGSNFLPDSKVVFIERGPDGKLQWEEEATVNRLQSNEVTLTLTVPEYSNKRVSRPVQVYFYVSNGRRKRSPTQSFRFLPVICKEEPLPDSSLRGFPSASATPFGTDMDFSPPRPPYPSYPHEDPACETPYLSEGFGYGMPPLYPQTGPPPSYRPGLRMFPETRGTTGCAQPPAVSFLPRPFPSDPYGGRGSSFSLGLPFSPPAPFRPPPLPASPPLEGPFPSQSDVHPLPAEGYNKVGPGYGPGEGAPEQEKSRGGYSSGFRDSVPIQGITLEEVSEIIGRDLSGFPAPPGEEPPA

SEQ ID NO: 15364 - protein, 373 aa, Homo sapiens
MSPCPPQQSRNRVIQLSTSELGEMELTWQEIMSITELQGLNAPSEPSFEPQAPAPYLGPPPPTTYCPCSIHPDSGFPLPPPPYELPASTSHVPDPPYSYGNMAIPVSKPLSLSGLLSEPLQDPLALLDIGLPAGPPKPQEDPESDSGLSLNYSDAESLELEGTEAGRRRSEYVEMYPVEYPYSLMPNSLAHSNYTLPAAETPLALEPSSGPVRAKPTARGEAGSRDERRALAMKIPFPTDKIVNLPVDDFNELLARYPLTESQLALVRDIRRRGKNKVAAQNCRKRKLETIVQLERELERLTNERERLLRARGEADRTLEVMRQQLTELYRDIFQHLRDESGNSYSPEEYALQQAADGTIFLVPRGTKMEATD

SEQ ID NO: 15365 - protein, 772 aa, Homo sapiens; identical to SEQ ID NO: 9337

SEQ ID NO: 15366 - protein, 605 aa, Homo sapiens
MMDLELPPPGLPSQQDMDLIDILWRQDIDLGVSREVFDFSQRRKEYELEKQKKLEKERQEQLQKEQEKAFFAQLQLDEETGEFLPIQPAQHIQSETSGSANYSQVAHIPKSDALYFDDCMQLLAQTFPFVDDNEVSSATFQSLVPDIPGHIESPVFIATNQAQSPETSVAQVAPVDLDGMQQDIEQVWEELLSIPELQCLNIENDKLVETTMVPSPEAKLTEVDNYHFYSSIPSMEKEVGNCSPHFLNAFEDSFSSILSTEDPNQLTVNSLNSDATVNTDFGDEFYSAFIAEPSISNSMPSPATLSHSLSELLNGPIDVSDLSLCKAFNQNHPESTAEFNDSDSGISLNTSPSVASPEHSVESSSYGDTLLGLSDSEVEELDSAPGSVKQNGPKTPVHSSGDMVQPLSPSQGQSTHVHDAQCENTPEKELPVSPGHRKTPFTKDKHSSRLEAHLTRDELRAKALHIPFPVEKIINLPVVDFNEMMSKEQFNEAQLALIRDIRRRGKNKVAAQNCRKRKLENIVELEQDLDHLKDEKEKLLKEKGENDKSLHLLKKQLSTLYLEVFSMLRDEDGKPYSPSEYSLQQTRDGNVFLVPKSKKPDVKKN

SEQ ID NO: 15367 - protein, 694 aa, Homo sapiens; identical to SEQ ID NO: 9347

SEQ ID NO: 15368 - protein, 509 aa, Homo sapiens
MYSPLCLTQDEFHPFIEALLPHVRAFAYTWFNLQARKRKYFKKHEKRMSKEEERAVKDELLSEKPEVKQKWASRLLAKLRKDIRPEYREDFVLTVTGKKPPCCVLSNPDQKGKMRRIDCLRQADKVWRLDLVMVILFKGIPLESTDGERLVKSPQCSNPGLCVQPHHIGVSVKELDLYLAYFVHAADSSQSESPSQPSDADIKDQPENGHLGFQDSFVTSGVFSVTELVRVSQTPIAAGTGPNFSLSDLESSSYYSMSPGAMRRSLPSTSSTSSTKRLKSVEDEMDSPGEEPFYTGQGRSPGSGSQSSGWHEVEPGMPSPTTLKKSEKSGFSSPSPSQTSSLGTAFTQHHRPVITGPRASPHATPSTLHFPTSPIIQQPGPYFSHPAIRYHPQETLKEFVQLVCPDAGQQAGQVGFLNPNGSSQGKVHNPFLPTPMLPPPPPPPMARPVPLPVPDTKPPTTSTEGGAASPTSPTYSTPSTSPANRFVSVGPRDPSFVNIPQQTQSWYLG

SEQ ID NO: 15369 - protein, 420 aa, Homo sapiens
MMYSPICLTQDEFHPFIEALLPHVRAIAYTWFNLQARKRKYFKKHEKRMSKDEERAVKDELLSEKPEIKQKWASRLLAKLRKDIRQEYREDFVLTVTGKKHPCCVLSNPDQKGKIRRIDCLRQADKVWRLDLVMVILFKGIPLESTDGERLMKSPHCTNPALCVQPHHITVSVKELDLFLAYYVQEQDSGQSGSPSHNDPAKNPPGYLEDSFVKSGVFNVSELVRVSRTPITQGTGVNFPIGEIPSQPYYHDMNSGVNLQRSLSSPPSSKRPKTISIDENMEPSPTGDFYPSPSSPAAGSRTWHERDQDMSSPTTMKKPEKPLFSSASPQDSSPRLSTFPQHHHPGIPGVAHSVISTRTPPPPSPLPFPTQAILPPAPSSYFSHPTIRYPPHLNPQDTLKNYVPSYDPSSPQTSQSWYLG

SEQ ID NO: 15370 - protein, 508 aa, Homo sapiens
MYSSPLCLTQDEFHPFIEALLPHVRAFAYTWFNLQARKRKYFKKHEKRMSKDEERAVKDELLGEKPEVKQKWASRLLAKLRKDIRPECREDFVLSITGKKAPGCVLSNPDQKGKMRRIDCLRQADKVWRLDLVMVILFKGIPLESTDGERLVKAAQCGHPVLCVQPHHIGVAVKELDLYLAYFVRERDAEQSGSPRTGMGSDQEDSKPITLDTTDFQESFVTSGVFSVTELIQVSRTPVVTGTGPNFSLGELQGHLAYDLNPASTGLRRTLPSTSSSGSKRHKSGSMEEDVDTSPGGDYYTSPSSPTSSSRNWTEDMEGGISSPVKKTEMDKSPFNSPSPQDSPRLSSFTQHHRPVIAVHSGIARSPHPSSALHFPTTSILPQTASTYFPHTAIRYPPHLNPQDPLKDLVSLACDPASQQPGPLNGSGQLKMPSHCLSAQMLAPPPPGLPRLALPPATKPATTSEGGATSPTSPSYSPPDTSPANRSFVGLGPRDPAGIYQAQSWYLG

SEQ ID NO: 15371 - protein, 462 aa, Homo sapiens
MQLRKMQTVKKEQASLDASSNVDKMMVLNSALTEVSEDSTTGEELLLSEGSVGKNKSSACRRKREFIPDEKKDAMYWEKRRKNNEAAKRSREKRRLNDLVLENKLIALGEENATLKAELLSLKLKFGLISSTAYAQEIQKLSNSTAVYFQDYQTSKSNVSSFVDEHEPSMVSSSCISVIKHSPQSSLSDVSEVSSVEHTQESSVQGSCRSPENKFQIIKQEPMELESYTREPRDDRGSYTASIYQNYMGNSFSGYSHSPPLLQVNRSSSNSPRTSETDDGVVGKSSDGEDEQQVPKGPIHSPVELKHVHATVVKVPEVNSSALPHKLRIKAKAMQIKVEAFDNEFEATQKLSSPIDMTSKRHFELEKHSAPSMVHSSLTPFSVQVTNIQDWSLKSEHWHQKELSGKTQNSFKTGVVEMKDSGYKVSDPENLYLKQGIANLSAEVVSLKRLIATQPISASDSG

SEQ ID NO: 15372 - protein, 502 aa, Homo sapiens
MYSPYCLTQDEFHPFIEALLPHVRAFSYTWFNLQARKRKYFKKHEKRMSKDEERAVKDELLGEKPEIKQKWASRLLAKLRKDIRPEFREDFVLTITGKKPPCCVLSNPDQKGKIRRIDCLRQADKVWRLDLVMVILFKGIPLESTDGERLYKSPQCSNPGLCVQPHHIGVTIKELDLYLAYFVHTPESGQSDSSNQQGDADIKPLPNGHLSFQDCFVTSGVWNVTELVRVSQTPVATASGPNFSLADLESPSYYNINQVTLGRRSITSPPSTSTTKRPKSIDDSEMESPVDDVFYPGTGRSPAAGSSQSSGWPNDVDAGPASLKKSGKLDFCSALSSQGSSPRMAFTHHPLPVLAGVRPGSPRATASALHFPSTSIIQQSSPYFTHPTIRYHHHHGQDSLKEFVQFVCSDGSGQATGQPNGSGQGKVPGSFLLPPPPPVARPVPLPMPDSKSTSTAPDGAALTPPSPSFATTGASSANRFVSIGPRDGNFLNIPQQSQSWFL

SEQ ID NO: 15373 - protein, 968 aa, Homo sapiens
MAEDDPYLGRPEQMFHLDPSLTHTIFNPEVFQPQMALPTDGPYLQILEQPKQRGFRFRYVCEGPSHGGLPGASSEKNKKSYPQVKICNYVGPAKVIVQLVTNGKNIHLHAHSLVGKHCEDGICTVTAGPKDMVVGFANLGILHVTKKKVFETLEARMTEACIRGYNPGLLVHPDLAYLQAEGGGDRQLGDREKELIRQAALQQTKEMDLSVVRLMFTAFLPDSTGSFTRRLEPVVSDAIYDSKAPNASNLKIVRMDRTAGCVTGGEEIYLLCDKVQKDDIQIRFYEEEENGGVWEGFGDFSPTDVHRQFAIVFKTPKYKDINITKPASVFVQLRRKSDLETSEPKPFLYYPEIKDKEEVQRKRQKLMPNFSDSFGGGSGAGAGGGGMFGSGGGGGGTGSTGPGYSFPHYGFPTYGGITFHPGTTKSNAGMKHGTMDTESKKDPEGCDKSDDKNTVNLFGKVIETTEQDQEPSEATVGNGEVTLTYATGTKEESAGVQDNLFLEKAMQLAKRHANALFDYAVTGDVKMLLAVQRHLTAVQDENGDSVLHLAIIHLHSQLVRDLLEVTSGLISDDIINMRNDLYQTPLHLAVITKQEDVVEDLLRAGADLSLLDRLGNSVLHLAAKEGHDKVLSILLKHKKAALLLDHPNGDGLNAIHLAMMSNSLPCLLLLVAAGADVNAQEQKSGRTALHLAVEHDNISLAGCLLLEGDAHVDSTTYDGTTPLHIAAGRGSTRLAALLKAAGADPLVENFEPLYDLDDSWENAGEDEGVVPGTTPLDMATSWQVFDILNGKPYEPEFTSDDLLAQGDMKQLAEDVKLQLYKLLEIPDPDKNWATLAQKLGLGILNNAFRLSPAPSKTLMDNYEVSGGTVRELVEALRQMGYTEAIEVIQAASSPVKTTSQAHSLPLSPASTRQQIDELRDSDSVCDSGVETSFRKLSFTESLTSGASLLTLNKMPHDYGQEGPLEGKI

SEQ ID NO: 15374 - protein, 900 aa, Homo sapiens
MESCYNPGLDGIIEYDDFKLNSSIVEPKEPAPETADGPYLVIVEQPKQRGFRFRYGCEGPSHGGLPGASSEKGRKTYPTVKICNYEGPAKIEVDLVTHSDPPRAHAHSLVGKQCSELGICAVSVGPKDMTAQFNNLGVLHVTKKNMMGTMIQKLQRQRLRSRPQGLTEAEQRELEQEAKELKKVMDLSIVRLRFSAFLRASDGSFSLPLKPVISQPIHDSKSPGASNLKISRMDKTAGSVRGGDEVYLLCDKVQKDDIEVRFYEDDENGWQAFGDFSPTDVHKQYAIVFRTPPYHKMKIERPVTVFLQLKRKRGGDVSDSKQFTYYPLVEDKEEVQRKRRKALPTFSQPFGGGSHMGGGSGGAAGGYGGAGGGGSLGFFPSSLAYSPYQSGAGPMGCYPGGGGGAQMAATVPSRDSGEEAAEPSAPSRTPQCEPQAPEMLQRAREYNARLFGLAQRSARALLDYGVTADARALLAGQRHLLTAQDENGDTPLHLAIIHGQTSVIEQIVYVIHHAQDLGVVNLTNHLHQTPLHLAVITGQTSVVSFLLRVGADPALLDRHGDSAMHLALRAGAGAPELLRALLQSGAPAVPQLLHMPDFEGLYPVHLAVRARSPECLDLLVDSGAEVEATERQGGRTALHLATEMEELGLVTHLVTKLRANVNARTFAGNTPLHLAAGLGYPTLTRLLLKAGADIHAENEEPLCPLPSPPTSDSDSDSEGPEKDTRSSFRGHTPLDLTCSTKVKTLLLNAAQNTMEPPLTPPSPAGPGLSLGDTALQNLEQLLDGPEAQGSWAELAERLGLRSLVDTYRQTTSPSGSLLRSYELAGGDLAGLLEALSDMGLEEGVRLLRGPETRDKLPSTAEVKEDSAYGSQSVEQEAEKLGPPPEPPGGLCHGHPQPQVH

SEQ ID NO: 15375 - protein, 317 aa, Homo sapiens
MFQAAERPQEWAMEGPRDGLKKERLLDDRHDSGLDSMKDEEYEQMVKELQEIRLEPQEVPRGSEPWKQQLTEDGDSFLHLAIIHEEKALTMEVIRQVKGDLAFLNFQNNLQQTPLHLAVITNQPEIAEALLGAGCDPELRDFRGNTPLHLACEQGCLASVGVLTQSCTTPHLHSILKATNYNGHTCLHLASIHGYLGIVELLVSLGADVNAQEPCNGRTALHLAVDLQNPDLVSLLLKCGADVNRVTYQGYSPYQLTWGRPSTRIQQQLGQLTLENLQMLPESEDEESYDTESEFTEFTEDELPYDDCVFGGQRLTL

SEQ ID NO: 15376 - protein, 356 aa, Homo sapiens
MAGVACLGKAADADEWCDSGLGSLGPDAAAPGGPGLGAELGPGLSWAPLVFGYVTEDGDTALHLAVIHQHEPFLDFLLGFSAGTEYMDLQNDLGQTALHLAAILGETSTVEKLYAAGAGLCVAERRGHTALHLACRVGAHACARALLQPRPRRPREAPDTYLAQGPDRTPDTNHTPVALYPDSDLEKEEEESEEDWKLQLEAENYEGHTPLHVAVIHKDVEMVRLLRDAGADLDKPEPTCGRSPLHLAVEAQAADVLELLLRAGANPAARMYGGRTPLGSAMLRPNPILARLLRAHGAPEPEGEDEKSGPCSSSSDSDSGDEGDEYDDIVVHSSRSQTRLPPTPASKPLPDDPRPV

SEQ ID NO: 15377 - protein, 313 aa, Homo sapiens
MEAGPWRVSAPPSGPPQFPAVVPGPSLEVARAHMLALGPQQLLAQDEEGDTLLHLFAARGLRWAAYAAAEVLQVYRRLDIREHKGKTPLLVAAAANQPLIVEDLLNLGAEPNAADHQGRSVLHVAATYGLPGVLLAVLNSGVQVDLEARDFEGLTPLHTAILALNVAMRPSDLCPRVLSTQARDRLDCVHMLLQMGANHTSQEIKSNKTVLHLAVQAANPTLVQLLLELPRGDLRTFVNMKAHGNTALHMAAALPPGPAQEAIVRHLLAAGADPTLRNLENEQPVHLLRPGPGPEGLRQLLKRSRVAPPGLSS

SEQ ID NO: 15378 - protein, 500 aa, Homo sapiens
MNQRRSESRPGNHRLQAYAEPGKGDSGGAGPLSGSARRGRGGGGAIRVRRPCWSGGAGRGGGPAWAVRLPTVTAGWTWPALRTLSSLRAGPSEPHSPGRRPPRAGRPLCQADPQPGKAARRSLEPDPAQTGPRPARAAGMSEARKGPDEAEESQYDSGIESLRSLRSLPESTSAPASGPSDGSPQPCTHPPGPVKEPQEKEDADGERADSTYGSSSLTYTLSLLGGPEAEDPAPRLPLPHVGALSPQQLEALTYISEDGDTLVHLAVIHEAPAVLLCCLALLPQEVLDIQNNLYQTALHLAVHLDQPGAVRALVLKGASRALQDRHGDTALHVACQRQHLACARCLLEGRPEPGRGTSHSLDLQLQNWQGLACLHIATLQKNQPLMELLLRNGADIDVQEGTSGKTALHLAVETQERGLVQFLLQAGAQVDARMLNGCTPLHLAAGRGLMGISSTLCKAGADSLLRNVEDETPQDLTEESLVLLPFDDLKISGKLLLCTD

SEQ ID NO: 15379 - protein, 381 aa, Homo sapiens
MSNPSPQVPEEEASTSVCRPKSSMASTSRRQRRERRFRRYLSAGRLVRAQALLQRHPGLDVDAGQPPPLHRACARHDAPALCLLLRLGADPAHQDRHGDTALHAAARQGPDAYTDFFLPLLSRCPSAMGIKNKDGETPGQILGWGPPWDSAEEEEEDDASKEREWRQKLQGELEDEWQEVMGRFEGDASHETQEPESFSAWSDRLAREHAQKCQQQQREAEGSCRPPRAEGSSQSWRQQEEEQRLFRERARAKEEELRESRARRAQEALGDREPKPTRAGPREEHPRGAGRGSLWRFGDVPWPCPGGGDPEAMAAALVARGPPLEEQGALRRYLRVQQVRWHPDRFLQRFRSQIETWELGRVMGAVTALSQALNRHAEALK

SEQ ID NO: 15380 - protein, 718 aa, Homo sapiens
MIVDKLLDDSRGGEGLRDAAGGCGLMTSPLNLSYFYGASPPAAAPGACDASCSVLGPSAPGSPGSDSSDFSSASSVSSCGAVESRSRGGARAERQPVEPHMGVGRQQRGPFQGVRVKNSVKELLLHIRSHKQKASGQAVDDFKTQGVNIEQFRELKNTVSYSGKRKGPDSLSDGPACKRPALLHSQFLTPPQTPTPGESMEDVHLNEPKQESSADLLQNIINIKNECSPVSLNTVQVSWLNPVVVPQSSPAEQCQDFHGGQVFSPPQKCQPFQVRGSQQMIDQASLYQYSPQNQHVEQQPHYTHKPTLEYSPFPIPPQSPAYEPNLFDGPESQFCPNQSLVSLLGDQRESENIANPMQTSSSVQQQNDAHLHSFSMMPSSACEAMVGHEMASDSSNTSLPFSNMGNPMNTTQLGKSLFQWQVEQEESKLANISQDQFLSKDADGDTFLHIAVAQGRRALSYVLARKMNALHMLDIKEHNGQSAFQVAVAANQHLIVQDLVNIGAQVNTTDCWGRTPLHVCAEKGHSQVLQAIQKGAVGSNQFVDLEATNYDGLTPLHCAVIAHNAVVHELQRNQQPHSPEVQELLLKNKSLVDTIKCLIQMGAAVEAKDRKSGRTALHLAAEEANLELIRLFLELPSCLSFVNAKAYNGNTALHVAASLQYRLTQLDAVRLLMRKGADPSTRNLENEQPVHLVPDGPVGEQIRRILKGKSIQQRAPPY

SEQ ID NO: 15381 - protein, 1299 aa, Homo sapiens [sequence omitted]

SEQ ID NO: 15382 - protein, 1120 aa, Homo sapiens
MAEAPPVSGTFKFNTDAAEFIPQEKKNSGLNCGTQRRLDSNRIGRRNYSSPPPCHLSRQVPYDEISAVHQHSYHPSGSKPKSQQTSFQSSPCNKSPKSHGLQNQPWQKLRNEKHHIRVKKAQSLAEQTSDTAGLESSTRSESGTDLREHSPSESEKEVVGADPRGAKPKKATQFVYSYGRGPKVKGKLKCEWSNRTTPKPEDAGPESTKPVGVFHPDSSEASSRKGVLDGYGARRNEQRRYPQKRPPWEVEGARPRPGRNPPKQEGHRHTNAGHRNNMGPIPKDDLNERPAKSTCDSENLAVINKSSRRVDQEKCTVRRQDPQVVSPFSRGKQNHVLKNVETHTGSLIEQLTTEKYECMVCCELVRVTAPVWSCQSCYHVFHLNCIKKWARSPASQADGQSGWRCPACQNVSAHVPNTYTCFCGKVKNPEWSRNEIPHSCGEVCRKKQPGQDCPHSCNLLCHPGPCPPCPAFMTKTCECGRTRHTVRCGQAVSVHCSNPCENILNCGQHQCAELCHGGQCQPCQIILNQVCYCGSTSRDVLCGTDVGKSDGFGDFSCLKICGKDLKCGNHTCSQVCHPQPCQQCPRLPQLVRCCPCGQTPLSQLLELGSSSRKTCMDPVPSCGKVCGKPLPCGSLDFIHTCEKLCHEGDCGPCSRTSVISCRCSFRTKELPCTSLKSEDATFMCDKRCNKKRLCGRHKCNEICCVDKEHKCPLICGRKLRCGLHRCEEPCHRGNCQTCWQASFDELTCHCGASVIYPPVPCGTRPPECTQTCARVHECDHPVYHSCHSEEKCPPCTFLTQKWCMGKHEFRSNIPCHLVDISCGLPCSATLPCGMHKCQRLCHKGECLVDEPCKQPCTTPRADCGHPCMAPCHTSSPCPVTACKAKVELQCECGRRKEMVICSEASSTYQRIAAISMASKITDMQLGGSVEISKLITKKEVHQARLECDEECSALERKKRLAEAFHISEDSDPFNIRSSGSKFSDSLKEDARKDLKFVSDVEKEMETLVEAVNKGKNSKKSHSFPPMNRDHRRIIHDLAQVYGLESVSYDSEPKRNVVVTAIRGKSVCPPTTLTGVLEREMQARPPPPIPHHRHQSDKNPGSSNLQKITKEPIIDYFDVQD

SEQ ID NO: 15383 - protein, 911 aa, Homo sapiens
MEASWRQVAGGRGRSRGRATAAPSGNGVHLRGAGGGREKGSVGAVPSGTSPGGVATTAAAGSRHSPAGSQALQTTAASELMSQKKFEEIKKANQAAARKLVEEQFSSSSEEGDEDFEGKQGKILANTFITYTTQTDGDTRELERTKQYVNEAFQAGAMTCLICIASVKRNQAVWSCSGCFCIFHMPCIQKWAKDSQFLVSSVTDDDFGKKDCPWPCPKCRFEYKRSETPSRYYCYCGKVEDPPLDPWLVPHSCGQVCEREFKPPCGHKCLLLCHPGPCPPCPKMVTTTCYCKKAKPIPRRCSAKEWSCQLPCGQKLLCGQHKCENPCHAGSCQPCPRVSRQKCVCGKKVAERSCASPLWHCDQVCGKTLPCGNHTCEQVCHVGACGECPRSGKRFCPCQKSKFSLPCTEDVPTCGDSCDKVLECGIHRCSQRCHRGPCETCRQEVEKHCRCGKHTKRMPCHKPYLCETKCVKMRDCQKHQCRRKCCPGNCPPCDQNCGRTLGCRNHKCPSVCHRGSCYPCPETVDVKCNCGNTKVTVPCGRERTTRPPKCKEQCSRPPTCHHTSQEKHRCHFGSCPPCHQPCQKVLEKCGHLCPAPCHDQALIKQTGRHQPTGPWEQPSEPAFIQTALPCPPCQVPIPMECLGKHEVSPLPCHAVGPYSCKRVCGRILDCQNHTCMKECHKVTKTDGCTGKNKAGPECLHCEEGCSKSRPLGCLHPCILRCHPGECPPCVQMLRIKCHCKITSLYVECRKITTADVNEKNLLSCCKNQCPKELPCGHRCKEMCHPGECPFNCNQKVKLRCPCKRIKKELQCNKVRENQVSIECDTTCKEMKRKASEIKEAEAKAALEEEKRRQQAELEAFENRLKGRRKKNRKRDEVAVELSLWQKHKYYLISVCGVVVVVFAWYITHDVN

SEQ ID NO: 15384 - protein, 347 aa, Homo sapiens
MEQYTANSNSSTEQIVVQAGQIQQQQQGGVTAVQLQTEAQVASASGQQVQTLQVVQGQPLMVQVSGGQLITSTGQPIMVQAVPGGQGQTIMQVPVSGTQGLQQIQLVPPGQIQIQGGQAVQVQGQQGQTQQIIIQQPQTAVTAGQTQTQQQIAVQGQQVAQTAEGQTIVYQPVNADGTILQQVTVPVSGMITIPAASLAGAQIVQTGANTNTTSSGQGTVTVTLPVAGNVVNSGGMVMMVPGAGSVPAIQRIPLPGAEMLEEEPLYVNAKQYHRILKRRQARAKLEAEGKIPKERRKYLHESRHRHAMARKRGEGGRFFSPKEKDSPHMQDPNQADEEAMTQIIRVS

SEQ ID NO: 15385 - protein, 207 aa, Homo sapiens
MTMDGDSSTTDASQLGISADYIGGSHYVIQPHDDTEDSMNDHEDTNGSKESFREQDIYLPIANVARIMKNAIPQTGKIAKDAKECVQECVSEFISFITSEASERCHQEKRKTINGEDILFAMSTLGFDSYVEPLKLYLQKFREAMKGEKGIGGAVTATDGLSEELTEEAFTNQLPAGLITTDGQQQNVMVYTTSYQQISGVQQIQFS

SEQ ID NO: 15386 - protein, 458 aa, Homo sapiens
MSTEGGFGGTSSSDAQQSLQSFWPRVMEEIRNLTVKDFRVQELPLARIKKIMKLDEDVKMISAEAPVLFAKAAQIFITELTLRAWIHTEDNKRRTLQRNDIAMAITKFDQFDFLIDIVPRDELKPPKRQEEVRQSVTPAEPVQYYFTLAQQPTAVQVQGQQQGQQTTSSTTTIQPGQIIIAQPQQGQTTPVTMQVGEGQQVQIVQAQPQGQAQQAQSGTGQTMQVMQQIITNTGEIQQIPVQLNAGQLQYIRLAQPVSGTQVVQGQIQTLATNAQQGQRNASQGKPRRCLKETLQITQTEVQQGQQQFSQFTDGQRNSVQQARVSELTGEAEPREVKATGNSTPCTSSLPTTHPPSHRAGASCVCCSQPQQSSTSPPPSDALQWVVVEVSGTPNQLETHRELHAPLPGMTSLSPLHPSQQLYQIQQVTMPAGQDLAQPMFIQSANQPSDGQAPQVTGD

SEQ ID NO: 15387 - protein, 133 aa, Homo sapiens
MMLNSDTMELDLPPTHSETESGFSDCGGGAGPDGAGPGGPGGGQARGPEPGEPGRKDLQHLSREERRRRRRATAKYRTAHATRERIRVEAFNLAFAELRKLLPTLPPDKKLSKIEILRLAICYISYLNHVLDV

SEQ ID NO: 15388 - protein, 135 aa, Homo sapiens
MMLSPDQAADSDHPSSAHSDPESLGGTDTKVLGSVSDLEPVEEAEGDGKGGSRAALYPHPQQLSREEKRRRRRATAKYRSAHATRERIRVEAFNLAFAELRKLLPTLPPDKKLSKIEILRLAICYISYLNHVLDV

SEQ ID NO: 15389 - protein, 690 aa, Homo sapiens
MEKILQMAEGIDIGEMPSYDLVLSKPSKGQKRHLSTCDGQNPPKKQAGSKFHARPRFEPVHFVASSSKDERQEDPYGPQTKEVNEQTHFASMPRDIYQDYTQDSFSIQDGNSQYCDSSGFILTKDQPVTANMYFDSGNPAPSTTSQQANSQSTPEPSPSQTFPESVVAEKQYFIEKLTATIWKNLSNPEMTSGSDKINYTYMLTRCIQACKTNPEYIYAPLKEIPPADIPKNKKLLTDGYACEVRCQNIYLTTGYAGSKNGSRDRATELAVKLLQKRIEVRVVRRKFKHTFGEDLVVCQIGMSSYEFPPALKPPEDLVVLGKDASGQPIFNASAKHWTNFVITENANDAIGILNNSASFNKMSIEYKYEMMPNRTWRCRVFLQDHCLAEGYGTKKTSKHAAADEALKILQKTQPTYPSVKSSQCHTGSSPRGSGKKKDIKDLVVYENSSNPVCTLNDTAQFNRMTVEYVYERMTGLRWKCKVILESEVIAEAVGVKKTVKYEAAGEAVKTLKKTQPTVINNLKKGAVEDVISRNEIQGRSAEEAYKQQIKEDNIGNQLLRKMGWTGGGLGKSGEGIREPISVKEQHKREGLGLDVERVNKIAKRDIEQIIRNYARSESHTDLTFSRELTNDERKQIHQIAQKYGLKSKSHGVGHDRYLVVGRKRRKEDLLDQLKQEGQVGHYELVMPQAN

SEQ ID NO: 15390 - protein, 411 aa, Homo sapiens
MDGRAELPAFPRAGAPPLAASDTVPAAPEGAGAARPAAPLRPTSFSVLDILDPNKFNSRRRRCVLLGPVAPAACAPCASAPCAPAPAASGRPPRAEELERRALAGAGGVGAAGAEPPNAGDPFKAGEAETNDTNGYSSGGGGHSPSADSGDEVPDDEDDDEDEAPETEAARGAEEARGGGGGLGARGSGCQGAAETDASPGATVDEAAAPGPRENSPVAQGPPGGAAAPGGAGTTPQGTATAAKPKRKRTGSDSKSGKPRRARTAFTYEQLVALENKFKATRYLSVCERLNLALSLSLTETQVKIWFQNRRTKWKKQNPGADTSAPTGGGGGPGPGAGPGTGLPGGLSPLSPSPPMGAPLGMHGPAGYPAHGPGGLVCAAQLPFLSSPAVLSPFVLGSQTYGAPAFYAPHL

SEQ ID NO: 15391 - protein, 310 aa, Homo sapiens
MLAWQDGGAKAAPSHHKISFSVLDILDPQKFTRAALPAVRPAPREARKSLAEVEAGKDASSRDPVRQLETPDAAGPGAGQASPLEGSEAEEEEDAEDPRRPRLRERAARLLPGLARSPDAPAGALASGEPCEDGGGGPVRSPPGSPGSPRPRRRRLEPNCAKPRRARTAFTYEQLVALENKFRATRYLSVCERLNLALSLSLTETQVKIWFQNRRTKWKKQNPGADGAAQVGGGAPQPGAAGGGGGGGSGGSPGPPGTGALHFQTFPSYSAANVLFPSAASFPLTAAAPGSPFAPFLGPSYLTPFYAPRL

SEQ ID NO: 15392 - protein, 371 aa, Homo sapiens
MSMSPKHTTPFSVSDILSPLEESYKKVGMEGGGLGAPLAAYRQGQAAPPTAAMQQHAVGHHGAVTAAYHMTAAGVPQLSHSAVGGYCNGNLGNMSELPPYQDTMRNSASGPGWYGANPDPRFPAISRFMGPASGMNMSGMGGLGSLGDVSKNMAPLPSAPRRKRRVLFSQAQVYELERRFKQQKYLSAPEREHLASMIHLTPTQVKIWFQNHRYKMKRQAKDKAAQQQLQQDSGGGGGGGGTGCPQQQQAQQQSPRRVAVPVLVKDGKPCQAGAPAPGAASLQGHAQQQAQHQAQAAQAAAAAISVGSGGAGLGAHPGHQPGSAGQSPDLAHHAASPAALQGQVSSLSHLNSSGSDYGTMSCSTLLYGRTW

SEQ ID NO: 15393 - protein, 273 aa, Homo sapiens
MSLTNTKTGFSVKDILDLPDTNDEEGSVAEGPEEENEGPEPAKRAGPLGQGALDAVQSLPLKNPFYDSSDNPYTRWLASTEGLQYSLHGLAAGAPPQDSSSKSPEPSADESPDNDKETPGGGGDAGKKRKRRVLFSKAQTYELERRFRQQRYLSAPEREHLASLIRLTPTQVKIWFQNHRYKMKRARAEKGMEVTPLPSPRRVAVPVLVRDGKPCHALKAQDLAAATFQAGIPFSAYSAQSLQHMQYNAQYSSASTPQYPTAHPLVQAQQWTW

SEQ ID NO: 15394 - protein, 364 aa, Homo sapiens
MMLPSPVTSTPFSVKDILNLEQQHQHFHGAHLQADLEHHFHSAPCMLAAAEGTQFSDGGEEDEEDEGEKLSYLNSLAAADGHGDSGLCPQGYVHTVLRDSCSEPKEHEEEPEVVRDRSQKSCQLKKSLETAGDCKAAEESERPKPRSRRKPRVLFSQAQVFELERRFKQQRYLSAPEREHLASSLKLTSTQVKIWFQNRRYKCKRQRQDKSLELGAHAPPPPPRRVAVPVLVRDGKPCVTPSAQAYGAPYSVGASAYSYNSFPAYGYGNSAAAAAAAAAAAAAAAAYSSSYGCAYPAGGGGGGGGTSAATTAMQPACSAAGGGPFVNVSNLGGFGSGGSAQPLHQGTAAGAACAQGTLQGIRAW

SEQ ID NO: 15395 - protein, 354 aa, Homo sapiens
MSLSPKHTTPFSVSDILSPIEETYKKFSGAMDGAPPGLGAPLGAAAAYRAPPPGPSSQAATVAGMQPSHAMAGHNAAAAAAAAAAAAAAAATYHMPPGVSQFPHGAMGSYCNGGLGNMGELPAYTDGMRGGAATGWYGANPDPRYSSISRFMGPSAGVNVAGMGSLTGIADAAKSLGPLHAAAAAAAPRRKRRVLFSQAQVYELERRFKQQKYLSAPEREHLASMIHLTPTQVKIWFQNHRYKMKRQAKDKAAQQLQQEGGLGPPPPPPPSPRRVAVPVLVKDGKPCQNGASTPTPGQAGPQPPAPTPAPELEELSPSPPALHGPGGGLAALDAAAGEYSGGVLGANLLYGRTW

SEQ ID NO: 15396 - protein, 324 aa, Homo sapiens
MFPSPALTPTPFSVKDILNLEQQQRSLAAAGELSARLEATLAPSSCMLAAFKPEAYAGPEAAAPGLPELRAELGRAPSPAKCASAFPAAPAFYPRAYSDPDPAKDPRAEKKELCALQKAVELEKTEADNAERPRARRRRKPRVLFSQAQVYELERRFKQQRYLSAPERDQLASVLKLTSTQVKIWFQNRRYKCKRQRQDQTLELVGLPPPPPPPARRIAVPVLVRDGKPCLGDSAPYAPAYGVGLNPYGYNAYPAYPGYGGAACSPGYSCTAAYPAGPSPAQPATAAANNNFVNFGVGDLNAVQSPGIPQSNSGVSTLHGIRAW

SEQ ID NO: 15397 - protein, 301 aa, Homo sapiens
MLLSPVTSTPFSVKDILRLERERSCPAASPHPRVRKSPENFQYLRMDAEPRGSEVHNAGGGGGDRKLDGSEPPGGPCEAVLEMDAERMGEPQPGLNAASPLGGGTRVPERGVGNSGDSVRGGRSEQPKARQRRKPRVLFSQAQVLALERRFKQQRYLSAPEREHLASALQLTSTQVKIWFQNRRYKCKRQRQDKSLELAGHPLTPRRVAVPVLVRDGKPCLGPGPGAPAFPSPYSAAVSPYSCYGGYSGAPYGAGYGTCYAGAPSGPAPHTPLASAGFGHGGQNATPQGHLAATLQGVRAW

SEQ ID NO: 15398 - protein, 239 aa, Homo sapiens
MATSGRLSFTVRSLLDLPEQDAQHLPRREPEPRAPQPDPCAAWLDSERGHYPSSDESSLETSPPDSSQRPSARPASPGSDAEKRKKRRVLFSKAQTLELERRFRQQRYLSAPEREQLASLLRLTPTQVKIWFQNHRYKLKRARAPGAAESPDLAASAELHAAPGLLRRVVVPVLVRDGQPCGGGGGGEVGTAAAQEKCGAPPAAACPLPGYPAFGPGSALGLFPAYQHLASPALVSWNW

SEQ ID NO: 15399 - protein, 234 aa, Homo sapiens
MLRVPEPRPGEAKAEGAAPPTPSKPLTSFLIQDILRDGAQRQGGRTSSQRQRDPEPEPEPEPEGGRSRAGAQNDQLSTGPRAAPEEAETLAETEPERHLGSYLLDSENTSGALPRLPQTPKQPQKRSRAAFSHTQVIELERKFSHQKYLSAPERAHLAKNLKLTETQVKIWFQNRRYKTKRKQLSSELGDLEKHSSLPALKEEAFSRASLVSVYNSYPYYPYLYCVGSWSPAFW

SEQ ID NO: 15400 - protein, 333 aa, Homo sapiens
MAVRGANTLTSFSIQAILNKKEERGGLAAPEGRPAPGGTAASVAAAPAVCCWRLFGERDAGALGGAEDSLLASPAGTRTAAGRTAESPEGWDSDSALSEENESRRRCADARGASGAGLAGGSLSLGQPVCELAASKDLEEEAAGRSDSEMSASVSGDRSPRTEDDGVGPRGAHVSALCSGAGGGGGSGPAGVAEEEEEPAAPKPRKKRSRAAFSHAQVFELERRFNHQRYLSGPERADLAASLKLTETQVKIWFQNRRYKTKRRQMAADLLASAPAAKKVAVKVLVRDDQRQYLPGEVLRPPSLLPLQPSYYYPYYCLPGWALSTCAAAAGTQ

SEQ ID NO: 15401 - protein, 367 aa, Homo sapiens
MLAVGAMEGTRQSAFLLSSPPLAALHSMAEMKTPLYPAAYPPLPAGPPSSSSSSSSSSSPSPPLGTHNPGGLKPPATGGLSSLGSPPQQLSAATPHGINDILSRPSMPVASGAALPSASPSGSSSSSSSSASASSASAAAAAAAAAAAAASSPAGLLAGLPRFSSLSPPPPPPGLYFSPSAAAVAAVGRYPKPLAELPGRTPIFWPGVMQSPPWRDARLACTPHQGSILLDKDGKRKHTRPTFSGQQIFALEKTFEQTKYLAGPERARLAYSLGMTESQVKVWFQNRRTKWRKKHAAEMATAKKKQDSETERLKGASENEEEDDDYNKPLDPNSDDEKITQLLKKHKSSSGGGGGLLLHASEPESSS

SEQ ID NO: 15402 - protein, 277 aa, Homo sapiens
MDTNRPGAFVLSSAPLAALHNMAEMKTSLFPYALQGPAGFKAPALGGLGAQLPLGTPHGISDILGRPVGAAGGGLLGGLPRLNGLASSAGVYFGPAAAVARGYPKPLAELPGRPPIFWPGVVQGAPWRDPRLAGPAPAGGVLDKDGKKKHSRPTFSGQQIFALEKTFEQTKYLAGPERARLAYSLGMTESQVKVWFQNRRTKWRKRHAVEMASAKKKQDSDAEKLKVGGSDAEDDDEYNRPLDPNSDDEKITRLLKKHKPSNLALVSPCGGGAGDAL

SEQ ID NO: 15403 - protein, 265 aa, Homo sapiens
MESNLQGTFLLNNTPLAQFPEMKAPVCQYSVQNSFYKLSPPGLGPQLAAGTPHGITDILSRPVAAPNNSLLSGYPHVAGFGGLSSQGVYYSPQVGNFSKAGNEYPTRTRNCWADTGQDWRGGRQCSNTPDPLSDSIHKKKHTRPTFTGHQIFALEKTFEQTKYLAGPERARLAYSLGMTESQVKVWFQNRRTKWRKKSALEPSSSTPRAPGGAGAGAGGDRAPSENEDDEYNKPLDPDSDDEKIRLLLRKHRAAFSVLSLGAHSV

SEQ ID NO: 15404 - protein, 691 aa, Homo sapiens
MALLLTLTSPDLEGTWDTRDKDGFKAQEGPPLAVPEFPVCGLYRIYGVCGSFSSFFIIRCSLCALETLKSPQHDPLEIPEQSLKLIPLVSGKRELTRGQKAGEKPLAAGPGEEELLRGSAPHAQDTQSEELPPSCTISGEKKPPAVSGEATGADAGRLCPPPRSRAPHKDRTLARSRPQTQGEDCSLPVGEVKIGKRSYSPAPGKQKKPNAMGLAPTSSPGAPNSARATHNPVPCGSGRGPCHLANLLSTLAQSNQNRDHKQGPPEVTCQIRKKTRTLYRSDQLEELEKIFQEDHYPDSDKRREIAQTVGVTPQRIMVKGAGSLVAGWSGGGPTIETLELQSERSAVAWVWFQNRRAKWRKMEKLNGKESKDNPAAPGPASSQCSSAAEILPAVPMEPKPDPFPQESPLDTFPEPPMLLTSDQTLAPTQPSEGAQRVVTPPLFSPPPVRRADLPFPLGPVHTPQLMPLLMDVAGSDSSHKDGPCGSWGTSITLPPPCSYLEELEPQDYQQSNQPGPFQFSQAPQPPLFQSPQPKLPYLPTFPFSMPSSLTLPPPEDSLFMFPCGPSGGTSQGYCPGASSGQILMQPPAGNIGTASWSDPCLPELPFPGPFCPQALGHPPGGDGYFPDLFPTPCPQALGRQPSSALSWMPEGARPGTGPLLSKAKEEPPAASLDQPSALEEARGDDKNSHVP

SEQ ID NO: 15405 - protein, 800 aa, Homo sapiens
MKARRNKKQIPSFRKLIKTSKVKLENKLKNKQFKQQSTLKKYRKEQRKLRQAVKDAVSKKPIPLENPKEKRPGKRIEREEEEEEEALPLDMMDEDDLQLMKDLGQRVSFLTRDLSSSEPVHAKKRKHERIIDKYEKIPRTLQTAPEKELIHLLPIKDKSGIIPQTREKPVTDSNKDEEDQEEERELEEEIIEDPIQELTIEEHLIERKKKLQEKKMHIAALASAILSDPENNIKKLKELRSMLMEQDPDVAVTVRKLVIVSLMELFKDITPSYKIRPLTEAEKSTKTRKETQKLREFEEGLVSQYKFYLENLEQMVKDWKQRKLKKSNVVSLKAYKGLAEVAVKSLCELLVALPHFNFHNNIIVLIVPLMNDMSKLISEMCCEAVKKLFKQDKLGQASLGVIKVISGFVKGRNYEVRPEMLKTFLCLRIKEVEVKKDTEDINKPKKFMTFKEKRKSLSRMQRKWKKAEEKLERELREAEASESTEKKLKLHTETLNIVFVTYFRILKKAQRSPLLPAVLEGLAKFAHLINVEFFDDLLVVLHTLIESGDLSYQESLHCVQTAFHILSGQGDVLNIDPLKFYTHLYKTLFKLHAGATNEGVEIVLQCLDVMLTKRRKQVSQQRALAFIKRLCTLALHVLPNSSIGILATTRILMHTFPKTDLLLDSESQGSGVFLPELDEPEYCNAQNTALWELHALRRHYHPIVQRFAAHLIAGAPSEGSGALKPELSRRSATELFEAYSMAEMTFNPPVESSNPKIKGKFLQGDSFLNEDLNQLIKRYSSEVATESPLDFTKYLKTSLH

SEQ ID NO: 15406 - protein, 516 aa, Homo sapiens
MEREPGAAGVRRALGRRLEAVLASRSEANAVFDILAVLQSEDQEEIQEAVRTCSRLFGALLERGELFVGQLPSEEMVMTGSQGATRKYKVWMRHRYHSCCNRLGELLGHPSFQVKELALSALLKFVQLEGAHPLEKSKWEGNYLFPRELFKLVVGGLLSPEEDQSLLLSQFREYLDYDDTRYHTMQAAVDAVARVTGQHPEVPPAFWNNAFTLLSAVSLPRREPTVSSFYVKRAELWDTWKVAHLKEHRRVFQAMWLSFLKHKLPLSLYKKVLLIVHDAILPQLAQPTLMIDFLTRACDLGGALSLLALNGLFILIHKHNLEYPDFYRKLYGLLDPSVFHVKYRARFFHLADLFLSSSHLPAYLVAAFAKRLARLALTAPPEALLMVLPFICNLLRRHPACRVLVHRPHGPELDADPYDPGEEDPAQSRALESSLWELQALQRHYHPEVSKAASVINQALSMPEVSIAPLLELTAYEIFERDLKKKGPEPVPLEFIPAQGLLGRPGELCAQHFTLS

SEQ ID NO: 15407 - protein, 471 aa, Homo sapiens
MQSNKTFNLEKQNHTPRKHHQHHHQQQHHQQQQQQPPPPPIPANGQQASSQNEGLTIDLKNFRKPGEKTFTQRSRLFVGNLPPDITEEEMRKLFEKYGKAGEVFIHKDKGFGFIRLETRTLAEIAKVELDNMPLRGKQLRVRFACHSASLTVRNLPQYVSNELLEEAFSVFGQVERAVVIVDDRGRPSGKGIVEFSGKPAARKALDRCSEGSFLLTTFPRPVTVEPMDQLDDEEGLPEKLVIKNQQFHKEREQPPRFAQPGSFEYEYAMRWKALIEMEKQQQDQVDRNIKEAREKLEMEMEAARHEHQVMLMRQDLMRRQEELRRMEELHNQEVQKRKQLELRQEEERRRREEEMRRQQEEMMRRQQEGFKGTFPDAREQEIRMGQMAMGGAMGINNRGAMPPAPVPAGTPAPPGPATMMPDGTLGLTPPTTERFGQAATMEGIGAIGGTPPAFNRAAPGAEFAPNKRRRY

SEQ ID NO: 15408 - protein, 251 aa, Homo sapiens
MPSPRPRGSPPPAPSGSRVRPPRSGRSPAPRSPTGPNTPRAPGRFESPFSVEAILARPDPCAPAASQPSGSACVHPAFWTAASLCATGGLPWACPTSWLPAYLSVGFYPVPGPRVAPVCGLLGFGVTGLELAHCSGLWAFPDWAPTEDLQDTERQQKRVRTMFNLEQLEELEKVFAKQHNLVGKKRAQLAARLKLTENQVRVWFQNRRVKYQKQQKLRAAVTSAEAASLDEPSSSSIASIQSDDAESGVDG

SEQ ID NO: 15409 - protein, 590 aa, Homo sapiens
MAAPYPGSGGGSEVKCVGGRGASVPWDFLPGLMVKAPSGPCLQAQRKEKSRNAARSRRGKENLEFFELAKLLPLPGAISSQLDKASIVRLSVTYLRLRRFAALGAPPWGLRAAGPPAGLAPGRRGPAALVSEVFEQHLGGHILQSLDGFVFALNQEGKFLYISETVSIYLGLSQVEMTGSSVFDYIHPGDHSEVLEQLGLRTPTPGPPTPPSVSSSSSSSSSLADTPEIEASLTKVPPSSLVQERSFFVRMKSTLTKRGLHVKASGYKVIHVTGRLRAHALGLVALGHTLPPAPLAELPLHGHMIVFRLSLGLTILACESRVSDHMDLGPSELVGRSCYQFVHGQDATRIRQSHVDLLDKGQVMTGYYRWLQRAGGFVWLQSVATVAGSGKSPGEHHVLWVSHVLSQAEGGQTPLDAFQLPASVACEEASSPGPEPTEPEPPTEGKQAAPAENEAPQTQGKRIKVEPGPRETKGSEDSGDEDPSSHPATPRPEFTSVIRAGVLKQDPVRPWGLAPPGDPPPTLLHAGFLPPVVRGLCTPGTIRYGPAELGLVYPHLQRLGPGPALPEAFYPPLGLPYPGPAGTRLPRKGD

SEQ ID NO: 15410 - protein, 824 aa, Homo sapiens
MDEDEKDRAKRASRNKSEKKRRDQFNVLIKELSSMLPGNTRKMDKTTVLEKVIGFLQKHNEVSAQTEICDIQQDWKPSFLSNEEFTQLMLEALDGFIIAVTTDGSIIYVSDSITPLLGHLPSDVMDQNLLNFLPEQEHSEVYKILSSHMLVTDSPSPEYLKSDSDLEFYCHLLRGSLNPKEFPTYEYIKFVGNFRSYNNVPSPSCNGFDNTLSRPCRVPLGKEVCFIATVRLATPQFLKEMCIVDEPLEEFTSRHSLEWKFLFLDHRAPPIIGYLPFEVLGTSGYDYYHIDDLELLARCHQHLMQFGKGKSCCYRFLTKGQQWIWLQTHYYITYHQWNSKPEFIVCTHSVVSYADVRVERRQELALEDPPSEALHSSALKDKGSSLEPRQHFNTLDVGASGLNTSHSPSASSRSSHKSSHTAMSEPTSTPTKLMAEASTPALPRSATLPQELPVPGLSQAATMPAPLPSPSSCDLTQQLLPQTVLQSTPAPMAQFSAQFSMFQTIKDQLEQRTRILQANIRWQQEELHKIQEQLCLVQDSNVQMFLQQPAVSLSFSSTQRPEAQQQLQQRSAAVTQPQLGAGPQLPGQISSAQVTSQHLLRESSVISTQGPKPMRSSQLMQSSGRSGSSLVSPFSSATAALPPSLNLTTPASTSQDASQCQPSPDFSHDRQLRLLLSQPIQPMMPGSCDARQPSEVSRTGRQVKYAQSQTVFQNPDAHPANSSSAPMPVLLMGQAVLHPSFPASQPSPLQPAQARQQPPQHYLQVQAPTSLHSEQQDSLLLSTYSQQPGTLGYPQPPPAQPQPLRPPRRVSSLSESSGLQQPPR

SEQ ID NO: 15411 - protein, 933 aa, Homo sapiens
MAPTKPSFQQDPSRRERITAQHPLPNQSECRKIYRYDGIYCESTYQNLQALRKEKSRDAARSRRGKENFEFYELAKLLPLPAAITSQLDKASIIRLTISYLKMRDFANQGDPPWNLRMEGPPPNTSVKVIGAQRRRSPSALAIEVFEAHLGSHILQSLDGFVFALNQEGKFLYISETVSIYLGLSQVELTGSSVFDYVHPGDHVEMAEQLGMKLPPGRGLLSQGTAEDGASSASSSSQSETPEPVESTSPSLLTTDNTLERSFFIRMKSTLTKRGVHIKSSGYKVIHITGRLRLRVSLSHGRTVPSQIMGLVVVAHALPPPTINEVRIDCHMFVTRVNMDLNIIYCENRISDYMDLTPVDIVGKRCYHFIHAEDVEGIRHSHLDLLNKGQCVTKYYRWMQKNGGYIWIQSSATIAINAKNANEKNIIWVNYLLSNPEYKDTPMDIAQLPHLPEKTSESSETSDSESDSKDTSGITEDNENSKSDEKGNQSENSEDPEPDRKKSGNACDNDMNCNDDGHSSSNPDSRDSDDSFEHSDFENPKAGEDGFGALGAMQIKVERYVESESDLRLQNCESLTSDSAKDSDSAGEAGAQASSKHQKRKKRRKRQKGGSASRRRLSSASSPGGLDAGLVEPPRLLSSPNSASVLKIKTEISEPINFDNDSSIWNYPPNREISRNESPYSMTKPPSSEHFPSPQGGGGGGGGGGGLHVAIPDSVLTPPGADGAAARKTQFGASATAALAPVASDPLSPPLSASPRDKHPGNGGGGGGGGGGAGGGGPSASNSLLYTGDLEALQRLQAGNVVLPLVHRVTGTLAATSTAAQRVYTTGTIRYAPAEVTLAMQSNLLPNAHAVNFVDVNSPGFGLDPKTPMEMLYHHVHRLNMSGPFGGAVSAASLTQMPAGNVFTTAEGLFSTLPFPVYSNGIHAAQTLERKED

SEQ ID NO: 15412 - protein, 802 aa, Homo sapiens
MYRSTKGASKARRDQINAEIRNLKELLPLAEADKVRLSYLHIMSLACIYTRKGVFFAGGTPLAGPTGLLSAQELEDIVAALPGFLLVFTAEGKLLYLSESVSEHLGHSMVDLVAQGDSIYDIIDPADHLTVRQQLTLPSALDTDRLFRCRFNTSKSLRRQSAGNKLVLIRGRFHAHPPGAYWAGNPVFTAFCAPLEPRPRPGPGPGPGPASLFLAMFQSRHAKDLALLDISESVLIYLGFERSELLCKSWYGLLHPEDLAHASAQHYRLLAESGDIQAEMVVRLQAKTGGWAWIYCLLYSEGPEGPITANNYPISDMEAWSLRQQLNSEDTQAAYVLGTPTMLPSFPENILSQEECSSTNPLFTAALGAPRSTSFPSAPELSVVSASEELPRPSKELDFSYLTFPSGPEPSLQAELSKDLVCTPPYTPHQPGGCAFLFSLHEPFQTHLPTPSSTLQEQLTPSTATFSDQLTPSSATFPDPLTSPLQGQLTETSVRSYEDQLTPCTSTFPDQLLPSTATFPEPLGSPAHEQLTPPSTAFQAHLDSPSQTFPEQLSPNPTKTYFAQEGCSFLYEKLPPSPSSPGNGDCTLLALAQLRGPLSVDVPLVPEGLLTPEASPVKQSFFHYSEKEQNEIDRLIQQISQLAQGMDRPFSAEAGTGGLEPLGGLEPLDSNLSLSGAGPPVLSLDLKPWKCQELDFLADPDNMFLEETPVEDIFMDLSTPDPSEEWGSGDPEAEGPGGAPSPCNNLSPEDHSFLEDLATYETAFETGVSAFPYDGFTDELHQLQSQVQDSFHEDGSGGEPTF

SEQ ID NO: 15413 - protein, 470 aa, Homo sapiens
MAGENHQWQGSILYNMLMSAKQTRAAPEAPETRLVDQCWGCSCGDEPGVGREGLLGGRNVALLYRCCFCGKDHPRQGSILYSMLTSAKQTYAAPKAPEATLGPCWGCSCGSDPGVGRAGLPGGRPVALLYRCCFCGEDHPRQGSILYSLLTSSKQTHVAPAAPEARPGGAWWDRSYFAQRPGGKEALPGGRATALLYRCCFCGEDHPQQGSTLYCVPTSTNQAQAAPEERPRAPWWDTSSGALRPVALKSPQVVCEAASAGLLKTLRFVKYLPCFQVLPLDQQLVLVRNCWASLLMLELAQDRLQFETVEVSEPSMLQKILTTRRRETGGNEPLPVPTLQHHLAPPAEARKVPSASQVQAIKCFLSKCWSLNISTKEYAYLKGTVLFNPDVPGLQCVKYIQGLQWGTQQILSEHTRMTHQGPHDRFIELNSTLFLLRFINANVIAELFFRPIIGTVSMDDMMLEMLCTKI

SEQ ID NO: 15414 - protein, 257 aa, Homo sapiens
MSTSQPGACPCQGAASRPAILYALLSSSLKAVPRPRSRCLCRQHRPVQLCAPHRTCREALDVLAKTVAFLRNLPSFWQLPPQDQRRLLQGCWGPLFLLGLAQDAVTFEVAEAPVPSILKKILLEEPSSSGGSGQLPDRPQPSLAAVQWLQCCLESFWSLELSPKEYACLKGTILFNPDVPGLQAASHIGHLQQEAHWVLCEVLEPWCPAAQGRLTRVLLTASTLKSIPTSLLGDLFFRPIIGDVDIAGLLGDMLLLR

SEQ ID NO: 15415 - protein, 614 aa, Homo sapiens
MTTLDSNNNTGGVITYIGSSGSSPSRTSPESLYSDNSNGSFQSLTQGCPTYFPPSPTGSLTQDPARSFGSIPPSLSDDGSPSSSSSSSSSSSSFYNGSPPGSLQVAMEDSSRVSPSKSTSNITKLNGMVLLCKVCGDVASGFHYGVHACEGCKGFFRRSIQQNIQYKRCLKNENCSIVRINRNRCQQCRFKKCLSVGMSRDAVRFGRIPKREKQRMLAEMQSAMNLANNQLSSQCPLETSPTQHPTPGPMGPSPPPAPVPSPLVGFSQFPQQLTPPRSPSPEPTVEDVISQVARAHREIFTYAHDKLGSSPGNFNANHASGSPPATTPHRWENQGCPPAPNDNNTLAAQRHNEALNGLRQAPSSYPPTWPPGPAHHSCHQSNSNGHRLCPTHVYAAPEGKAPANSPRQGNSKNVLLACPMNMYPHGRSGRTVQEIWEDFSMSFTPAVREVVEFAKHIPGFRDLSQHDQVTLLKAGTFEVLMVRFASLFNVKDQTVMFLSRTTYSLQELGAMGMGDLLSAMFDFSEKLNSLALTEEELGLFTAVVLVSADRSGMENSASVEQLQETLLRALRALVLKNRPLETSRFTKLLLKLPDLRTLNNMHSEKLLSFRVDAQ

SEQ ID NO: 15416 - protein, 579 aa, Homo sapiens
MEVNAGGVIAYISSSSSASSPASCHSEGSENSFQSSSSSVPSSPNSSNSDTNGNPKNGDLANIEGILKNDRIDCSMKTSKSSAPGMTKSHSGVTKFSGMVLLCKVCGDVASGFHYGVHACEGCKGFFRRSIQQNIQYKKCLKNENCSIMRMNRNRCQQCRFKKCLSVGMSRDAVRFGRIPKREKQRMLIEMQSAMKTMMNSQFSGHLQNDTLVEHHEQTALPAQEQLRPKPQLEQENIKSSSPPSSDFAKEEVIGMVTRAHKDTFMYNQEQQENSAESMQPQRGERIPKNMEQYNLNHDHCGNGLSSHFPCSESQQHLNGQFKGRNIMHYPNGHAICIANGHCMNFSNAYTQRVCDRVPIDGFSQNENKNSYLCNTGGRMHLVCPLSKSPYVDPHKSGHEIWEEFSMSFTPAVKEVVEFAKRIPGFRDLSQHDQVNLLKAGTFEVLMVRFASLFDAKERTVTFLSGKKYSVDDLHSMGAGDLLNSMFEFSEKLNALQLSDEEMSLFTAVVLVSADRSGIENVNSVEALQETLIRALRTLIMKNHPNEASIFTKLLLKLPDLRSLNNMHSEELLAFKVHP

SEQ ID NO: 15417 - protein, 460 aa, Homo sapiens
MSSPTTSSLDTPLPGNGPPQPGAPSSSPTVKEEGPEPWPGGPDPDVPGTDEASSACSTDWVIPDPEEEPERKRKKGPAPKMLGHELCRVCGDKASGFHYNVLSCEGCKGFFRRSVVRGGARRYACRGGGTCQMDAFMRRKCQQCRLRKCKEAGMREQCVLSEEQIRKKKIRKQQQESQSQSQSPVGPQGSSSSASGPGASPGGSEAGSQGSGEGEGVQLTAAQELMIQQLVAAQLQCNKRSFSDQPKVTPWPLGADPQSRDARQQRFAHFTELAIISVQEIVDFAKQVPGFLQLGREDQIALLKASTIEIMLLETARRYNHETECITFLKDFTYSKDDFHRAGLQVEFINPIFEFSRAMRRLGLDDAEYALLIAINIFSADRPNVQEPGRVEALQQPYVEALLSYTRIKRPQDQLRFPRMLMKLVSLRTLSSVHSEQVFALRLQDKKLPPLLSEIWDVHE

SEQ ID NO: 15418 - protein, 447 aa, Homo sapiens
MSLWLGAPVPDIPPDSAVELWKPGAQDASSQAQGGSSCILREEARMPHSAGGTAGVGLEAAEPTALLTRAEPPSEPTEIRPQKRKKGPAPKMLGNELCSVCGDKASGFHYNVLSCEGCKGFFRRSVIKGAHYICHSGGHCPMDTYMRRKCQECRLRKCRQAGMREECVLSEEQIRLKKLKRQEEEQAHATSLPPRASSPPQILPQLSPEQLGMIEKLVAAQQQCNRRSFSDRLRVTPWPMAPDPHSREARQQRFAHFTELAIVSVQEIVDFAKQLPGFLQLSREDQIALLKTSAIEVMLLETSRRYNPGSESITFLKDFSYNREDFAKAGLQVEFINPIFEFSRAMNELQLNDAEFALLIAISIFSADRPNVQDQLQVERLQHTYVEALHAYVSIHHPHDRLMFPRMLMKLVSLRTLSSVHSEQVFALRLQDKKLPPLLSEIWDVHE

SEQ ID NO: 15419 - protein, 486 aa, Homo sapiens
MVMQFQGLENPIQISPHCSCTPSGFFMEMMSMKPAKGVLTEQVAGPLGQNLEVEPYSQYSNVQFPQVQPQISSSSYYSNLGFYPQQPEEWYSPGIYELRRMPAETLYQGETEVAEMPVTKKPRMGASAGRIKGDELCVVCGDRASGYHYNALTCEGCKGFFRRSITKNAVYKCKNGGNCVMDMYMRRKCQECRLRKCKEMGMLAECMYTGLLTEIQCKSKRLRKNVKQHADQTVNEDSEGRDLRQVTSTTKSCREKTELTPDQQTLLHFIMDSYNKQRMPQEITNKILKEEFSAEENFLILTEMATNHVQVLVEFTKKLPGFQTLDHEDQIALLKGSAVEAMFLRSAEIFNKKLPSGHSDLLEERIRNSGISDEYITPMFSFYKSIGELKMTQEEYALLTAIVILSPDRQYIKDREAVEKLQEPLLDVLQKLCKIHQPENPQHFACLLGRLTELRTFNHHHAEMLMSWRVNDHKFTPLLCEIWDVQ

SEQ ID NO: 15420 - protein, 434 aa, Homo sapiens
MEVRPKESWNHADFVHCEDTESVPGKPSVNADEEVGGPQICRVCGDKATGYHFNVMTCEGCKGFFRRAMKRNARLRCPFRKGACEITRKTRRQCQACRLRKCLESGMKKEMIMSDEAVEERRALIKRKKSERTGTQPLGVQGLTEEQRMMIRELMDAQMKTFDTTFSHFKNFRLPGVLSSGCELPESLQAPSREEAAKWSQVRKDLCSLKVSLQLRGEDGSVWNYKPPADSGGKEIFSLLPHMADMSTYMFKGIISFAKVISYFRDLPIEDQISLLKGAAFELCQLRFNTVFNAETGTWECGRLSYCLEDTAGGFQQLLLEPMLKFHYMLKKLQLHEEEYVLMQAISLFSPDRPGVLQHRVVDQLQEQFAITLKSYIECNRPQPAHRFLFLKIMAMLTELRSINAQHTQRLLRIQDIHPFATPLMQELFGITGS

SEQ ID NO: 15421 - protein, 352 aa, Homo sapiens
MASREDELRNCVVCGDQATGYHFNALTCEGCKGFFRRTVSKSIGPTCPFAGSCEVSKTQRRHCPACRLQKCLDAGMRKDMILSAEALALRRAKQAQRRAQQTPVQLSKEQEELIRTLLGAHTRHMGTMFEQFVQFRPPAHLFIHHQPLPTLAPVLPLVTHFADINTFMVLQVIKFTKDLPVFRSLPIEDQISLLKGAAVEICHIVLNTTFCLQTQNFLCGPLRYTIEDGARVSPTVGFQVEFLELLFHFHGTLRKLQLQEPEYVLLAAMALFSPDRPGVTQRDEIDQLQEEMALTLQSYIKGQQRRPRDRFLYAKLLGLLAELRSINEAYGYQIQHIQGLSAMMPLLQEICS

SEQ ID NO: 15422 - protein, 603 aa, Homo sapiens
MATIEEIAHQIIEQQMGEIVTEQQTGQKIQIVTALDHNTQGKQFILTNHDGSTPSKVILARQDSTPGKVFLTTPDAAGVNQLFFTTPDLSAQHLQLLTDNSPDQGPNKVFDLCVVCGDKASGRHYGAVTCEGCKGFFKRSIRKNLVYSCRGSKDCIINKHHRNRCQYCRLQRCIAFGMKQDSVQCERKPIEVSREKSSNCAASTEKIYIRKDLRSPLTATPTFVTDSESTRSTGLLDSGMFMNIHPSGVKTESAVLMTSDKAESCQGDLSTLANVVTSLANLGKTKDLSQNSNEMSMIESLSNDDTSLCEFQEMQTNGDVSRAFDTLAKALNPGESTACQSSVAGMEGSVHLITGDSSINYTEKEGPLLSDSHVAFRLTMPSPMPEYLNVHYIGESASRLLFLSMHWALSIPSFQALGQENSISLVKAYWNELFTLGLAQCWQVMNVATILATFVNCLHNSLQQDKMSTERRKLLMEHIFKLQEFCNSMVKLCIDGYEYAYLKAIVLFSPDHPSLENMEQIEKFQEKAYVEFQDYITKTYPDDTYRLSRLLLRLPALRLMNATITEELFFKGLIGNIRIDSVIPHILKMEPADYNSQIIGHSI

SEQ ID NO: 15423 - protein, 596 aa, Homo sapiens
MTSPSPRIQIISTDSAVASPQRIQIVTDQQTGQKIQIVTAVDASGSPKQQFILTSPDGAGTGKVILASPETSSAKQLIFTTSDNLVPGRIQIVTDSASVERLLGKTDVQRPQVVEYCVVCGDKASGRHYGAVSCEGCKGFFKRSVRKNLTYSCRSNQDCIINKHHRNRCQFCRLKKCLEMGMKMESVQSERKPFDVQREKPSNCAASTEKIYIRKDLRSPLIATPTFVADKDGARQTGLLDPGMLVNIQQPLIREDGTVLLATDSKAETSQGALGTLANVVTSLANLSESLNNGDTSEIQPEDQSASEITRAFDTLAKALNTTDSSSSPSLADGIDTSGGGSIHVISRDQSTPIIEVEGPLLSDTHVTFKLTMPSPMPEYLNVHYICESASRLLFLSMHWARSIPAFQALGQDCNTSLVRACWNELFTLGLAQCAQVMSLSTILAAIVNHLQNSIQEDKLSGDRIKQVMEHIWKLQEFCNSMAKLDIDGYEYAYLKAIVLFSPDHPGLTSTSQIEKFQEKAQMELQDYVQKTYSEDTYRLARILVRLPALRLMSSNITEELFFTGLIGNVSIDSIIPYILKMETAEYNGQITGASL

SEQ ID NO: 15424 - protein, 385 aa, Homo sapiens
MSKPAGSTSRILDIPCKVCGDRSSGKHYGVYACDGCSGFFKRSIRRNRTYVCKSGNQGGCPVDKTHRNQCRACRLKKCLEVNMNKDAVQHERGPRTSTIRKQVALYFRGHKEENGAAAHFPSAALPAPAFFTAVTQLEPHGLELAAVSTTPERQTLVSLAQPTPKYPHEVNGTPMYLYEVATESVCESAARLLFMSIKWAKSVPAFSTLSLQDQLMLLEDAWRELFVLGIAQWAIPVDANTLLAVSGMNGDNTDSQKLNKIISEIQALQEVVARFRQLRLDATEFACLKCIVTFKAVPTHSGSELRSFRNAAAIAALQDEAQLTLNSYIHTRYPTQPCRFGKLLLLLPALRSISPSTIEEVFFKKTIGNVPITRLLSDMYKSSDI

SEQ ID NO: 15425 - protein, 410 aa, Homo sapiens
METRPTALMSSTVAAAAPAAGAASRKESPGRWGLGEDPTGVSPSLQCRVCGDSSSGKHYGIYACNGCSGFFKRSVRRRLIYRCQVGAGMCPVDKAHRNQCQACRLKKCLQAGMNQDAVQNERQPRSTAQVHLDSMESNTESRPESLVAPPAPAGRSPRGPTPMSAARALGHHFMASLITAETCAKLEPEDADENIDVTSNDPEFPSSPYSSSSPCGLDSIHETSARLLFMAVKWAKNLPVFSSLPFRDQVILLEEAWSELFLLGAIQWSLPLDSCPLLAPPEASAAGGAQGRLTLASMETRVLQETISRFRALAVDPTEFACMKALVLFKPETRGLKDPEHVEALQDQSQVMLSQHSKAHHPSQPVRFGKLLLLLPSLRFITAERIELLFFRKTIGNTPMEKLLCDMFKN

SEQ ID NO: 15426 - protein, 423 aa, Homo sapiens
MAMVVSSWRDPQDDVAGGNPGGPNPAAQAARGGGGGAGEQQQQAGSGAPHTPQTPGQPGAPATPGTAGDKGQGPPGSGQSQQHIECVVCGDKSSGKHYGQFTCEGCKSFFKRSVRRNLTYTCRANRNCPIDQHHRNQCQYCRLKKCLKVGMRREAVQRGRMPPTQPNPGQYALTNGDPLNGHCYLSGYISLLLRAEPYPTSRYGSQCMQPNNIMGIENICELAARLLFSAVEWARNIPFFPDLQITDQVSLLRLTWSELFVLNAAQCSMPLHVAPLLAAAGLHASPMSADRVVAFMDHIRIFQEQVEKLKALHVDSAEYSCLKAIVLFTSDACGLSDAAHIESLQEKSQCALEEYVRSQYPNQPSRFGKLLLRLPSLRTVSSSVIEQLFFVRLVGKTPIETLIRDMLLSGSSFNWPYMSIQCS

SEQ ID NO: 15427 - protein, 414 aa, Homo sapiens
MAMVVSTWRDPQDEVPGSQGSQASQAPPVPGPPPGAPHTPQTPGQGGPASTPAQTAAGGQGGPGGPGSDKQQQQQHIECVVCGDKSSGKHYGQFTCEGCKSFFKRSVRRNLSYTCRANRNCPIDQHHRNQCQYCRLKKCLKVGMRREAVQRGRMPPTQPTHGQFALTNGDPLNCHSYLSGYISLLLRAEPYPTSRFGSQCMQPNNIMGIENICELAARMLFSAVEWARNIPFFPDLQITDQVALLRLTWSELFVLNAAQCSMPLHVAPLLAAAGLHASPMSADRVVAFMDHIRIFQEQVEKLKALHVDSAEYSCLKAIVLFTSDACGLSDVAHVESLQEKSQCALEEYVRSQYPNQPTRFGKLLLRLPSLRTVSSSVIEQLFFVRLVGKTPIETLIRDMLLSGSSFNWPYMAIQ

SEQ ID NO: 15428 - protein, 404 aa, Homo sapiens
MAMVTGGWGGPGGDTNGVDKAGGYPRAAEDDSASPPGAASDAEPGDEERPGLQVDCVVCGDKSSGKHYGVFTCEGCKSFFKRSIRRNLSYTCRSNRDCQIDQHHRNQCQYCRLKKCFRVGMRKEAVQRGRIPHSLPGAVAASSGSPPGSALAAVASGGDLFPGQPVSELIAQLLRAEPYPAAAGRFGAGGGAAGAVLGIDNVCELAARLLFSTVEWARHAPFFPELPVADQVALLRLSWSELFVLNAAQAALPLHTAPLLAAAGLHAAPMAAERAVAFMDQVRAFQEQVDKLGRLQVDSAEYGCLKAIALFTPDACGLSDPAHVESLQEKAQVALTEYVRAQYPSQPQRFGRLLLRLPALRAVPASLISQLFFMRLVGKTPIETLIRDMLLSGSTFNWPYGSGQ

SEQ ID NO: 15429 - protein, 777 aa, Homo sapiens
MDSKESLTPGREENPSSVLAQERGDVMDFYKTLRGGATVKVSASSPSLAVASQSDSKQRRLLVDFPKGSVSNAQQPDLSKAVSLSMGLYMGETETKVMGNDLGFPQQGQISLSSGETDLKLLEESIANLNRSTSVPENPKSSASTAVSAAPTEKEFPKTHSDVSSEQQHLKGQTGTNGGNVKLYTTDQSTFDILQDLEFSSGSPGKETNESPWRSDLLIDENCLLSPLAGEDDSFLLEGNSNEDCKPLILPDTKPKIKDNGDLVLSSPSNVTLPQVKTEKEDFIELCTPGVIKQEKLGTVYCQASFPGANIIGNKMSAISVHGVSTSGGQMYHYDMNTASLSQQQDQKPIFNVIPPIPVGSENWNRCQGSGDDNLTSLGTLNFPGRTVFSNGYSSPSMRPDVSSPPSSSSTATTGPPPKLCLVCSDEASGCHYGVLTCGSCKVFFKRAVEGQHNYLCAGRNDCIIDKIRRKNCPACRYRKCLQAGMNLEARKTKKKIKGIQQATTGVSQETSENPGNKTIVPATLPQLTPTLVSLLEVIEPEVLYAGYDSSVPDSTWRIMTTLNMLGGRQVIAAVKWAKAIPGFRNLHLDDQMTLLQYSWMFLMAFALGWRSYRQSSANLLCFAPDLIINEQRMTLPCMYDQCKHMLYVSSELHRLQVSYEEYLCMKTLLLLSSVPKDGLKSQELFDEIRMTYIKELGKAIVKREGNSSQNWQRFYQLTKLLDSMHEVVENLLNYCFQTFLDKTMSIEFPEMLAEIITNQIPKYSNGNIKKLLFHQK

SEQ ID NO: 15430 - protein, 984 aa, Homo sapiens
METKGYHSLPEGLDMERRWGQVSQAVERSSLGPTERTDENNYMEIVNVSCVSGAIPNNSTQGSSKEKQELLPCLQQDNNRPGILTSDIKTELESKELSATVAESMGLYMDSVRDADYSYEQQNQQGSMSPAKIYQNVEQLVKFYKGNGHRPSTLSCVNTPLRSFMSDSGSSVNGGVMRAIVKSPIMCHEKSPSVCSPLNMTSSVCSPAGINSVSSTTASFGSFPVHSPITQGTPLTCSPNAENRGSRSHSPAHASNVGSPLSSPLSSMKSSISSPPSHCSVKSPVSSPNNVTLRSSVSSPANINNSRCSVSSPSNTNNRSTLSSPAASTVGSICSPVNNAFSYTASGTSAGSSTLRDVVPSPDTQEKGAQEVPFPKTEEVESAISNGVTGQLNIVQYIKPEPDGAFSSSCLGGNSKINSDSSFSVPIKQESTKHSCSGTSFKGNPTVNPFPFMDGSYFSFMDDKDYYSLSGILGPPVPGFDGNCEGSGFPVGIKQEPDDGSYYPEASIPSSAIVGVNSGGQSFHYRIGAQGTISLSRSARDQSFQHLSSFPPVNTLVESWKSHGDLSSRRSDGYPVLEYIPENVSSSTLRSVSTGSSRPSKICLVCGDEASGCHYGVVTCGSCKVFFKRAVEGQHNYLCAGRNDCIIDKIRRKNCPACRLQKCLQAGMNLGARKSKKLGKLKGIHEEQPQQQQPPPPPPPPQSPEEGTTYIAPAKEPSVNTALVPQLSTISRALTPSPVMVLENIEPEIVYAGYDSSKPDTAENLLSTLNRLAGKQMIQVVKWAKVLPGFKNLPLEDQITLIQYSWMCLSSFALSWRSYKHTNSQFLYFAPDLVFNEEKMHQSAMYELCQGMHQISLQFVRLQLTFEEYTIMKVLLLLSTIPKDGLKSQAAFEEMRTNYIKELRKMVTKCPNNSGQSWQRFYQLTKLLDSMHDLVSDLLEFCFYTFRESHALKVEFPAMLVEIISDQLPKVESGNAKPLYFHRK

SEQ ID NO: 15431 - protein, 598 aa, Homo sapiens
MPCIQAQYGTPAPSPGPRDHLASDPLTPEFIKPTMDLASPEAAPAAPTALPSFSTFMDGYTGEFDTFLYQLPGTVQPCSSASSSASSTSSSSATSPASASFKFEDFQVYGCYPGPLSGPVDEALSSSGSDYYGSPCSAPSPSTPSFQPPQLSPWDGSFGHFSPSQTYEGLRAWTEQLPKASGPPQPPAFFSFSPPTGPSPSLAQSPLKLFPSQATHQLGEGESYSMPTAFPGLAPTSPHLEGSGILDTPVTSTKARSGAPGGSEGRCAVCGDNASCQHYGVRTCEGCKGFFKRTVQKNAKYICLANKDCPVDKRRRNRCQFCRFQKCLAVGMVKEVVRTDSLKGRRGRLPSKPKQPPDASPANLLTSLVRAHLDSGPSTAKLDYSKFQELVLPHFGKEDAGDVQQFYDLLSGSLEVIRKWAEKIPGFAELSPADQDLLLESAFLELFILRLAYRSKPGEGKLIFCSGLVLHRLQCARGFGDWIDSILAFSRSLHSLLVDVPAFACLSALVLITDRHGLQEPRRVEELQNRIASCLKEHVAAVAGEPQPASCLSRLLGKLPELRTLCTQGLQRIFYLKLEDLVPPPPIIDKIFMDTLPF

SEQ ID NO: 15432 - protein, 598 aa, Homo sapiens
MPCVQAQYGSSPQGASPASQSYSYHSSGEYSSDFLTPEFVKFSMDLTNTEITATTSLPSFSTFMDNYSTGYDVKPPCLYQMPLSGQQSSIKVEDIQMHNYQQHSHLPPQSEEMMPHSGSVYYKPSSPPTPTTPGFQVQHSPMWDDPGSLHNFHQNYVATTHMIEQRKTPVSRLSLFSFKQSPPGTPVSSCQMRFDGPLHVPMNPEPAGSHHVVDGQTFAVPNPIRKPASMGFPGLQIGHASQLLDTQVPSPPSRGSPSNEGLCAVCGDNAACQHYGVRTCEGCKGFFKRTVQKNAKYVCLANKNCPVDKRRRNRCQYCRFQKCLAVGMVKEVVRTDSLKGRRGRLPSKPKSPQEPSPPSPPVSLISALVRAHVDSNPAMTSLDYSRFQANPDYQMSGDDTQHIQQFYDLLTGSMEIIRGWAEKIPGFADLPKADQDLLFESAFLELFVLRLAYRSNPVEGKLIFCNGVVLHRLQCVRGFGEWIDSIVEFSSNLQNMNIDISAFSCIAALAMVTERHGLKEPKRVEELQNKIVNCLKDHVTFNNGGLNRPNYLSKLLGKLPELRTLCTQGLQRIFYLKLEDLVPPPAIIDKLFLDTLPF

SEQ ID NO: 15433 - protein, 626 aa, Homo sapiens
MPCVQAQYSPSPPGSSYAAQTYSSEYTTEIMNPDYTKLTMDLGSTEITATATTSLPSISTFVEGYSSNYELKPSCVYQMQRPLIKVEEGRAPSYHHHHHHHHHHHHHHQQQHQQPSIPPASSPEDEVLPSTSMYFKQSPPSTPTTPAFPPQAGALWDEALPSAPGCIAPGPLLDPPMKAVPTVAGARFPLFHFKPSPPHPPAPSPAGGHHLGYDPTAAAALSLPLGAAAAAGSQAAALESHPYGLPLAKRAAPLAFPPLGLTPSPTASSLLGESPSLPSPPSRSSSSGEGTCAVCGDNAACQHYGVRTCEGCKGFFKRTVQKNAKYVCLANKNCPVDKRRRNRCQYCRFQKCLSVGMVKEVVRTDSLKGRRGRLPSKPKSPLQQEPSQPSPPSPPICMMNALVRALTDSTPRDLDYSRYCPTDQAAAGTDAEHVQQFYNLLTASIDVSRSWAEKIPGFTDLPKEDQTLLIESAFLELFVLRLSIRSNTAEDKFVFCNGLVLHRLQCLRGFGEWLDSIKDFSLNLQSLNLDIQALACLSALSMITERHGLKEPKRVEELCNKITSSLKDHQSKGQALEPTESKVLGALVELRKICTLGLQRIFYLKLEDLVSPPSIIDKLFLDTLPF

SEQ ID NO: 15434 - protein, 461 aa, Homo sapiens
MDYSYDEDLDELCPVCGDKVSGYHYGLLTCESCKGFFKRTVQNNKHYTCTESQSCKIDKTQRKRCPFCRFQKCLTVGMRLEAVRADRMRGGRNKFGPMYKRDRALKQQKKAQIRANGFKLETGPPMGVPPPPPPAPDYVLPPSLHGPEPKGLAAGPPAGPLGDFGAPALPMAVPGAHGPLAGYLYPAFPGRAIKSEYPEPYASPPQPGLPYGYPEPFSGGPNVPELILQLLQLEPDEDQVRARILGCLQEPTKSRPDQPAAFGLLCRMADQTFISIVDWARRCMVFKELEVADQMTLLQNCWSELLVFDHIYRQVQHGKEGSILLVTGQEVELTTVATQAGSLLHSLVLRAQELVLQLLALQLDRQEFVCLKFIILFSLDLKFLNNHILVKDAQEKANAALLDYTLCHYPHCGDKFQQLLLCLVEVRALSMQAKEYLYHKHLGNEMPRNNLLIEMLQAKQT

SEQ ID NO: 15435 - protein, 541 aa, Homo sapiens
MSSNSDTGDLQESLKHGLTPIGAGLPDRHGSPIPARGRLVMLPKVETEALGLARSHGEQGQMPENMQVSQFKMVNYSYDEDLEELCPVCGDKVSGYHYGLLTCESCKGFFKRTVQNNKRYTCIENQNCQIDKTQRKRCPYCRFQKCLSVGMKLEAVRADRMRGGRNKFGPMYKRDRALKQQKKALIRANGLKLEAMSQVIQAMPSDLTISSAIQNIHSASKGLPLNHAALPPTDYDRSPFVTSPISMTMPPHGSLQGYQTYGHFPSRAIKSEYPDPYTSSPESIMGYSYMDSYQTSSPASIPHLILELLKCEPDEPQVQAKIMAYLQQEQANRSKHEKLSTFGLMCKMADQTLFSIVEWARSSIFFRELKVDDQMKLLQNCWSELLILDHIYRQVVHGKEGSIFLVTGQQVDYSIIASQAGATLNNLMSHAQELVAKLRSLQFDQREFVCLKFLVLFSLDVKNLENFQLVEGVQEQVNAALLDYTMCNYPQQTEKFGQLLLRLPEIRAISMQAEEYLYYKHLNGDVPYNNLLIEMLHAKRA

SEQ ID NO: 15436 - protein, 480 aa, Homo sapiens
MERDEPPPSGGGGGGGSAGFLEPPAALPPPPRNGFCQDELAELDPGTISVSDDRAEQRTCLICGDRATGLHYGIISCEGCKGFFKRSICNKRVYRCSRDKNCVMSRKQRNRCQYCRLLKCLQMGMNRKAIREDGMPGGRNKSIGPVQISEEEIERIMSGQEFEEEANHWSNHGDSDHSSPGNRASESNQPSPGSTLSSSRSVELNGFMAFREQYMGMSVPPHYQYIPHLFSYSGHSPLLPQQARSLDPQSYSLIHQLLSAEDLEPLGTPMLIEDGYAVTQAELFALLCRLADELLFRQIAWIKKLPFFCELSIKDYTCLLSSTWQELILLSSLTVYSKQIFGELADVTAKYSPSDEELHRFSDEGMEVIERLIYLYHKFHQLKVSNEEYACMKAINFLNQDIRGLTSASQLEQLNKRYWYICQDFTEYKYTHQPNRFPDLMMCLPEIRYIAGKMVNVPLEQLPLLFKVVLHSCKTSVGKE

SEQ ID NO: 15437 - protein, 772 aa, Homo sapiens; identical to SEQ ID NO: 9337

SEQ ID NO: 15438 - protein, 503 aa, Homo sapiens
MEEHGVTQTEHMATIEAHAVAQQVQQVHVATYTEHSMLSADEDSPSSPEDTSYDDSDILNSTAADEVTAHLAAAGPVGMAAAAAVATGKKRKRPHVFESNPSIRKRQQTRLLRKLRATLDEYTTRVGQQAIVLCISPSKPNPVFKVFGAAPLENVVRKYKSMILEDLESALAEHAPAPQEVNSELPPLTIDGIPVSVDKMTQAQLRAFIPEMLKYSTGRGKPGWGKESCKPIWWPEDIPWANVRSDVRTEEQKQRVSWTQALRTIVKNCYKQHGREDLLYAFEDQQTQTQATATHSIAHLVPSQTVVQTFSNPDGTVSLIQVGTGATVATLADASELPTTVTVAQVNYSAVADGEVEQNWATLQGGEMTIQTTQASEATQAVASLAEAAVAASQEMQQGATVTMALNSEAAAHAVATLAEATLQGGGQIVLSGETAAAVGALTGVQDANGLVQIPVSMYQTVVTSLAQGNGPVQVAMAPVTTRISDSAVTMDGQAVEVVTLEQ

SEQ ID NO: 15439 - protein, 237 aa, Homo sapiens
MALPPSPLAMEYVNDFDLMKFEVKREPSEGRPGPPTASLGSTPYSSVPPSPTFSEPGMVGATEGTRPGLEELYWLATLQQQLGAGEALGLSPEEAMELLQGQGPVPVDGPHGYYPGSPEETGAQHVQLAERFSDAALVSMSVRELNRQLRGCGRDEALRLKQRRRTLKNRGYAQACRSKRLQQRRGLEAERARLAAQLDALRAEVARLARERDLYKARCDRLTSSGPGSGDPSHLFL

SEQ ID NO: 15440 - protein, 271 aa, Homo sapiens
MYYAVSQARVNAVPGTMLRPQRPGDLQLGASLYELVGYRQPPSSSSSSTSSTSSTSSSSTTAPLLPKAAREKPEAPAEPPGPGPGSGAHPGGSARPDAKEEQQQQLRRKINSRERKRMQDLNLAMDALREVILPYSAAHCQGAPGRKLSKIATLLLARNYILLLGSSLQELRRALGEGAGPAAPRLLLAGLPLLAAAPGSVLLAPGAVGPPDALRPAKYLSLALDEPPCGQFALPGGGAGGPGLCTCAVCKFPHLVPASLGLAAVQAQFSK

SEQ ID NO: 15441 - protein, 323 aa, Homo sapiens
MDSDASLVSSRPSSPEPDDLFLPARSKGSSGSAFTGGTVSSSTPSDCPPELSAELRGAMGSAGAHPGDKLGGSGFKSSSSSTSSSTSSAAASSTKKDKKQMTEPELQQLRLKINSRERKRMHDLNIAMDGLREVMPYAHGPSVRKLSKIATLLLARNYILMLTNSLEEMKRLVSEIYGGHHAGFHPSACGGLAHSAPLPAATAHPAAAAHAAHHPAVHHPILPPAAAAAAAAAAAAAVSSASLPGSGLPSVGSIRPPHGLLKSPSAAAAAPLGGGGGGSGASGGFQHWGGMPCPCSMCQVPPPHHHVSAMGAGSLPRLTSDAK

SEQ ID NO: 15442 - protein, 272 aa, Homo sapiens
MNSDSSSVSSRASSPDMDEMYLRDHHHRHHHHQESRLNSVSSTQGDMMQKMPGESLSRAGAKAAGESSKYKIKKQLSEQDLQQLRLKINGRERKRMHDLNLAMDGLREVMPYAHGPSVRKLSKIATLLLARNYILMLTSSLEEMKRLVGEIYGGHHSAFHCGTVGHSAGHPAHAANSVHPVHPILGGALSSGNASSPLSAASLPAIGTIRPPHSLLKAPSTPPALQLGSGFQHWAGLPCPCTICQMPPPPHLSALSTANMARLSAESKDLLK

SEQ ID NO: 15443 - protein, 465 aa, Homo sapiens
MNAQLTMEAIGELHGVSHEPVPAPADLLGGSPHARSSVAHRGSHLPPAHPRSMGMASLLDGGSGGGDYHHHHRAPEHSLAGPLHPTMTMACETPPGMSMPTTYTTLTPLQPLPPISTVSDKFPHHHHHHHHHHHPHHHQRLAGNVSGSFTLMRDERGLASMNNLYTPYHKDVAGMGQSLSPLSSSGLGSIHNSQQGLPHYAHPGAAMPTDKMLTPNGFEAHHPAMLGRHGEQHLTPTSAGMVPINGLPPHHPHAHLNAQGHGQLLGTAREPNPSVTGAQVSNGSNSGQMEEINTKEVAQRITTELKRYSIPQAIFAQRVLCRSQGTLSDLLRNPKPWSKLKSGRETFRRMWKWLQEPEFQRMSALRLAACKRKEQEHGKDRGNTPKKPRLVFTDVQRRTLHAIFKENKRPSKELQITISQQLGLELSTVSNFFMNARRRSLDKWQDEGSSNSGNSSSSSSTCTKA

SEQ ID NO: 15444 - protein, 504 aa, Homo sapiens
MKAAYTAYRCLTKDLEGCAMNPELTMESLGTLHGPAGGGSGGGGGGGGGGGGGGPGHEQELLASPSPHHAGRGAAGSLRGPPPPPTAHQELGTAAAAAAAASRSAMVTSMASILDGGDYRPELSIPLHHAMSMSCDSSPPGMGMSNTYTTLTPLQPLPPISTVSDKFHHPHPHHHPHHHHHHHHQRLSGNVSGSFTLMRDERGLPAMNNLYSPYKEMPGMSQSLSPLAATPLGNGLGGLHNAQQSLPNYGPPGHDKMLSPNFDAHHTAMLTRGEQHLSRGLGTPPAAMMSHLNGLHHPGHTQSHGPVLAPSRERPPSSSSGSQVATSGQLEEINTKEVAQRITAELKRYSIPQAIFAQRVLCRSQGTLSDLLRNPKPWSKLKSGRETFRRMWKWLQEPEFQRMSALRLAACKRKEQEPNKDRNNSQKKSRLVFTDLQRRTLFAIFKENKRPSKEMQITISQQLGLELTTVSNFFMNARRRSLEKWQDDLSTGGSSSTSSTCTKA

SEQ ID NO: 15445 - protein, 494 aa, Homo sapiens
MELSLESLGGLHSVAHAQAGELLSPGHARSAAAQHRGLVAPGRPGLVAGMASLLDGGGGGGGGGAGGAGGAGSAGGGADFRGELAGPLHPAMGMACEAPGLGGTYTTLTPLQHLPPLAAVADKFHQHAAAAAVAGAHGGHPHAHPHPAAAPPPPPPPQRLAASVSGSFTLMRDERAALASVGHLYGPYGKELPAMGSPLSPLPNALPPALHGAPQPPPPPPPPPLAAYGPPGHLAGDKLLPPAAFEPHAALLGRAEDALARGLPGGGGGTGSGGAGSGSAAGLLAPLGGLAAAGAHGPHGGGGGPGGSGGGPSAGAAAEEINTKEVAQRITAELKRYSIPQAIFAQRILCRSQGTLSDLLRNPKPWSKLKSGRETFRRMWKWLQEPEFQRMSALRLAACKRKEQEQQKERALQPKKQRLVFTDLQRRTLIAIFKENKRPSKEMQVTISQQLGLELNTVSNFFMNARRRCMNRWAEEPSTAPGGPAGATATFSKA

SEQ ID NO: 15446 - protein, 266 aa, Homo sapiens
MGSKTLPAPVPIHPSLQLTNYSFLQAVNGLPTVPSDHLPNLYGFSALHAVHLHQWTLGYPAMHLPRSSFSKVPGTVSSLVDARFQLPAFPWFPHVIQPKPEITAGGSVPALKTKPRFDFANLALAATQEDPAKLGRGEGPGSPAGGLGALLDVTKLSPEKKPTRGRLPSKTKKEFVCKFCGRHFTKSYNLLIHERTHTDERPYTCDICHKAFRRQDHLRDHRYIHSKEKPFKCQECGKGFCQSRTLAVHKTLHSQVKELKTSKIKC

SEQ ID NO: 15447 - protein, 312 aa, Homo sapiens
MGSKALPAPIPLHPSLQLTNYSFLQAVNTFPATVDHLQGLYGLSAVQTMHMNHWTLGYPNVHEITRSTITEMAAAQGLVDARFPFPALPFTTHLFHPKQGAIAHVLPALHKDRPRFDFANLAVAATQEDPPKMGDLSKLSPGLGSPISGLSKLTPDRKPSRGRLPSKTKKEFICKFCGRHFTKSYNLLIHERTHTDERPYTCDICHKAFRRQDHLRDHRYIHSKEKPFKCQECGKGFCQSRTLAVHKTLHMQESPHKCPTCGRTFNQRSNLKTHLLTHTDIKPYSCEQCGKVFRRNCDLRRHSLTHTPRQDF

SEQ ID NO: 15448 - protein, 325 aa, Homo sapiens
MLSHADLLDARLGMKDAAELLGHREAVKCRLGVGGSDPGGHPGDLAPNSDPVEGATLLPGEDITTVGSTPASLAVSAKDPDKQPGPQGGPNPSQAGQQQGQQKQKRHRTRFTPAQLNELERSFAKTHYPDIFMREELALRIGLTESRVQVWFQNRRAKWKKRKKTTNVFRAPGTLLPTPGLPQFPSAAAAAAAAMGDSLCSFHANDTRWAAAAMPGVSQLPLPPALGRQQAMAQSLSQCSLAAGPPPNSMGLSNSLAGSNGAGLQSHLYQPAFPGMVPASLPGPSNVSGSPQLCSSPDSSDVWRGTSIASLRRKALEHTVSMSFT

SEQ ID NO: 15449 - protein, 354 aa, Homo sapiens
MMSYLKQPPYGMNGLGLAGPAMDLLHPSVGYPATPRKQRRERTTFTRSQLDVLEALFAKTRYPDIFMREEVALKINLPESRVQVWFKNRRAKCRQQQQSGSGTKSRPAKKKSSPVRESSGSESSGQFTPPAVSSSASSSSSASSSSANPAAAAAAGLGGNPVAAASSLSTPAASSIWSPASISPGSAPASVSVPEPLAAPSNTSCMQRSVAAGAATAAASYPMSYGQGGSYGQGYPTPSSSYFGGVDCSSYLAPMHSHHHPHQLSPMAPSSMAGHHHHHPHAHHPLSQSSGHHHHHHHHHHQGYGGSGLAFNSADCLDYKEPGAAAASSAWKLNFNSPDCLDYKDQASWRFQVL

SEQ ID NO: 15450 - protein, 289 aa, Homo sapiens
MMSYLKQPPYAVNGLSLTTSGMDLLHPSVGYPATPRKQRRERTTFTRAQLDVLEALFAKTRYPDIFMREEVALKINLPESRVQVWFKNRRAKCRQQQQQQQNGGQNKVRPAKKKTSPAREVSSESGTSGQFTPPSSTSVPTIASSSAPVSIWSPASISPLSDPLSTSSSCMQRSYPMTYTQASGYSQGYAGSTSYFGGMDCGSYLTPMHHQLPGPGATLSPMGTNAVTSHLNQSPASLSTQGYGASSLGFNSTTDCLDYKDQTASWKLNFNADCLDYKDQTSSWKFQVL

SEQ ID NO: 15451 - protein, 267 aa, Homo sapiens
MPRAFLVKKPCVSTCKRNWSELPDEERGEIYVPVSLGFCPPQPYREPEPSVAEPPSCPLALNMSLRDSSYSMAPGPCVVAQLPSEDMGHLTDPQSRDHGFLRTKMKVTLGDSPSGDLFTCRVCQKAFTYQRMLNRHMKCHNDVKRHLCTYCGKGFNDTFDLKRHVRTHTGVRPYKCSLCDKAFTQRCSLESHLKKIHGVQQKYAYKERRAKLYVCEECGCTSESQEGHVLHLKEHHPDSPLLRKTSKKVAVALQNTVTSLLQGSPHL

SEQ ID NO: 15452 - protein, 275 aa, Homo sapiens
MPKVFLVKRRSLGVSVRSWDELPDEKRADTYIPVGLGRLLHDPPEDCRSDGGSSSGSGSSSAGEPGGAESSSSPHAPESETPEPGDAEGPDGHLATKQRPVARSKIKFTTGTCSDSVVHSCDLCGKGFRLQRMLNRHLKCHNQVKRHLCTFCGKGFNDTFDLKRHVRTHTGIRPYKCNVCNKAFTQRCSLESHLKKIHGVQQQYAYKQRRDKLYVCEDCGYTGPTQEDLYLHVNSAHPGSSFLKKTSKKLAALLQGKLTSAHQENTSLSEEEERK

SEQ ID NO: 15453 - protein, 214 aa, Homo sapiens
MPRAFLVRSRRPQPPNWGHLPDQLRGDAYIPGGPLTVPGGKGQERRSVTIWLFSSDCSSLGGPPAQQSSSVRDPWTAQPTQGNLTSAPRGPGTLGCPLCPKAFPLQRMLTRHLKCHSPVRRHLCRCCGKGFHDAFDLKRHMRTHTGIRPFRCSACGKAFTQRCSLEAHLAKVHGQPASYAYRERREKLHVCEDCGFTSSRPDTYAQHRALHRAA

SEQ ID NO: 15454 - protein, 1014 aa, Homo sapiens
MAESSDKLYRVEYAKSGRASCKKCSESIPKDSLRMAIMVQSPMFDGKVPHWYHFSCFWKVGHSIRHPDVEVDGFSELRWDDQQKVKKTAEAGGVTGKGQDGIGSKAEKTLGDFAAEYAKSNRSTCKGCMEKIEKGQVRLSKKMVDPEKPQLGMIDRWYHPGCFVKNREELGFRPEYSASQLKGFSLLATEDKEALKKQLPGVKSEGKRKGDEVDGVDEVAKKKSKKEKDKDSKLEKALKAQNDLIWNIKDELKKVCSTNDLKELLIFNKQQVPSGESAILDRVADGMVFGALLPCEECSGQLVFKSDAYYCTGDVTAWTKCMVKTQTPNRKEWVTPKEFREISYLKKLKVKKQDRIFPPETSASVAATPPPSTASAPAAVNSSASADKPLSNMKILTLGKLSRNKDEVKAMIEKLGGKLTGTANKASLCISTKKEVEKMNKKMEEVKEANIRVVSEDFLQDVSASTKSLQELFLAHILSPWGAEVKAEPVEVVAPRGKSGAALSKKSKGQVKEEGINKSEKRMKLTLKGGAAVDPDSGLEHSAHVLEKGGKVFSATLGLVDIVKGTNSYYKLQLLEDDKENRYWIFRSWGRVGTVIGSNKLEQMPSKEDAIEHFMKLYEEKTGNAWHSKNFTKYPKKFYPLEIDYGQDEEAVKKLTVNPGTKSKLPKPVQDLIKMIFDVESMKKAMVEYEIDLQKMPLGKLSKRQIQAAYSILSEVQQAVSQGSSDSQILDLSNRFYTLIPHDFGMKKPPLLNNADSVQAKVEMLDNLLDIEVAYSLLRGGSDDSSKDPIDVNYEKLKTDIKVVDRDSEEAEIIRKYVKNTHATTHNAYDLEVIDIFKIEREGECQRYKPFKQLHNRRLLWHGSRTTNFAGILSQGLRIAPPEAPVTGYMFGKGIYFADMVSKSANYCHTSQGDPIGLILLGEVALGNMYELKHASHISKLPKGKHSVKGLGKTTPDPSANISLDGVDVPLGTGISSGVNDTSLLYNEYIVYDIAQVNLKYLLKLKFNFKTSLW

SEQ ID NO: 15455 - protein, 701 aa, Homo sapiens
MAQAGVVGEVTQVLCAAGGALELPELRRRLRMGLSADALERLLRQRGRFVVAVRAGGAAAAPERVVLAASPLRLCRAHQGSKPGCVGLCAQLHLCRFMVYGACKFLRAGKNCRNSHSLTTEHNLSVLRTHGVDHLSYNELCQLLFQNDPWLLPEICQHYNKGDGPHGSCAFQKQCIKLHICQYFLQGECKFGTSCKRSHDFSNSENLEKLEKLGMSSDLVSRLPTIYRNAHDIKNKSSAPSRVPPLFVPQGTSERKDSSGSVSPNTLSQEEGDQICLYHIRKSCSFQDKCHRVHFHLPYRWQFLDRGKWEDLDNMELIEEAYCNPKIERILCSESASTFHSHCLNFNAMTYGATQARRLSTASSVTKPPHFILTTDWIWYWSDEFGSWQEYGRQGTVHPVTTVSSSDVEKAYLAYCTPGSDGQAATLKFQAGKHNYELDFKAFVQKNLVYGTTKKVCRRPKYVSPQDVTTMQTCNTKFPGPKSIPDYWDSSALPDPGFQKITLSSSSEEYQKVWNLFNRTLPFYFVQKIERVQNLALWEVYQWQKGQMQKQNGGKAVDERQLFHGTSAIFVDAICQQNFDWRVCGVHGTSYGKGSYFARDAAYSHHYSKSDTQTHTMFLARVLVGEFVRGNASFVRPPAKEGWSNAFYDSCVNSVSDPSIFVIFEKHQVYPEYVIQYTTSSKPSVTPSILLALGSLFSSRQ

SEQ ID NO: 15456 - protein, 687 aa, Homo sapiens
MERVNDASCGPSGCYTYQVSRHSTEMLHNLNQQRKNGGRFCDVLLRVGDESFPAHRAVLAACSEYFESVFSAQLGDGGAADGGPADVGGATAAPGGGAGGSRELEMHTISSKVFGDILDFAYTSRIVVRLESFPELMTAAKFLLMRSVIEICQEVIKQSNVQILVPPARADIMLFRPPGTSDLGFPLDMTNGAALAANSNGIAGSMQPEEEAARAAGAAIAGQASLPVLPGVDRLPMVAGPLSPQLLTSPFPSVASSAPPLTGKRGRGRPRKANLLDSMFGSPGGLREAGILPCGLCGKVFTDANRLRQHEAQHGVTSLQLGYIDLPPPRLGENGLPISEDPDGPRKRSRTRKQVACEICGKIFRDVYHLNRHKLSHSGEKPYSCPVCGLRFKRKDRMSYHVRSHDGSVGKPYICQSCGKGFSRPDHLNGHIKQVHTSERPHKCQTCNASFATRDRLRSHLACHEDKVPCQVCGKYLRAAYMADHLKKHSEGPSNFCSICNRGFSSASYLKVHVKTHHGVPLPQVSRHQEPILNGGAAFHCARTYGNKEGQKCSHQDPIESSDSYGDLSDASDLKTPEKQSANGSFSCDMAVPKNKMESDGEKKYPCPECGSFFRSKSYLNKHIQKVHVRALGGPLGDLGPALGSPFSPQQNMSLLESFGFQIVQSAFASSLVDPEVDQQPMGPEGK

SEQ ID NO: 15457 - protein, 340 aa, Homo sapiens
MATGGYRTSSGLGGSTTDFLEEWKAKREKMRAKQNPPGPAPPGGGSSDAAGKPPAGALGTPAAAAANELNNNLPGGAPAAPAVPGPGGVNCAVGSAMLTRAAPGPRRSEDEPPAASASAAPPPQRDEEEPDGVPEKGKSSGPSARKGKGQIEKRKLREKRRSTGVVNIPAAECLDEYEDDEAGQKERKREDAITQQNTIQNEAVNLLDPGSSYLLQEPPRTVSGRYKSTTSVSEEDVSSRYSRTDRSGFPRYNRDANVSGTLVSSSTLEKKIEDLEKEVVRERQENLRLVRLMQDKEEMIGKLKEEIDLLNRDLDDIEDENEQLKQENKTLLKVVGQLTR

SEQ ID NO: 15458 - protein, 534 aa, Homo sapiens
MKFTLGLGSRAWRVSWEGAAAAAAGPGAGGSALRCRAQRVSSPRLGRRGSRLSGALPLCLSRGGGGAQALPDCAGPSPGHPGHPGARQLAGPLAMEQTYGEVNQLGGVFVNGRPLPNAIRLRIVELAQLGIRPCDISRQLRVSHGCVSKILARYNETGSILPGAIGGSKPRVTTPNVVKHIRDYKQGDPGIFAWEIRDRLLADGVCDKYNVPSVSSISRILRNKIGSLAQPGPYEASKQPPSQPTLPYNHIYQYPYPSPVSPTGAKMGSHPGVPGTAGHVSIPRSWPSAHSVSNILGIRTFMEQTGALAGSEGTAYSPKMEDWAGVNRTAFPATPAVNGLEKPALEADIKYTQSASTLSAVGGFLPACAYPASNQHGVYSAPGGGYLAPGPPWPPAQGPPLAPPGAGVAVHGGELAAAMTFKHPSREGSLPAPAARPRTPSVAYTDCPSRPRPPRGSSPRTRARRERQADPGAQVCAAAPAIGTGRIGGLAEEEASAGPRGARPASPQAQPCLWPDPPHFLYWSGFLGFSELGF

SEQ ID NO: 15459 - protein, 417 aa, Homo sapiens; identical to SEQ ID NO: 10021

SEQ ID NO: 15460 - protein, 479 aa, Homo sapiens
MTTLAGAVPRMMRPGPGQNYPRSGFPLEVSTPLGQGRVNQLGGVFINGRPLPNHIRHKIVEMAHHGIRPCVISRQLRVSHGCVSKILCRYQETGSIRPGAIGGSKPKQVTTPDVEKKIEEYKRENPGMFSWEIRDKLLKDAVCDRNTVPSVSSISRILRSKFGKGEEEEADLERKEAEESEKKAKHSIDGILSERASAPQSDEGSDIDSEPDLPLKRKQRRSRTTFTAEQLEELERAFERTHYPDIYTREELAQRAKLTEARVQVWFSNRRARWRKQAGANQLMAFNHLIPGGFPPTAMPTLPTYQLSETSYQPTSIPQAVSDPSSTVHRPQPLPPSTVHQSTIPSNPDSSSAYCLPSTRHGFSSYTDSFVPPSGPSNPMNPTIGNGLSPQVMGLLTNHGGVPHQPQTDYALSPLTGGLEPTTTVSASCSQRLDHMKSLDSLPTSQSYCPPTYSTTGYSMDPVTGYQYGQYGQSKPWTF

SEQ ID NO: 15461 - protein, 350 aa, Homo sapiens
MHQDGISSMNQLGGLFVNGRPLPLDTRQQIVRLAVSGMRPCDISRILKVSNGCVSKILGRYYRTGVLEPKGIGGSKPRLATPPVVARIAQLKGECPALFAWEIQRQLCAEGLCTQDKTPSVSSINRVLRALQEDQGLPCTRLRSPAVLAPAVLTPHSGSETPRGTHPGTGHRNRTIFSPSQAEALEKEFQRGQYPDSVARGKLATATSLPEDTVRVWFSNRRAKWRRQEKLKWEMQLPGASQGLTVPRVAPGIISAQQSPGSVPTAALPALEPLGPSCYQLCWATAPERCLSDTPPKACLKPCWDCGSFLLPVIAPSCVDVAWPCLDASLAHHLIGGAGKATPTHFSHWP

SEQ ID NO: 15462 - protein, 391 aa, Homo sapiens
MDLEKNYPTPRTSRTGHGGVNQLGGVFVNGRPLPDVVRQRIVELAHQGVRPCDISRQLRVSHGCVSKILGRYYETGSIKPGVIGGSKPKVATPKVVEKIAEYKRQNPTMFAWEIRDRLLAERVCDNDTVPSVSSINRIIRTKVQQPPNQPVPASSHSIVSTGSVTQVSSVSTDSAGSSYSISGILGITSPSADTNKRKRDEGIQESPVPNGHSLPGRDFLRKQMRGDLFTQQQLEVLDRVFERQHYSDIFTTTEPIKPEQTTEYSAMASLAGGLDDMKANLASPTPADIGSSVPGPQSYPIVTGRDLASTTLPGYPPHVPPAGQGSYSAPTLTGMVPGSEFSGSPYSHPQYSSYNDSWRFPNPGLLGSPYYYSAAARGAAPPAAATAYDRH

SEQ ID NO: 15463 - protein, 422 aa, Homo sapiens [sequence omitted]

SEQ ID NO: 15464 - protein, 505 aa, Homo sapiens
MAALPGTVPRMMRPAPGQNYPRTGFPLEVSTPLGQGRVNQLGGVFINGRPLPNHIRHKIVEMAHHGIRPCVISRQLRVSHGCVSKILCRYQETGSIRPGAIGGSKPRQVATPDVEKKIEEYKRENPGMFSWEIRDRLLKDGHCDRSTVPSGLVSSISRVLRIKFGKKEEEDEADKKEDDGEKKAKHSIDGILGDKGNRLDEGSDVESEPDLPLKRKQRRSRTTFTAEQLEELEKAFERTHYPDIYTREELAQRTKLTEARVQVWFSNRRARWRKQAGANQLAAFNHLLPGGFPPTGMPTLPPYQLPDSTYPTTTISQDGGSTVHRPQPLPPSTMHQGGLAAAAAAADTSSAYGARHSFSSYSDSFMNPAAPSNHMNPVSNGLSPQVMSILGNPSAVPPQPQADFSISPLHGGLDSATSISASCSQRADSIKPGDSLPTSQAYCPPTYSTTGYSVDPVAGYQYGQYGQTAVDYLAKNVSLSTQRRMKLGEHSAVLGLLPVETGQAY

SEQ ID NO: 15465 - protein, 450 aa, Homo sapiens
MPHNSIRSGHGGLNQLGGAFVNGRPLPEVVRQRIVDLAHQGVRPCDISRQLRVSHGCVSKILGRYYETGSIRPGVIGGSKPKVATPKVVEKIGDYKRQNPTMFAWEIRDRLLAEGVCDNDTVPSVSSINRIIRTKVQQPFNLPMDSCVATKSLSPGHTLIPSSAVTPPESPQSDSLGSTYSINGLLGIAQPGSDKRKMDDSDQDSCRLSIDSQSSSSGPRKHLRTDAFSQHHLEPLECPFERQHYPEAYASPSHTKGEQGLYPLPLLNSTLDDGKATLTPSNTPLGRNLSTHQTYPVVADPHSPFAIKQETPEVSSSSSTPSSLSSSAFLDLQQVGSGVPPFNAFPHAASVYGQFTGQALLSGREMVGPTLPGYPPHIPTSGQGSYASSAIAGMVAGSEYSGNAYGHTPYSSYSEAWRFPNSSLLSSPYYYSSTSRPSAPPTTATAFDHL

SEQ ID NO: 15466 - protein, 341 aa, Homo sapiens
MEPAFGEVNQLGGVFVNGRPLPNAIRLRIVELAQLGIRPCDISRQLRVSHGCVSKILARYNETGSILPGAIGGSKPRVTTPTVVKHIRTYKQRDPGIFAWEIRDRLLADGVCDKYNVPSVSSISRILRNKIGNLAQQGHYDSYKQHQPTPQPALPYNHIYSYPSPITAAAAKVPTPPGVPAIPGSVAMPRTWPSSHSVTDILGIRSITDQVSDSSPYHSPKVEEWSSLGRNNFPAAAPHAVNGLEKGALEQEAKYGQAPNGLPAVGSFVSASSMAPYPTPAQVSPYMTYSAAPSGYVAGHGWQHAGGTSLSPHNCDIPASLAFKGMQAAREGSHSVTASAL

SEQ ID NO: 15467 - protein, 917 aa, Homo sapiens
MFRKARRVNVRKRNDSEEEERERDEEQEPPPLLPPPGTGEEAGPGGGDRAPGGESLLGPGPSPPSALTPGLGAEAGGGFPGGAEPGNGLKPRKRPRENKEVPRASLLSFQDEEEENEEVFKVKKSSYSKKIVKLLKKEYKEDLEKSKIKTELNSSAESEQPLDKTGHVKDTNQEDGVIISEHGEDEMDMESEKEEEKPKTGGAFSNALSSLNVLRPGEIPDAAFIHAARKKRQMARELGDFTPHDNEPGKGRLVREDENDASDDEDDDEKRRIVFSVKEKSQRQKIAEEIGIEGSDDDALVTGEQDEELSRWEQEQIRKGINIPQVQASQPAEVNMYYQNTYQTMPYGSSYGIPYSYTAYGSSDAKSQKTDNTVPFKTPSNEMTPVTIDLVKKQLKDRLDSMKELHKTNRQQHEKHLQSRVDSTRAIERLEGSSGGIGERYKFLQEMRGYVQDLLECFSEKVPLINELESAIHQLYKQRASRLVQRRQDDIKDESSEFSSHSNKALMAPNLDSFGRDRALYQEHAKRRIAEREARRTRRRQAREQTGKMADHLEGLSSDDEETSTDITNFNLEKDRISKESGKVFEDVLESFYSIDCIKSQFEAWRSKYYTSYKDAYIGLCLPKLFNPLIRLQLLTWTPLEAKCRDFENMLWFESLLFYGCEEREQEKDDVDVALLPTIVEKVILPKLTVIAENMWDPFSTTQTSRMVGITLKLINGYPSVVNAENKNTQVYLKALLLRMRRTLDDDVFMPLYPKNVLENKNSGPYLFFQRQFWSSVKLLGNFLQWYGIFSNKTLQELSIDGLLNRYILMAFQNSEYGDDSIKKAQNVINCFPKQWFMNLKGERTISQLENFCRYLVHLADTIYRNSIGCSDVEKRNARENIKQIVKLLASVRALDHAMSVASDHNVKEFKSLIEGK

SEQ ID NO: 15468 - protein, 1689 aa, Homo sapiens
MGSKRRRATSPSSSVSGDFDDGHHSVSTPGPSRKRRRLSNLPTVDPIAVCHELYNTIRDYKDEQGRLLCELFIRAPKRRNQPDYYEVVSQPIDLMKIQQKLKMEEYDDVNLLTADFQLLFNNAKSYYKPDSPEYKAACKLWDLYLRTRNEFVQKGEADDEDDDEDGQDNQGTVTEGSSPAYLKEILEQLLEAIVVATNPSGRLISELFQKLPSKVQYPDYYAIIKEPIDLKTIAQRIQNGSYKSIHAMAKDIDLLAKNAKTYNEPGSQVFKDANSIKKIFYMKKAEIEHHEMAKSSLRMRTPSNLAAARLTGPSHSKGSLGEERNPTSKYYRNKRAVQGGRLSAITMALQYGSESEEDAALAAARYEEGESEAESITSFMDVSNPFYQLYDTVRSCRNNQGQLIAEPFYHLPSKKKYPDYYQQIKMPISLQQIRTKLKNQEYETLDHLECDLNLMFENAKRYNVPNSAIYKRVLKLQQVMQAKKKELARRDDIEDGDSMISSATSDTGSAKRKSKKNIRKQRMKILFNVVLEAREPGSGRRLCDLFMVKPSKKDYPDYYKIILEPMDLKIIEHNIRNDKYAGEEGMIEDMKLMFRNARHYNEEGSQVYNDAHILEKLLKEKRKELGPLPDDDDMASPKLKLSRKSGISPKKSKYMTPMQQKLNEVYEAVKNYTDKRGRRLSAIFLRLPSRSELPDYYLTIKKPMDMEKIRSHMMANKYQDIDSMVEDFVMMFNNACTYNEPESLIYKDALVLHKVLLETRRDLEGDEDSHVPNVTLLIQELIHNLFVSVMSHQDDEGRCYSDSLAEIPAVDPNFPNKPPLTFDIIRKNVENNRYRRLDLFQEHMFEVLERARRMNRTDSEIYEDAVELQQFFIKIRDELCKNGEILLSPALSYTTKHLHNDVEKERKEKLPKEIEEDKLKREEEKREAEKSEDSSGAAGLSGLHRTYSQDCSFKNSMYHVGDYVYVEPAEANLQPHIVCIERLWEDSAGEKWLYGCWFYRPNETFHLATRKFLEKEVFKSDYYNKVPVSKILGKCVVMFVKEYFKLCPENFRDEDVFVCESRYSAKTKSFKKIKLWTMPISSVRFVPRDVPLPVVRVASVFANADKGDDEKNTDNSEDSRAEDNFNLEKEKEDVPVEMSNGEPGCHYFEQLHYNDMWLKVGDCVFIKSHGLVRPRVGRIEKVWVRDGAAYFYGPIFIHPEETEHEPTKMFYKKEVFLSNLEETCPMTCILGKCAVLSFKDFLSCRPTEIPENDILLCESRYNESDKQMKKFKGLKRFSLSAKVVDDEIYYFRKPIVPQKEPSPLLEKKIQLLEAKFAELEGGDDDIEEMGEEDSEVIEPPSLPQLQTPLASELDLMPYTPPQSTPKSAKGSAKKEGSKRKINMSGYILFSSEMRAVIKAQHPDYSFGELSRLVGTEWRNLETAKKAEYEERAAKVAEQQERERAAQQQQPSASPRAGTPVGALMGVVPPPTPMGMLNQQLTPVAGMMGGYPPGLPPLQGPVDGLVSMGSMQPLHPGGPPPHHLPPGVPGLPGIPPPGVMNQGVAPMVGTPAPGGSPYGQQVGVLGPPGQQAPPPYPGPHPAGPPVIQQPTTPMFVAPPPKTQRLLHSEAYLKYIEGLSAESNSISKWDQTLAARRRDVHLSKEQESRLPSHWLKSKGAHTTMADALWRLRDLMLRDTLNIRQAYNLENV

SEQ ID NO: 15469 - protein, 430 aa, Homo sapiens
MDEQPRLMHSHAGVGMAGHPGLSQHLQDGAGGTEGEGGRKQDIGDILQQIMTITDQSLDEAQARKHALNCHRMKPALFNVLCEIKEKTVLSIRGAQEEEPTDPQLMRLDNMLLAEGVAGPEKGGGSAAAAAAAAASGGAGSDNSVEHSDYRAKLSQIRQIYHTELEKYEQACNEFTTHVMNLLREQSRTRPISPKEIERMVSIIHRKFSSIQMQLKQSTCEAVMILRSRFLDARRKRRNFNKQATEILNEYFYSHLSNPYPSEEAKEELAKKCGITVSQVSNWFGNKRIRYKKNIGKFQEEANIYAAKTAVTATNVSAHGSQANSPSTPNSAGSSSSFNMSNSGDLFMSVQSLNGDSYQGAQVGANVQSQVDTLRHVISQTGGYSDGLAASQMYSPQGISANGGWQDATTPSSVTSPTEGPGSVHSDTSN

SEQ ID NO: 15470 - protein, 430 aa, Homo sapiens
MDERLLGPPPPGGGRGGLGLVSGEPGGPGEPPGGGDPGGGSGGVPGGRGKQDIGDILQQIMTITDQSLDEAQAKKHALNCHRMKPALFSVLCEIKEKTGLSIRSSQEEEPVDPQLMRLDNMLLAEGVAGPEKGGGSAAAAAAAAASGGGVSPDNSIEHSDYRSKLAQIRHIYHSELEKYEQACNEFTTHVMNLLREQSRTRPVAPKEMERMVSIIHRKFSAIQMQLKQSTCEAVMILRSRFLDARRKRRNFSKQATEVLNEYFYSHLSNPYPSEEAKEELAKKCGITVSQVSNWFGNKRIRYKKNIGKFQEEANIYAVKTAVSVTQGGHSRTSSPTPPSSAGSGGSFNLSGSGDMFLGMPGLNGDSYSASQVESLRHSMGPGGYGDNLGGGQMYSPREMRANGSWQEAVTPSSVTSPTEGPGSVHSDTSN

SEQ ID NO: 15471 - protein, 434 aa, Homo sapiens
MDDQSRMLQTLAGVNLAGHSVQGGMALPPPPHGHEGADGDGRKQDIGDILHQIMTITDQSLDEAQAKKHALNCHRMKPALFSVLCEIKEKTGLSIRGAQEEDPPDPQLMRLDNMLLAEGVSGPEKGGGSAAAAAAAAASGGSSDNSIEHSDYRAKLTQIRQIYHTELEKYEQACNEFTTHVMNLLREQSRTRPISPKEIERMVGIIHRKFSSIQMQLKQSTCEAVMILRSRFLDARRKRRNFSKQATEILNEYFYSHLSNPYPSEEAKEELAKKCSITVSQVSNWFGNKRIRYKKNIGKFQEEANLYAAKTAVTAAHAVAAAVQNNQTNSPTTPNSGSSGSFNLPNSGDMFMNMQSLNGDSYQGSQVGANVQSQVDTLRHVINQTGGYSDGLGGNSLYSPHNLNANGGWQDATTPSSVTSPTEGPGSVHSDTSN

SEQ ID NO: 15472 - protein, 374 aa, Homo sapiens
MAAPPRPAPSPPAPRRLDTSDVLQQIMAITDQSLDEAQARKHALNCHRMKPALFSVLCEIKEKTVVSIRGIQDEDPPDAQLLRLDNMLLAEGVCRPEKRGRGGAVARAGTATPGGCPNDNSIEHSDYRAKLSQIRQIYHSELEKYEQACREFTTHVTNLLQEQSRMRPVSPKEIERMVGAIHGKFSAIQMQLKQSTCEAVMTLRSRLLDARRKRRNFSKQATEVLNEYFYSHLNNPYPSEEAKEELARKGGLTISQVSNWFGNKRIRYKKNMGKFQEEATIYTGKTAVDTTEVGVPGNHASCLSTPSSGSSGPFPLPSAGDAFLTLRTLASLQPPPGGGCLQSQAQGSWQGATPQPATASPAGDPGSINSSTSN

SEQ ID NO: 15473 - protein, 356 aa, Homo sapiens
MDAGVTESGLNVTLTIRLLMHGKEVGSIIGKKGESVKRIREESGARINISEGNCPERIITLTGPTNAIFKAFAMIIDKLEEDINSSMTNSTAASRPPVTLRLVVPATQCGSLIGKGGCKIKEIRESTGAQVQVAGDMLPNSTERAITIAGVPQSVTECVKQICLVMLETLSQSPQGRVMTIPYQPMPASSPVICAGGQDRCSDAAGYPHATHDLEGPPLDAYSIQGQHTISPLDLAKLNQVARQQSHFAMMHGGTGFAGIDSSSPEVKGYWASLDASTQTTHELTIPNNLIGCIIGRQGANINEIRQMSGAQIKIANPVEGSSGRQVTITGSAASISLAQYLINARLSSEKGMGCS

SEQ ID NO: 15474 - protein, 365 aa, Homo sapiens
MDTGVIEGGLNVTLTIRLLMHGKEVGSIIGKKGESVKKMREESGARINISEGNCPERIITLAGPTNAIFKAFAMIIDKLEEDISSSMTNSTAASRPPVTLRLVVPASQCGSLIGKGGCKIKEIRESTGAQVQVAGDMLPNSTERAITIAGIPQSIIECVKQICVVMLETLSQSPPKGVTIPYRPKPSSSPVIFAGGQDRYSTGSDSASFPHTTPSMCLNPDLEGPPLEAYTIQGQYAIPQPDLTKLHQLAMQQSHFPMTHGNTGFSGIESSSPEVKGYWGLDASAQTTSHELTIPNDLIGCIIGRQGAKINEIRQMSGAQIKIANPVEGSTDRQVTITGSAASISLAQYLINVRLSSETGGMGSS

SEQ ID NO: 15475 - protein, 371 aa, Homo sapiens
MGEGDAFWAPSVLPHSTLSTLSHHPQPQFGRRMESKVSEGGLNVTLTIRLLMHGKEVGSIIGKKGETVKKMREESGARINISEGNCPERIVTITGPTDAIFKAFAMIAYKFEEDIINSMSNSPATSKPPVTLRLVVPASQCGSLIGKGGSKIKEIRESTGAQVQVAGDMLPNSTERAVTISGTPDAIIQCVKQICVVMLESPPKGATIPYRPKPASTPVIFAGGQAYTIQGQYAIPHPDQLTKLHQLAMQQTPFPPLGQTNPAFPGEKLPLHSSEEAQNLMGQSSGLDASPPASTHELTIPNDLIGCIIGRQGTKINEIRQMSGAQIKIANATEGSSERQITITGTPANISLAQYLINARLTSEVTGMGTL

SEQ ID NO: 15476 - protein, 403 aa, Homo sapiens
MSGSDGGLEEEPELSITLTLRMLMHGKEVGSIIGKKGETVKRIREQSSARITISEGSCPERITTITGSTAAVFHAVSMIAFKLDEDLCAAPANGGNVSRPPVTLRLVIPASQCGSLIGKAGTKIKEIRETTGAQVQVAGDLLPNSTERAVTVSGVPDAIILCVRQICAVILESPPKGATIPYHPSLSLGTVLLSANQGFSVQGQYGAVTPAEVTKLQQLSSHAVPFATPSVVPGLDPGTQTSSQEFLVPNDLIGCVIGRQGSKISEIRQMSGAHIKIGNQAEGAGERHVTITGSPVSIALAQYLITACLETAKSTSGGTPSSAPADLPAPFSPPLTALPTAPPGLLGTPYAISLSNFIGLKPMPFLALPPASPGPPPGLAAYTAKMAAANGSKKAERQKFSPY

SEQ ID NO: 15477 - protein, 350 aa, Homo sapiens
MEGVAVVTAGSVGAAKTEGAAALPPPPPVSPPALTPAPAAGEEGPAPLSETGAPGCSGSRPPELEPERSLGRFRGRFEDEDEELEEEEELEEEEEEEEEDMSHFSLRLEGGRQDSEDEEERLINLSELTPYILCSICKGYLIDATTITECLHTFCKSCIVRHFYYSNRCPKCNIVVHQTQPLYNIRLDRQLQDIVYKLVINLEEREKKQMHDFYKERGLEVPKPAVPQPVPSSKGRSKKVLESVFRIPPELDMSLLLEFIGANEGTGHFKPLEKKFVRVSGEATIGHVEKFLRRKMGLDPACQVDIICGDHLLEQYQTLREIRRAIGDAAMQDGLLVLHYGLVVSPLKIT

SEQ ID NO: 15478 - protein, 501 aa, Homo sapiens
MAASWRLGCDPRLLRYLVGFPGRRSVGLVKGALGWSVSRGANWRWFHSTQWLRGDPIKILMPSLSPTMEEGNIVKWLKKEGEAVSAGDALCEIETDKAVVTLDASDDGILAKIVVEEGSKNIRLGSLIGLIVEEGEDWKHVEIPKDVGPPPPVSKPSEPRPSPEPQISIPVKKEHIPGTLRFRLSPAARNILEKHSLDASQGTATGPRGIFTKEDALKLVQLKQTGKITESRPTPAPTATPTAPSPLQATAGPSYPRPVIPPVSTPGQPNAVGTFTEIPASNIRRVIAKRLTESKSTVPHAYATADCDLGAVLKVRQDLVKDDIKVSVNDFIIKAAAVTLKQMPDVNVSWDGEGPKQLPFIDISVAVATDKGLLTPIIKDAAAKGIQEIADSVKALSKKARDGKLLPEEYQGGSFSISNLGMFGIDEFTAVINPPQACILAVGRFRPVLKLTEDEEGNAKLQQRQLITVTMSSDSRVVDDELATRFLKSFKANLENPIRLA

SEQ ID NO: 15479 - protein, 283 aa, Homo sapiens
MNGEEQYYAATQLYKDPCAFQRGPAPEFSASPPACLYMGRQPPPPPPHPFPGALGALEQGSPPDISPYEVPPLADDPAVAHLHHHLPAQLALPHPPAGPFPEGAEPGVLEEPNRVQLPFPWMKSTKAHAWKGQWAGGAYAAEPEENKRTRTAYTRAQLLELEKEFLFNKYISRPRRVELAVMLNLTERHIKIWFQNRRMKWKKEEDKKRGGGTAVGGGGVAEPEQDCAVTSGEELLALPPPPPPGGAVPPAAPVAAREGRLPPGLSASPQPSSVAPRRPQEPR

SEQ ID NO: 15480 - protein, 1588 aa, Homo sapiens
MLPPKHLSATKPKKSWAPNLYELDSDLTKEPDVIIGEGPTDSEFFHQRFRNLIYVEFVGPRKTLIKLRNLCLDWLQPETRTKEEIIELLVLEQYLTIIPEKLKPWVRAKKPENCEKLVTLLENYKEMYQPEDDNNSDVTSDDDMTRNRRESSPPHSVHSFSDRDWDRRGRSRDMEPRDRWSHTRNPRSRMPPRDLSLPVVAKTSFEMDREDDRDSRAYESRSQDAESYQNVVDLAEDRKPHNTIQDNMENYRKLLSLVQLAEDDGHSHMTQGHSSRSKRSAYPSTSRGLKTMPEAKKSTHRRGICEDESSHGVIMEKFIKDVSRSSKSGRARESSDRSQRFPRMSDDNWKDISLNKRESVIQQRVYEGNAFRGGFRFNSTLVSRKRVLERKRRYHFDTDGKGSIHDQKGCPRKKPFECGSEMRKAMSVSSLSSLSSPSFTESQPIDFGAMPYVCDECGRSFSVISEFVEHQIMHTRENLYEYGESFIHSVAVSEVQKSQVGGKRFECKDCGETFNKSAALAEHRKIHARGYLVECKNQECEEAFMPSPTFSELQKIYGKDKFYECRVCKETFLHSSALIEHQKIHFGDDKDNEREHERERERERGETFRPSPALNEFQKMYGKEKMYECKVCGETFLHSSSLKEHQKIHTRGNPFENKGKVCEETFIPGQSLKRRQKTYNKEKLCDFTDGRDAFMQSSELSEHQKIHSRKNLFEGRGYEKSVIHSGPFTESQKSHTITRPLESDEDEKAFTISSNPYENQKIPTKENVYEAKSYERSVIHSLASVEAQKSHSVAGPSKPKVMAESTIQSFDAINHQRVRAGGNTSEGREYSRSVIHSLVASKPPRSHNGNELVESNEKGESSIYISDLNDKRQKIPARENPCEGGSKNRNYEDSVIQSVFRAKPQKSVPGEGSGEFKKDGEFSVPSSNVREYQKARAKKKYIEHRSNETSVIHSLPFGEQTFRPRGMLYECQECGECFAHSSDLTEHQKIHDREKPSGSRNYEWSVIRSLAPTDPQTSYAQEQYAKEQARNKCKDFRQFFATSEDLNTNQKIYDQEKSHGEESQGENTDGEETHSEETHGQETIEDPVIQGSDMEDPQKDDPDDKIYECEDCGLGFVDLTDLTDHQKVHSRKCLVDSREYTHSVIHTHSISEYQRDYTGEQLYECPKCGESFIHSSFLFEHQRIHEQDQLYSMKGCDDGFIALLPMKPRRNRAAERNPALAGSAIRCLLCGQGFIHSSALNEHMRLHREDDLLEQSQMAEEAIIPGLALTEFQRSQTEERLFECAVCGESFVNPAELADHVTVHKNEPYEYGSSYTHTSFLTEPLKGAIPFYECKDCGKSFIHSTVLTKHKELHLEEEEEDEAAAAAAAAAQEVEANVHVPQVVLRIQGLNVEAAEPEVEAAEPEVEAAEPEVEAAEPNGEAEGPDGEAAEPIGEAGQPNGEAEQPNGDADEPDGAGIEDPEERAEEPEGKAEEPEGDADEPDGVGIEDPEEGEDQEIQVEEPYYDCHECTETFTSSTAFSEHLKTHASMIIFEPANAFGECSGYIERASTSTGGANQADEKYFKCDVCGQLFNDRLSLARHQNTHTG

SEQ ID NO: 15481 - protein, 933 aa, Homo sapiens
MTELKAKGPRAPHVAGGPPSPEVGSPLLCRPAAGPFPGSQTSDTLPEVSAIPISLDGLLFPRPCQGQDPSDEKTQDQQSLSDVEGAYSRAEATRGAGGSSSSPPEKDSGLLDSVLDTLLAPSGPGQSQPSPPACEVTSSWCLFGPELPEDPPAAPATQRVLSPLMSRSGCKVGDSSGTAAAHKVLPRGLSPARQLLLPASESPHWSGAPVKPSPQAAAVEVEEEDGSESEESAGPLLKGKPRALGGAAAGGGAAAVPPGAAAGGVALVPKEDSRFSAPRVALVEQDAPMAPGRSPLATTVMDFIHVPILPLNHALLAARTRQLLEDESYDGGAGAASAFAPPRSSPCASSTPVAVGDFPDCAYPPDAEPKDDAYPLYSDFQPPALKIKEEEEGAEASARSPRSYLVAGANPAAFPDFPLGPPPPLPPRATPSRPGEAAVTAAPASASVSSASSSGSTLECILYKAEGAPPQQGPFAPPPCKAPGASGCLLPRDGLPSTSASAAAAGAAPALYPALGLNGLPQLGYQAAVLKEGLPQVYPPYLNYLRPDSEASQSPQYSFESLPQKICLICGDEASGCHYGVLTCGSCKVFFKRAMEGQHNYLCAGRNDCIVDKIRRKNCPACRLRKCCQAGMVLGGRKFKKFNKVRVVRALDAVALPQPVGVPNESQALSQRFTFSPGQDIQLIPPLINLLMSIEPDVIYAGHDNTKPDTSSSLLTSLNQLGERQLLSVVKWSKSLPGFRNLHIDDQITLIQYSWMSLMVFGLGWRSYKHVSGQMLYFAPDLILNEQRMKESSFYSLCLTMWQIPQEFVKLQVSQEEFLCMKVLLLLNTIPLEGLRSQTQFEEMRSSYIRELIKAIGLRQKGVVSSSQRFYQLTKLLDNLHDLVKQLHLYCLNTFIQSRALSVEFPEMMSEVIAAQLPKILAGMVKPLLFHKK

SEQ ID NO: 15482 - protein, 272 aa, Homo sapiens; identical to SEQ ID NO: 10322

SEQ ID NO: 15483 - protein, 299 aa, Homo sapiens
MAQNLKDLAGRLPAGPRGMGTALKLLLGAGAVAYGVRESVFTVEGGHRAIFFNRIGGVQQDTILAEGLHFRIPWFQYPIIYDIRARPRKISSPTGSKDLQMVNISLRVLSRPNAQELPSMYQRLGLDYEERVLPSIVNEVLKSVVAKFNASQLITQRAQVSLLIRRELTERAKDFSLILDDVAITELSFSREYTAAVEAKQVAQQEAQRAQFLVEKAKQEQRQKIVQAEGEAEAAKMLGEALSKNPGYIKLRKIRAAQNISKTIATSQNRIYLTADNLVLNLQDESFTRGSDSLIKGKK

SEQ ID NO: 15484 - protein, 1012 aa, Homo sapiens
MTKHPPNRRGISFEVGAQLEARDRLKNWYPAHIEDIDYEEGKVLIHFKRWNHRYDEWFCWDSPYLRPLEKIQLRKEGLHEEDGSSEFQINEQVLACWSDCRFYPAKVTAVNKDGTYTVKFYDGVVQTVKHIHVKAFSKDQNIVGNARPKETDHKSLSSSPDKREKFKEQRKATVNVKKDKEDKPLKTEKRPKQPDKEGKLICSEKGKVSEKSLPKNEKEDKENISENDREYSGDAQVDKKPENDIVKSPQENLREPKRKRGRPPSIAPTAVDSNSQTLQPITLELRRRKISKGCEVPLKRPRLDKNSSQEKSKNYSENTDKDLSRRRSSRLSTNGTHEILDPDLVVSDLVDTDPLQDTLSSTKESEEGQLKSALEAGQVSSALTCHSFGDGSGAAGLELNCPSMGENTMKTEPTSPLVELQEISTVEVTNTFKKTDDFGSSNAPAVDLDHKFRCKVVDCLKFFRKAKLLHYHMKYFHGMEKSLEPEESPGKRHVQTRGPSASDKPSQETLTRKRVSASSPTTKDKEKNKEKKFKEFVRVKPKKKKKKKKKTKPECPCSEEISDTSQEPSPPKAFAVTRCGSSHKPGVHMSPQLHGPESGHHKGKVKALEEDNLSESSSESFLWSDDEYGQDVDVTTNPDEELDGDDRYDFEVVRCICEVQEENDFMIQCEECQCWQHGVCMGLLEENVPEKYTCYVCQDPPGQRPGFKYWYDKEWLSRGHMHGLAFLEENYSHQNAKKIVATHQLLGDVQRVIEVLHGLQLKMSILQSREHPDLPLWCQPWKQHSGEGRSHFRNIPVTDTRSKEEAPSYRTLNGAVEKPRPLALPLPRSVEESYITSEHCYQKPRAYYPAVEQKLVVETRGSALDDAVNPLHENGDDSLSPRLGWPLDQDRSKGDSDPKPGSPKVKEYVSKKALPEEAPARKLLDRGGEGLLSSQHQWQFNLLTHVESLQDEVTHRMDSIEKELDVLESWLDYTGELEPPEPLARLPQLKHCIKQLLMDLGKVQQIALCCST

SEQ ID NO: 15485 - protein, 110 aa, Homo sapiens
MAKHHPDLIFCRKQAGVAIGRLCEKCDGKCVICDSYVRPCTLVRICDECNYGSYQGRCVICGGPGVSDAYYCKECTIQEKDRDGCPKIVNLGSSKTDLFYERKKYGFKKR

SEQ ID NO: 15486 - protein, 284 aa, Homo sapiens
MDYSYLNSYDSCVAAMEASAYGDFGACSQPGGFQYSPLRPAFPAAGPPCPALGSSNCALGALRDHQPAPYSAVPYKFFPEPSGLHEKRKQRRIRTTFTSAQLKELERVFAETHYPDIYTREELALKIDLTEARVQVWFQNRRAKFRKQERAASAKGAAGAAGAKKGEARCSSEDDDSKESTCSPTPDSTASLPPPPAPGLASPRLSPSPLPVALGSGPGPGPGPQPLKGALWAGVAGGGGGGPGAGAAELLKAWQPAESGPGPFSGVLSSFHRKPGPALKTNLF

SEQ ID NO: 15487 - protein, 314 aa, Homo sapiens
MYKMEYSYLNSSAYESCMAGMDTSSLASAYADFSSCSQASGFQYNPIRTTFGATSGCPSLTPGSCSLGTLRDHQSSPYAAVPYKLFTDHGGLNEKRKQRRIRTTFTSAQLKELERVFAETHYPDIYTREELALKIDLTEARVQVWFQNRRAKFRKQERAAAAAAAAAKNGSSGKKSDSSRDDESKEAKSTDPDSTGGPGPNPNPTPSCGANGGGGGGPSPAGAPGAAGPGGPGGEPGKGGAAAAAAAAAAAAAAAAAAAAGGLAAAGGPGQGWAPGPGPITSIPDSLGGPFASVLSSLQRPNGAKAALVKSSMF

SEQ ID NO: 15488 - protein, 762 aa, Homo sapiens
MASNERDAISWYQKKIGAYDQQIWEKSIEQTQIKGLKNKPKKMGHIKPDLIDVDLIRGSTFAKAKPEIPWTSLTRKGLVRVVFFPLFSNWWIQVTSLRIFVWLLLLYFMQVIAIVLYLMMPIVNISEVLGPLCLMLLMGTVHCQIVSTQITRPSGNNGNRRRRKLRKTVNGDGSRENGNNSSDKVRGIETLESVPIIGGFWETIFGNRIKRVKLISNKGTETDNDPSCVHPIIKRRQCRPEIRMWQTREKAKFSDGEKCRREAFRRLGNGVSDDLSSEEDGEARTQMILLRRSVEGASSDNGCEVKNRKSILSRHLNSQVKKTTTRWCHIVRDSDSLAESEFESAAFSQGSRSGVSGGSRSLNMSRRDSESTRHDSETEDMLWDDLLHGPECRSSVTSDSEGAHVNTLHSGTKRDPKEDVFQQNHLFWLQNSSPSSDRVSAIIWEGNECKKMDMSVLEISGIIMSRVNAYQQGVGYQMLGNVVTIGLAFFPFLHRLFREKSLDQLKSISAEEILTLFCGAPPVTPIIVLSIINFFERLCLTWMFFFMMCVAERTYKQRFLFAKLFSHITSARKARKYEIPHFRLKKVENIKIWLSLRSYLKRRGPQRSVDVVVSSVFLLTLSIAFICCAQVLQGHKTFLNDAYNWEFLIWETALLLFLLRLASLGSETNKKYSNVSILLTEQINLYLKMEKKPNKKEQLTLVNNVLKLSTKLLKELDTPFRLYGLTMNPLIYNITRVVILSAVSGVISDLLGFNIRLWKIKS

SEQ ID NO: 15489 - protein, 785 aa, Homo sapiens
MASKVTDAIVWYQKKEFLSVATTAPGPQQVLPGYCQCSLKDQGLFIQCLIGAYDQQIWEKSVEQREIKFIKLGLRNKPKKTAHVKPDLIDVDLVRGSAFAKAKPESPWTSLTRKGIVRVVFFPFFFRWWLQVTSKVIFFWLLVLYLLQVAAIVLFCSTSSPHSIPLTEVIGPIWLMLLLGTVHCQIVSTRTPKPPLSTGGKRRRKLRKAAHLEVHREGDGSSTTDNTQEGAVQNHGTSTSHSVGTVFRDLWHAAFFLSGSKKAKNSIDKSTETDNGYVSLDGKKTVKSGEDGIQNHEPQCETIRPEETAWNTGTLRNGPSKDTQRTITNVSDEVSSEEGPETGYSLRRHVDRTSEGVLRNRKSHHYKKHYPNEDAPKSGTSCSSRCSSSRQDSESARPESETEDVLWEDLLHCAECHSSCTSETDVENHQINPCVKKEYRDDPFHQSHLPWLHSSHPGLEKISAIVWEGNDCKKADMSVLEISGMIMNRVNSHIPGIGYQIFGNAVSLILGLTPFVFRLSQATDLEQLTAHSASELYVIAFGSNEDVIVLSMVIISFVVRVSLVWIFFFLLCVAERTYKQRLLFAKLFGHLTSARRARKSEVPHFRLKKVQNIKMWLSLRSYLKRRGPQRSVDVIVSSAFLLTISVVFICCAQLLHVHEIFLDCHYNWELVIWCISLTLFLLRFVTLGSETSKKYSNTSILLTEQINLYLKMEKKPNKKEELTLVNNVLKLATKLLKELDSPFRLYGLTMNPLLYNITQVVILSAVSGVISDLLGFNLKLWKIKS

SEQ ID NO: 15490 - protein, 314 aa, Homo sapiens
MDAFKGGMSLERLPEGLRPPPPPPHDMGPAFHLARPADPREPLENSASESSDTELPEKERGGEPKGPEDSGAGGTGCGGADDPAKKKKQRRQRTHFTSQQLQELEATFQRNRYPDMSMREEIAVWTNLTEPRVRVWFKNRRAKWRKRERNQQLDLCKGGYVPQFSGLVQPYEDVYAAGYSYNNWAAKSLAPAPLSTKSFTFFNSMSPLSSQSMFSAPSSISSMTMPSSMGPGAVPGMPNSGLNNINNLTGSSLNSAMSPGACPYGTPASPYSVYRDTCNSSLASLRLKSKQHSSFGYGGLQGPASGLNACQYNS

SEQ ID NO: 15491 - protein, 317 aa, Homo sapiens
METNCRKLVSACVQLGVQPAAVECLFSKDSEIKKVEFTDSPESRKEAASSKFFPRQHPGANEKDKSQQGKNEDVGAEDPSKKKRQRRQRTHFTSQQLQELEATFQRNRYPDMSTREEIAVWTNLTEARVRVWFKNRRAKWRKRERNQQAELCKNGFGPQFNGLMQPYDDMYPGYSYNNWAAKGLTSASLSTKSFPFFNSMNVNPLSSQSMFSPPNSISSMSMSSSMVPSAVTGVPGSSLNSLNNLNNLSSPSLNSAVPTPACPYAPPTPPYVYRDTCNSSLASLRLKAKQHSSFGYASVQNPASNLSACQYAVDRPV

SEQ ID NO: 15492 - protein, 302 aa, Homo sapiens
MEFGLLSEAEARSPALSLSDAGTPHPQLPEHGCKGQEHSDSEKASASLPGGSPEDGSLKKKQRRQRTHFTSQQLQELEATFQRNRYPDMSTREEIAVWTNLTEARVRVWFKNRRAKWRKRERSQQAELCKGSFAAPLGGLVPPYEEVYPGYSYGNWPPKALAPPLAAKTFPFAFNSVNVGPLASQPVFSPPSSIAASMVPSAAAAPGTVPGPGALQGLGGGPPGLAPAAVSSGAVSCPYASAAAAAAAAASSPYVYRDPCNSSLASLRLKAKQHASFSYPAVHGPPPAANLSPCQYAVERPV

SEQ ID NO: 15493 - protein, 436 aa, Homo sapiens
MMATQTLSIDSYQDGQQMQVVTELKTEQDPNCSEPDAEGVSPPPVESQTPMDVDKQAIYRHPLFPLLALLFEKCEQSTQGSEGTTSASFDVDIENFVRKQEKEGKPFFCEDPETDNLMVKAIQVLRIHLLELEKVNELCKDFCSRYIACLKTKMNSETLLSGEPGSPYSPVQSQQIQSAITGTISPQGIVVPASALQQGNVAMATVAGGTVYQPVTVVTPQGQVVTQTLSPGTIRIQNSQLQLQLNQDLSILHQDDGSSKNKRGVLPKHATNVMRSWLFQHIGHPYPTEDEKKQIAAQTNLTLLQVNNWFINARRRILQPMLDSSCSETPKTKKKTAQNRPVQRFWPDSIASGVAQPPPSELTMSEGAVVTITTPVNMNVDSLQSLSSDGATLAVQQVMMAGQSEDESVDSTEEDAGALAPAHISGLVLENSDSLQ

SEQ ID NO: 15494 - protein, 472 aa, Homo sapiens
MMQHASPAPALTMMATQNVPPPPYQDSPQMTATAQPPSKAQAVHISAPSAAASTPVPSAPIDPQAQLEADKRAVYRHPLFPLLTLLFEKCEQATQGSECITSASFDVDIENFVHQQEQEHKPFFSDDPELDNLMVKAIQVLRIHLLELEKVNELCKDFCNRYITCLKTKMHSDNLLRNDLGGPYSPNQPSINLHSQDLLQNSPNSMSGVSNNPQGIVVPASALQQGNIAMTTVNSQVVSGGALYQPVTMVTSQGQVVTQAIPQGAIQIQNTQVNLDLTSLLDNEDKKSKNKRGVLPKHATNIMRSWLFQHLMHPYPTEDEKRQIAAQTNLTLLQVNNWFINARRRILQPMLDASNPDPAPKAKKIKSQHRPTQRFWPNSIAAGVLQQQGGAPGTNPDGSINLDNLQSLSSDSATMAMQQAMMAAHDDSLDGTEEEDEDEMEEEEEEELEEEVDELQTTNVSDLGLEHSDSLE

SEQ ID NO: 15495 - protein, 500 aa, Homo sapiens
MATVIPGDLSEVRDTQKVPSGKRKRGETKPRKNFPCQLCDKAFNSVEKLKVHSYSHTGERPYKCIQQDCTKAFVSKYKLQRHMATHSPEKTHKCNYCEKMFHRKDHLKNHLHTHDPNKETFKCEECGKNYNTKLGFKRHLALHAATSGDLTCKVCLQTFESTGVLLEHLKSHAGKSSGGVKEKKHQCEHCDRRFYTRKDVRRHMVVHTGRKDFLCQYCAQRFGRKDHLTRHMKKSHNQELLKVKTEPVDFLDPFTCNVSVPIKDELLPVMSLPSSELLSKPFTNTLQLNLYNTPFQSMQSSGSAHQMITTLPLGMTCPIDMDTVHPSHHLSFKYPFSSTSYAISIPEKEQPLKGEIESYLMELQGGVPSSSQDSQASSSSKLGLDPQIGSLDDGAGDLSLSKSSISISDPLNTPALDFSQLFNFIPLNGPPYNPLSVGSLGMSYSQEEAHSSVSQLPPQTQDLQDPANTIGLGSLHSLSAAFTSSLSTSTTLPRFHQAFQ

SEQ ID NO: 15496 - protein, 463 aa, Homo sapiens
MATFPCQLCGKTFLTLEKFTIHNYSHSRERPYKCVQPDCGKAFVSRYKLMRHMATHSPQKSHQCAHCEKTFNRKDHLKNHLQTHDPNKMAFGCEECGKKYNTMLGYKRHLALHAASSGDLTCGVCALELGSTEVLLDHLKAHAEEKPPSGTKEKKHQCDHCERCFYTRKDVRRHLVVHTGCKDFLCQFCAQRFGRKDHLTRHTKKTHSQELMKESLQTGDLLSTFHTISPSFQLKAAALPPFPLGASAQNGLASSLPAEVHSLTLSPPEQAAQPMQPLPESLASLHPSVSPGSPPPPLPNHKYNTTSTSYSPLASLPLKADTKGFCNISLFEDLPLQEPQSPQKLNPGFDLAKGNAGKVNLPKELPADAVNLTIPASLDLSPLLGFWQLPPPATQNTFGNSTLALGPGESLPHRLSCLGQQQQEPPLAMGTVSLGQLPLPPIPHVFSAGTGSAILPHFHHAFR

SEQ ID NO: 15497 - protein, 496 aa, Homo sapiens
MTTFFTSVPPWIQDAKQEEEVGWKLVPRPRGREAESQVKCQCEISGTPFSNGEKLRPHSLPQPEQRPYSCPQLHCGKAFASKYKLYRHMATHSAQKPHQCMYCDKMFHRKDHLRNHLQTHDPNKEALHCSECGKNYNTKLGYRRHLAMHAASSGDLSCKVCLQTFESTQALLEHLKAHSRRVAGGAKEKKHPCDHCDRRFYTRKDVRRHLVVHTGRKDFLCQYCAQRFGRKDHLTRHVKKSHSQELLKIKTEPVDMLGLLSCSSTVSVKEELSPVLCMASRDVMGTKAFPGMLPMGMYGAHIPTMPSTGVPHSLVHNTLPMGMSYPLESSPISSPAQLPPKYQLGSTSYLPDKLPKVEVDSFLAELPGSLSLSSAEPQPASPQPAAAAALLDEALLAKSPANLSEALCAANVDFSHLLGFLPLNLPPCNPPGATGGLVMGYSQAEAQPLLTTLQAQPQDSPGAGGPLNFGPLHSLPPVFTSGLSSTTLPRFHQAFQ

SEQ ID NO: 15498 - protein, 350 aa, Homo sapiens
MEPKRIREGYLVKKGSVFNTWKPMWVVLLEDGIEFYKKKSDNSPKGMIPLKGSTLTSPCQDFGKRMFVFKITTTKQQDHFFQAAFLEERDAWVRDIKKAIKCIEGGQKFARKSTRRSIRLPETIDLGALYLSMKDTEKGIKELNLEKDKKIFNHCFTGNCVIDWLVSNQSVRNRQEGLMIASSLLNEGYLQPAGDMSKSAVDGTAENPFLDNPDAFYYFPDSGFFCEENSSDDDVILKEEFRGVIIKQGCLLKQGHRRKNWKVRKFILREDPAYLHYYDPAGAEDPLGAIHLRGCVVTSVESNSNGRKSEEENLFEIITADEVHYFLQAATPKERTEWIRAIQMASRTGK

SEQ ID NO: 15499 - protein, 673 aa, Homo sapiens
MDLTKMGMIQLQNPSHPTGLLCKANQMRLAGTLCDVVIMVDSQEFHAHRTVLACTSKMFEILFHRNSQHYTLDFLSPKTFQQILEYAYTATLQAKAEDLDDLLYAAEILEIEYLEEQCLKMLETIQASDDNDTEATMADGGAEEEEDRKARYLKNIFISKHSSEESGYASVAGQSLPGPMVDQSPSVSTSFGLSAMSPTKAAVDSLMTIGQSLLQGTLQPPAGPEEPTLAGGGRHPGVAEVKTEMMQVDEVPSQDSPGAAESSISGGMGDKVEERGKEGPGTPTRSSVITSARELHYGREESAEQVPPPAEAGQAPTGRPEHPAPPPEKHLGIYSVLPNHKADAVLSMPSSVTSGLHVQPALAVSMDFSTYGGLLPQGFIQRELFSKLGELAVGMKSESRTIGEQCSVCGVELPDNEAVEQHRKLHSGMKTYGCELCGKRFLDSLRLRMHLLAHSAGAKAFVCDQCGAQFSKEDALETHRQTHTGTDMAVFCLLCGKRFQAQSALQQHMEVHAGVRSYICSECNRTFPSHTALKRHLRSHTGDHPYECEFCGSCFRDESTLKSHKRIHTGEKPYECNGCGKKFSLKHQLETHYRVHTGEKPFECKLCHQRSRDYSAMIKHLRTHNGASPYQCTICTEYCPSLSSMQKHMKGHKPEEIPPDWRIEKTYLYLCYV

SEQ ID NO: 15500 - protein, 1410 aa, Homo sapiens
MADTDLFMECEEEELEPWQKISDVIEDSVVEDYNSVDKTTTVSVSQQPVSAPVPIAAHASVAGHLSTSTTVSSSGAQNSDSTKKTLVTLIANNNAGNPLVQQGGQPLILTQNPAPGLGTMVTQPVLRPVQVMQNANHVTSSPVASQPIFITTQGFPVRNVRPVQNAMNQVGIVLNVQQGQTVRPITLVPAPGTQFVKPTVGVPQVFSQMTPVRPGSTMPVRPTTNTFTTVIPATLTIRSTVPQSQSQQTKSTPSTSTTPTATQPTSLGQLAVQSPGQSNQTTNPKLAPSFPSPPAVSIASFVTVKRPGVTGENSNEVAKLVNTLNTIPSLGQSPGPVVVSNNSSAHGSQRTSGPESSMKVTSSIPVFDLQDGGRKICPRCNAQFRVTEALRGHMCYCCPEMVEYQKKGKSLDSEPSVPSAAKPPSPEKTAPVASTPSSTPIPALSPPTKVPEPNENVGDAVQTKLIMLVDDFYYGRDGGKVAQLTNFPKVATSFRCPHCTKRLKNNIRFMNHMKHHVELDQQNGEVDGHTICQHCYRQFSTPFQLQCHLENVHSPYESTTKCKICEWAFESEPLFLQHMKDTHKPGEMPYVCQVCQYRSSLYSEVDVHFRMIHEDTRHLLCPYCLKVFKNGNAFQQHYMRHQKRNVYHCNKCRLQFLFAKDKIEHKLQHHKTFRKPKQLEGLKPGTKVTIRASRGQPRTVPVSSNDTPPSALQEAAPLTSSMDPLPVFLYPPVQRSIQKRAVRKMSVMGRQTCLECSFEIPDFPNHFPTYVHCSLCRYSTCCSRAYANHMINNHVPRKSPKYLALFKNSVSGIKLACTSCTFVTSVGDAMAKHLVFNPSHRSSSILPRGLTWIAHSRHGQTRDRVHDRNVKNMYPPPSFPTNKAATVKSAGATPAEPEELLTPLAPALPSPASTATPPPTPTHPQALALPPLATEGAECLNVDDQDEGSPVTQEPELASGGGGSGGVGKKEQLSVKKLRVVLFALCCNTEQAAEHFRNPQRRIRRWLRRFQASQGENLEGKYLSFEAEEKLAEWVLTQREQQLPVNEETLFQKATKIGRSLEGGFKISYEWAVRFMLRHHLTPHARRAVAHTLPKDVAENAGLFIDFVQRQIHNQDLPLSMIVAIDEISLFLDTEVLSSDDRKENALQTVGTGEPWCDVVLAILADGTVLPTLVFYRGQMDQPANMPDSILLEAKESGYSDDEIMELWSTRVWQKHTACQRSKGMLVMDCHRTHLSEEVLAMLSASSTLPAVVPAGCSSKIQPLDVCIKRTVKNFLHKKWKEQAREMADTACDSDVLLQLVLVWLGEVLGVIGDCPELVQRSFLVASVLPGPDGNINSPTRNADMQEELIASLEEQLKLSGEHSESSTPRPRSSPEETIEPESLHQLFEGESETESFYGFEEADLDLMEI

SEQ ID NO: 15501 - protein, 291 aa, Homo sapiens
MSCQAFTSADTFIPLNSDASATLPLIMHHSAAECLPVSNHATNVMSTATGLHYSVPSCHYGNQPSTYGVMAGSLTPCLYKFPDHTLSHGFPPIHQPLLAEDPTAADFKQELRRKSKLVEEPIDMDSPEIRELEKFANEFKVRRIKLGYTQTNVGEALAAVHGSEFSQTTICRFENLQLSFKNACKLKAILSKWLEEAEQVGALYNEKVGANERKRKRRTTISIAAKDALERHFGEQNKPSSQEIMRMAEELNLEKEVVRVWFCNRRQREKRVKTSLNQSLFSISKEHLECR

SEQ ID NO: 15502 - protein, 256 aa, Homo sapiens
MLWQKPTAPEQAPAPARPYQGVRVKEPVKELLRRKRGHASSGAAPAPTAVVLPHQPLATYTTVGPSCLDMEGSVSAVTEEAALCAGWLSQPTPATLQPLAPWTPYTEYVPHEAVSCPYSADMYVQPVCPSYTVVGPSSVLTYASPPLITNVTTRSSATPAVGPPLEGPEHQAPLTYFPWPQPLSTLPTSTLQYQPPAPALPGPQFVQLPISIPEPVLQDMEDPRRAASSLTIDKLLLEEEDSDAYALNHTLSVEGF

SEQ ID NO: 15503 - protein, 743 aa, Homo sapiens
MNNPSETSKPSMESGDGNTGTQTNGLDFQKQPVPVGGAISTAQAQAFLGHLHQVQLAGTSLQAAAQSLNVQSKSNEESGDSQQPSQPSQQPSVQAAIPQTQLMLAGGQITGLTLTPAQQQLLLQQAQAQAQLLAAAVQQHSASQQHSAAGATISASAATPMTQIPLSQPIQIAQDLQQLQQLQQQNLNLQQFVLVHPTTNLQPAQFIISQTPQGQQGLLQAQNLLTQLPQQSQANLLQSQPSITLTSQPATPTRTIAATPIQTLPQSQSTPKRIDTPSLEEPSDLEELEQFAKTFKQRRIKLGFTQGDVGLAMGKLYGNDFSQTTISRFEALNLSFKNMCKLKPLLEKWLNDAENLSSDSSLSSPSALNSPGIEGLSRRRKKRTSIETNIRVALEKSFLENQKPTSEEITMIADQLNMEKEVIRVWFCNRRQKEKRINPPSSGGTSSSPIKAIFPSPTSLVATTPSLVTSSAATTLTVSPVLPLTSAAVTNLSVTGTSDTTSNNTATVISTAPPASSAVTSPSLSPSPSASASTSEASSASETSTTQTTSTPLSSPLGTSQVMVTASGLQTAAAAALQGAAQLPANASLAAMAAAAGLNPSLMAPSQFAAGGALLSLNPGTLSGALSPALMSNSTLATIQALASGGSLPITSLDATGNLVFANAGGAPNIVTAPLFLNPQNLSLLTSNPVSLVSAAAASAGNSAPVASLHATSTSAESIQNSLFTVASASGAASTTTTASKAQ

SEQ ID NO: 15504 - protein, 479 aa, Homo sapiens
MVHSSMGAPEIRMSKPLEAEKQGLDSPSEHTDTERNGPDTNHQNPQNKTSPFSVSPTGPSTKIKAEDPSGDSAPAAPLPPQPAQPHLPQAQLMLTGSQLAGDIQQLLQLQQLVLVPGHHLQPPAQFLLPQAQQSQPGLLPTPNLFQLPQQTQGALLTSQPRAGLPTQAVTRPTLPDPHLSHPQPPKCLEPPSHPEEPSDLEELEQFARTFKQRRIKLGFTQGDVGLAMGKLYGNDFSQTTISRFEALNLSFKNMCKLKPLLEKWLNDAETMSVDSSLPSPNQLSSPSLGFDGLPGRRRKKRTSIETNVRFALEKSFLANQKPTSEEILLIAEQLHMEKEVIRVWFCNRRQKEKRINPCSAAPMLPSPGKPASYSPHMVTPQGGAGTLPLSQASSSLSTTVTTLSSAVGTLHPSRTAGGGGGGGGAAPPLNSIPSVTPPPPATTNSTNPSPQGSHSAIGLSGLNPSTGPGLWWNPAPYQP

SEQ ID NO: 15505 - protein, 436 aa, Homo sapiens
MVNLESMHTDIKMSGDVADSTDARSTLSQVEPGNDRNGLDFNRQIKTEDLSDSLQQTLSHRPCHLSQGPAMMSGNQMSGLNASPCQDMASLHPLQQLVLVPGHLQSVSQFLLSQTQPGQQGLQPNLLPFPQQQSGLLLPQTGPGLASQAFGHPGLPGSSLEPHLEASQHLPVPKHLPSSGGADEPSDLEELEKFAKTFKQRRIKLGFTQGDVGLAMGKLYGNDFSQTTISRFEALNLSFKNMCKLKPLLEKWLNDAESSPSDPSVSTPSSYPSLSEVFGRKRKKRTSIETNIRLTLEKRFQDNPKPSSEEISMIAEQLSMEKEVVRVWFCNRRQKEKRINCPVATPIKPPVYNSRLVSPSGSLGPLSVPPVHSTMPGTVTSSCSPGNNSRPSSPGSGLHASSPTASQNNSKAAVNSASSFNSSGSWYRWNHSTYLH

SEQ ID NO: 15506 - protein, 451 aa, Homo sapiens
MATTAQYLPRGPGGGAGGTGPLMHPDAAAAAAAAAAAERLHAGAAYREVQKLMHHEWLGAGAGHPVGLAHPQWLPTGGGGGGDWAGGPHLEHGKAGGGGTGRADDGGGGGGFHARLVHQGAAHAGAAWAQGSTAHHLGPAMSPSPGASGGHQPQPLGLYAQAAYPGGGGGGLAGMLAAGGGGAGPGLHHALHEDGHEAQLEPSPPPHLGAHGHAHGHAHAGGLHAAAAHLHPGAGGGGSSVGEHSDEDAPSSDDLEQFAKQFKQRRIKLGFTQADVGLALGTLYGNVFSQTTICRFEALQLSFKNMCKLKPLLNKWLEETDSSSGSPTNLDKIAAQGRKRKKRTSIEVGVKGALESHFLKCPKPSAHEITGLADSLQLEKEVVRVWFCNRRQKEKRMTPAAGAGHPPMDDVYAPGELGPGGGGASPPSAPPPPPPAALHHHHHHTLPGSVQ

SEQ ID NO: 15507 - protein, 443 aa, Homo sapiens
MATAASNHYSLLTSSASIVHAEPPGGMQQGAGGYREAQSLVQGDYGALQSNGHPLSHAHQWITALSHGGGGGGGGGGGGGGGGGGGGGDGSPWSTSPLGQPDIKPSVVVQQGGRGDELHGPGALQQQHQQQQQQQQQQQQQQQQQQQQQRPPHLVHHAANHHPGPGAWRSAAAAAHLPPSMGASNGGLLYSQPSFTVNGMLGAGGQPAGLHHHGLRDAHDEPHHADHHPHPHSHPHQQPPPPPPPQGPPGHPGAHHDPHSDEDTPTSDDLEQFAKQFKQRRIKLGFTQADVGLALGTLYGNVFSQTTICRFEALQLSFKNMCKLKPLLNKWLEEADSSSGSPTSIDKIAAQGRKRKKRTSIEVSVKGALESHFLKCPKPSAQEITSLADSLQLEKEVVRVWFCNRRQKEKRMTPPGGTLPGAEDVYGGSRDTPPHHGVQTPVQ

SEQ ID NO: 15508 - protein, 500 aa, Homo sapiens
MATAASNPYLPGNSLLAAGSIVHSDAAGAGGGGGGGGGGGGGGAGGGGGGMQPGSAAVTSGAYRGDPSSVKMVQSDFMQGAMAASNGGHMLSHAHQWVTALPHAAAAAAAAAAAAVEASSPWSGSAVGMAGSPQQPPQPPPPPPQGPDVKGGAGRDDLHAGTALHHRGPPHLGPPPPPPHQGHPGGWGAAAAAAAAAAAAAAAAHLPSMAGGQQPPPQSLLYSQPGGFTVNGMLSAPPGPGGGGGGAGGGAQSLVHPGLVRGDTPELAEHHHHHHHHAHPHPPHPHHAQGPPHHGGGGGGAGPGLNSHDPHSDEDTPTSDDLEQFAKQFKQRRIKLGFTQADVGLALGTLYGNVFSQTTICRFEALQLSFKNMCKLKPLLNKWLEEADSSTGSPTSIDKIAAQGRKRKKRTSIEVSVKGALESHFLKCPKPSAQEITNLADSLQLEKEVVRVWFCNRRQKEKRMTPPGIQQQTPDDVYSQVGTVSADTPPPHHGLQTSVQ

SEQ ID NO: 15509 - protein, 361 aa, Homo sapiens
MATAASNPYSILSSTSLVHADSAGMQQGSPFRNPQKLLQSDYLQGVPSNGHPLGHHWVTSLSDGGPWSSTLATSPLDQQDVKPGREDLQLGAIIHHRSPHVAHHSPHTNHPNAWGASPAPNPSITSSGQPLNVYSQPGFTVSGMLEHGGLTPPPAAASAQSLHPVLREPPDHGELGSHHCQDHSDEETPTSDELEQFAKQFKQRRIKLGFTQADVGLALGTLYGNVFSQTTICRFEGLQLSFKNMCKLKPLLNKWLEEADSSTGSPTSIDKIAAQGRKRKKRTSIEVSVKGVLETHFLKCPKPAAQEISSLADSLQLEKEVVRVWFCNRRQKEKRMTPPGDQQPHEVYSHTVKTDTSCHDL

SEQ ID NO: 15510 - protein, 419 aa, Homo sapiens
MMSMNSKQPHFAMHPTLPEHKYPSLHSSSEAIRRACLPTPPLQSNLFASLDETLLARAEALAAVDIAVSQGKSHPFKPDATYHTMNSVPCTSTSTVPLAHHHHHHHHHQALEPGDLLDHISSPSLALMAGAGGAGAAAGGGGAHDGPGGGGGPGGGGGPGGGPGGGGGGGPGGGGGGPGGGLLGGSAHPHPHMHSLGHLSHPAAAAAMNMPSGLPHPGLVAAAAHHGAAAAAAAAAAGQVAAASAAAAVVGAAGLASICDSDTDPRELEAFAERFKQRRIKLGVTQADVGSALANLKIPGVGSLSQSTICRFESLTLSHNNMIALKPILQAWLEEAEGAQREKMNKPELFNGGEKKRKRTSIAAPEKRSLEAYFAVQPRPSSEKIAAIAEKLDLKKNVVRVWFCNQRQKQKRMKFSATY

SEQ ID NO: 15511 - protein, 409 aa, Homo sapiens
MMMMSLNSKQAFSMPHGGSLHVEPKYSALHSTSPGSSAPIAPSASSPSSSSNAGGGGGGGGGGGGGGGRSSSSSSSGSSGGGGSEAMRRACLPTPPSNIFGGLDESLLARAEALAAVDIVSQSKSHHHHPPHHSPFKPDATYHTMNTIPCTSAASSSSVPISHPSALAGTHHHHHHHHHHHHQPHQALEGELLEHLSPGLALGAMAGPDGAVVSTPAHAPHMATMNPMHQAALSMAHAHGLPSHMGCMSDVDADPRDLEAFAERFKQRRIKLGVTQADVGSALANLKIPGVGSLSQSTICRFESLTLSHNNMIALKPILQAWLEEAEKSHREKLTKPELFNGAEKKRKRTSIAAPEKRSLEAYFAIQPRPSSEKIAAIAEKLDLKKNVVRVWFCNQRQKQKRMKYSAGI

SEQ ID NO: 15512 - protein, 338 aa, Homo sapiens
MMAMNSKQPFGMHPVLQEPKFSSLHSGSEAMRRVCLPAPQLQGNIFGSFDESLLARAEALAAVDIVSHGKNHPFKPDATYHTMSSVPCTSTSSTVPISHPAALTSHPHHAVHQGLEGDLLEHISPTLSVSGLGAPEHSVMPAQIHPHHLGAMGHLHQAMGMSHPHTVAPHSAMPACLSDVESDPRELEAFAERFKQRRIKLGVTQADVGAALANLKIPGVGSLSQSTICRFESLTLSHNNMIALKPVLQAWLEEAEAAYREKNSKPELFNGSERKRKRTSIAAPEKRSLEAYFAIQPRPSSEKIAAIAEKLDLKKNVVRVWFCNQRQKQKRMKYSAVH

SEQ ID NO: 15513 - protein, 360 aa, Homo sapiens
MAGHLASDFAFSPPPGGGGDGPGGPEPGWVDPRTWLSFQGPPGGPGIGPGVGPGSEVWGIPPCPPPYEFCGGMAYCGPQVGVGLVPQGGLETSQPEGEAGVGVESNSDGASPEPCTVTPGAVKLEKEKLEQNPEESQDIKALQKELEQFAKLLKQKRITLGYTQADVGLTLGVLFGKVFSQTTICRFEALQLSFKNMCKLRPLLQKWVEEADNNENLQEICKAETLVQARKRKRTSIENRVRGNLENLFLQCPKPTLQQISHIAQQLGLEKDVVRVWFCNRRQKGKRSSSDYAQREDFEAAGSPFSGGPVSFPLAPGPHFGTPGYGSPHFTALYSSVPFPEGEAFPPVSVTTLGSPMHSN

SEQ ID NO: 15514 - protein, 359 aa, Homo sapiens
MAGHLASDFAFSPPPGGGGDGPWGAEPGWVDPLTWLSFQGPPGGPGIGPGVGPGSEVWGIPPCPPPYELCGGMAYCGPQVGVGLVPQGGLETSQPESEAGVGVESNSNGASPEPCTVPPGAVKLEKEKLEQNPEKSQDIKALQKELEQFAKLLKQKRITLGYTQADVGLILGVLFGKVFSQKTICRFEALQLSFKNMCKLRPLLQKWVEEADNNENLQEICKAETLMQARKRKRTSIENRVRGNLENLFLQCPKPTLQISHIAQQLGLEKDVVRVWFCNRRQKGKRSSSDYAQREDFEAAGSPFSGGPVSFPPAPGPHFGTPGYGSPHFTALYSSVPFPEGEVFPPVSVITLGSPMHSN

SEQ ID NO: 15515 - protein, 328 aa, Homo sapiens
MAGHRPSNHFCPLPGSGGGGPRGPMPLRVDTLTWLSTQAAPGRVMVWPAVRPGICPGPDVWRIPLGPLPHEFRGWIAPCRPRLGASEAGDWLRRPSEGALPGPYIALRSIPKLPPPEDISGILKELQQLAKELRQKRLSLGYSQADVGIAVGALFGKVLSQTTICRFEAQQLSVANMWKLRPLLKKWLKEVEAENLLGLCKMEMILQQSGKWRRASRERRIGNSLEKFFQRCPKPTPQQISHIAGCLQLQKDVVRVWFYNRSKMGSRPTNDASPREIVGTAGPPCPGAPVCFHLGLGLPVDIPHYTRLYSAGVAHSSAPATTLGLLRF

SEQ ID NO: 15516 - protein, 301 aa, Homo sapiens
MPGISSQILTNAQGQVIGTLPWVVNSASVAAPAPAQSLQVQAVTPQLLLNAQGQVIATLASSPLPPPVAVRKPSTPESPAKSEVQPIQPTPTVPQPAVVIASPAPAAKPSASAPIPITCSETPTVSQLVSKPHTPSLDEDGINLEEIREFAKNFKIRRLSLGLTQTQVGQALTATEGPAYSQSAICRFEKLDITPKSAQKLKPVLEKWLNEAELRNQEGQQNLMEFVGGEPSKKRKRRTSFTPQAIEALNAYFEKNPLPTGQEITEIAKELNYDREVVRVWFCNRRQTLKNTSKLNVFQIP

SEQ ID NO: 15517 - protein, 691 aa, Homo sapiens
MSALLQDPMIAGQVSKPLLSVRSEMNAELRGEDKAATSDSELNEPLLAPVESNDSEDTPSKLFGARGNPALSDPGTPDQHQASQTHPPFPVGPQPLLTAQQLASAVAGVMPGGPPALNQPILIPFNMAGQLGGQQGLVLTLPTANLTNIQGLVAAAAAGGIMTLPLQNLQATSSLNSQLQQLQLQLQQQQQQQQQQPPPSTNQHPQPAPQAPSQSQQQPLQPTPPQQPPPASQQPPAPTSQLQQAPQPQQHQPHSHSQNQNQPSPTQQSSSPPQKPSQSPGHGLPSPLTPPNPLQLVNNPLASQAAAAAAAMSSIASSQAFGNALSSLQGVTGQLVTNAQGQIIGTIPLMPNPGPSSQAASGTQGLQVQPITPQLLTNAQGQIIATVIGNQILPVINTQGITLSPIKPGQQLHQPSQTSVGQAASQGNLLHLAHSQASMSQSPVRQASSSSSSSSSSSALSVGQLVSNPQTAAGEVDGVNLEEIREFAKAFKIRRLSLGLTQTQVGQALSATEGPAYSQSAICRHTILRSHFFLPQEAQENTIASSLTAKLNPGLLYPARFEKLDITPKSAQKIKPVLERWMAEAEARHRAGMQNLTEFIGSEPSKKRKRRTSFTPQALEILNAHFEKNTHPSGQEMTEIAEKLNYDREVVRVWFCNKRQALKNTIKRLKQHEPATAVPLEPLTDSLEENS

SEQ ID NO: 15518 - protein, 468 aa, Homo sapiens
MVDTESPLCPLSPLEAGDLESPLSEEFLQEMGNIQEISQSIGEDSSGSFGFTEYQYLGSCPGSDGSVITDTLSPASSPSSVTYPVVPGSVDESPSGALNIECRICGDKASGYHYGVHACEGCKGFFRRTIRLKLVYDKCDRSCKIQKKNRNKCQYCRFHKCLSVGMSHNAIRFGRMPRSEKAKLKAEILTCEHDIEDSETADLKSLAKRIYEAYLKNFNMNKVKARVILSGKASNNPPFVIHDMETLCMAEKTLVAKLVANGIQNKEAEVRIFHCCQCTSVETVTELTEFAKAIPGFANLDLNDQVTLLKYGVYEAIFAMLSSVMNKDGMLVAYGNGFITREFLKSLRKPFCDIMEPKFDFAMKFNALELDDSDISLFVAAIICCGDRPGLLNVGHIEKMQEGIVHVLRLHLQSNHPDDIFLFPKLLQKMADLRQLVTEHAQLVQIIKKTESDAALHPLLQEIYRDMY

SEQ ID NO: 15519 - protein, 441 aa, Homo sapiens
MEQPQEEAPEVREEEEKEEVAEAEGAPELNGGPQHALPSSSYTDLSRSSSPPSLLDQLQMGCDGASCGSLNMECRVCGDKASGFHYGVHACEGCKGFFRRTIRMKLEYEKCERSCKIQKKNRNKCQYCRFQKCLALGMSHNAIRFGRMPEAEKRKLVAGLTANEGSQYNPQVADLKAFSKHIYNAYLKNFNMTKKKARSILTGKASHTAPFVIHDIETLWQAEKGLVWKQLVNGLPPYKEISVHVFYRCQCTTVETVRELTEFAKSIPSFSSLFLNDQVTLLKYGVHEAIFAMLASIVNKDGLLVANGSGFVTREFLRSLRKPFSDIIEPKFEFAVKFNALELDDSDLALFIAAIILCGDRPGLMNVPRVEAIQDTILRALEFHLQANHPDAQYLFPKLLQKMADLRQLVTEHAQMMQRIKKTETETSLHPLLQEIYKDMY

SEQ ID NO: 15520 - protein, 505 aa, Homo sapiens
MGETLGDSPIDPESDSFTDTLSANISQEMTMVDTEMPFWPTNFGISSVDLSVMEDHSHSFDIKPFTTVDFSSISTPHYEDIPFTRTDPVVADYKYDLKLQEYQSAIKVEPASPPYYSEKTQLYNKPHEEPSNSLMAIECRVCGDKASGFHYGVHACEGCKGFFRRTIRLKLIYDRCDLNCRIHKKSRNKCQYCRFQKCLAVGMSHNAIRFGRMPQAEKEKLLAEISSDIDQLNPESADLRALAKHLYDSYIKSFPLTKAKARAILTGKTTDKSPFVIYDMNSLMMGEDKIKFKHITPLQEQSKEVAIRIFQGCQFRSVEAVQEITEYAKSIPGFVNLDLNDQVTLLKYGVHEIIYTMLASLMNKDGVLISEGQGFMTREFLKSLRKPFGDFMEPKFEFAVKFNALELDDSDLAIFIAVIILSGDRPGLLNVKPIEDIQDNLLQALELQLKLNHPESSQLFAKLLQKMTDLRQIVTEHVQLLQVIKKTETDMSLHPLLQEIYKDLY

SEQ ID NO: 15521 - protein, 828 aa, Homo sapiens
MDSEAFQSARDFLDMNFQSLAMKHMDLKQMELDTAAAKVDELTKQLESLWSDSPAPPGPQAGPPSRPPRYSSSSIPEPFGSRGSPRKAATDGADTPFGRSESAPTLHPYSPLSPKGRPSSPRTPLYLQPDAYGSLDRATSPRPRAFDGAGSSLGRAPSPRPGPGPLRQQGPPTPFDFLGRAGSPRGSPLAEGPQAFFPERGPSPRPPATAYDAPASAFGSSLLGSGGSAFAPPLRAQDDLTLRRRPPKAWNESDLDVAYEKKPSQTASYERLDVFARPASPSLQLLPWRESSLDGLGGTGKDNLTSATLPRNYKVSPLASDRRSDAGSYRRSLGSAGPSGTLPRSWQPVSRIPMPPSSPQPRGAPRQRPIPLSMIFKLQNAFWEHGASRAMLPGSPLFTRAPPPKLQPQPQPQPQPQSQPQPQLPPQPQTQPQTPTPAPQHPQQTWPPVNEGPPKPPTELEPEPEIEGLLTPVLEAGDVDEGPVARPLSPTRLQPALPPEAQSVPELEEVARVLAEIPRPLKRRGSMEQAPAVALPPTHKKQYQQIISRLFHRHGGPGPGGPEPELSPITEGSEARAGPPAPAPPAPIPPPAPSQSSPPEQPQSMEMRSVLRKAGSPRKARRARLNPLVLLLDAALTGELEVVQQAVKEMNDPSQPNEEGITALHNAICGANYSIVDFLITAGANVNSPDSHGWTPLHCAASCNDTVICMALVQHGAAIFATTLSDGATAFEKCDPYREGYADCATYLADVEQSMGLMNSGAVYALWDYSAEFGDELSFREGESVTVLRRDGPEETDWWWAALHGQEGYVPRNYFGLFPRVKPQRSKV

SEQ ID NO: 15522 - protein, 825 aa, Homo sapiens; identical to SEQ ID NO: 14803

SEQ ID NO: 15523 - protein, 1147 aa, Homo sapiens
MDSKDESSHVWPTSAEHEQNAAQVHFVPDTGTVAQIVYTDDQVRPPQQVVYTADGASYTSVDGPEHTLVYIHPVEAAQTLFTDPGQVAYVQQDATAQQASLPVHNQVLPSIESVDGSDPLATLQTPLGRLEAKEEEDEDEDEDTEEDEEEDGEDTDLDDWEPDPPRPFDPHDLWCEECNNAHASVCPKHGPLHPIPNRPVLTRARASLPLVLYIDRFLGGVFSKRRIPKRTQFGPVEGPLVRGSELKDCYIHLKVSLDKGDRKERDLHEDLWFELSDETLCNWMMFVRPAQNHLEQNLVAYQYGHHVYYTTIKNVEPKQELKVWYAASYAEFVNQKIHDISEEERKVLREQEKNWPCYECNRRFISSEQLQQHLNSHDEKLDVFSRTRGRGRGRGKRRFGPGRRPGRPPKFIRLEITSENGEKSDDGTQDLLHFPTKEQFDEAEPATLNGLDQPEQTTIPIPQLPQETQSSLEHEPETHTLHLQPQHEESVVPTQSTLTADDMRRAKRIRLELQNAALQHLFIRKSFRPFKCLQCGKAFREKDKLDQHLRFHGREGNCPLTCDLCNKGFISSTSLESHMKLHSDQKTYSCIFCPESFDRLDLLKDHVAIHINDGYFTCPTCKKRFPDFIQVKKHVRSFHSEKIYQCTECDKAFCRPDKLRLHMLRHSDRKDFLCSTCGKQFKRKDKLREHMQRMHNPEREAKKADRISRSKTFKPRITSTDYDSFTFKCRLCMMGFRRRGMLVNHLSKRHPDMKIEEVPELTLPIIKPNRDYFCQYCDKVYKSASKRKAHILKNHPGAELPPSIRKLRPAGPGEPDPMLSTHTQLTGTIATPPVCCPHCSKQYSSKTKMVQHIRKKHPEFAQLSNTIHTPLTTAVISATPAVLTTDSATGETVVTTDLLTQAMTELSQTLTTDYRTPQGDYQRIQYIPVSQSASGLQQPQHIQLQVVQVASATSPHQSQQSTVDVGQLHDPQPYPQHAIQVQHIQVSGQPLSPSAQQAQQGLSPSHIQGSSSTQGQALQQQQQQQQNSSVQHTYLPSAWNSFRGYSSEIQMMTLPPGQFVITDSGVATPVTTGQVKAVTSGHYVLSESQSELEEKQTSALSGGVQVEPPAHSDSLDPQTNSQQQTTQYIITTTTNGNGSSEVHITKP

SEQ ID NO: 15524 - protein, 511 aa, Homo sapiens
MLKMAEPIASLMIVECRACLRCSPLFLYQREKDRMTENMKECLAQTNAAVGDMVTVVKTEVCSPLRDQEYGQPCSRRPDSSAMEVEPKKLKGKRDLIVPKSFQQVDFWFCESCQEYFVDECPNHGPPVFVSDTPVPVGIPDRAALTIPQGMEVVKDTSGESDVRCVNEVIPKGHIFGPYEGQISTQDKSAGFFSWLIVDKNNRYKSIDGSDETKANWMRYVVISREEREQNLLAFQHSERIYFRACRDIRPGEWLRVWYSEDYMKRLHSMSQETIHRNLARGEKRLQREKSEQVLDNPEDLRGPIHLSVLRQGKSPYKRGFDEGDVHPQAKKKKIDLIFKDVLEASLESAKVEAHQLALSTSLVIRKVPKYQDDAYSQCATTMTHGVQNIGQTQGEGDWKVPQGVSKEPGQLEDEEEEPSSFKADSPAEASLASDPHELPTTSFCPNCIRLKKKVRELQAELDMLKSGKLPEPPVLPPQVLELPEFSDPAGKLVWMRLLSEGRVRSGLCGG

SEQ ID NO: 15525 - protein, 367 aa, Homo sapiens; identical to SEQ ID NO: 10751

SEQ ID NO: 15526 - protein, 707 aa, Homo sapiens
MHGAARAPATSVSADCCIPAGLRLGPVPGTFKLGKYLSDRREPGPKKKVRMVRGELVDESGGSPLEWIGLIRAARNSQEQTLEAIADLPGGQIFYRALRDVQPGEELTVWYSNSLAQWFDIPTTATPTHDEKGEERYICWYCWRTFRYPNSLKAHLRFHCVFSGGGGGAFLHHEHAARQGAVPAADGLGLSPKPPAPDFAAPSQAGTLRPHPLGPPPVQACGAREGIKREASSAPSATSPTPGKWGQPKKGKEQLDRALDMSGAARGQGHFLGIVGGSSAGVGSLAFYPGVRSAFKPAGLARAAAAAHGDPYREESSSKQGAGLALGRLLGGGRACGRPGSGENSAAGGAGHHHHHHAHHHHHPKCLLAGDPPPPPPPGLPCSGALRGFPLLSVPPEEASAFKHVERAPPAAAALPGARYAQLPPAPGLPLERCALPPLDPGGLKAYPGGECSHLPAVMPAFTVYNGELLYGSPATTAYYPLKLHFGGLLKYPESISYFSGPAAAALSPAELGSLASIDREIAMHNQQLSEMAAGKGRGRLDSGTLPPAVAAAGGTGGGGSGGSGAGKPKTGHLCLYCGKLYSRKYGLKIHMRTHTGYKPLKCKVCLRPFGDPSNLNKHIRLHAEGNTPYRCEFCGKVLVRRRDLERHVKSRHPGQSLLAKAGDGPGAEPGYPPEPGDPKSDDSDVDVCFTDDQSDPEVGGGGERDL

SEQ ID NO: 15527 - protein, 571 aa, Homo sapiens
MALPRPSEAVPQDKVCYPPESSPQNLAAYYTPFPSYGHYRNSLATVEEDFQPFRQLEAAASAAPAMPPFPFRMAPPLLSPGLGLQREPLYDLPWYSKLPPWYPIPHVPREVPPFLSSSHEYAGASSEDLGHQIIGGDNESGPCCGPDTLIPPPPADASLLPEGLRTSQLLPCSPSKQSEDGPKPSNQEGKSPARFQFTEEDLHFVLYGVTPSLEHPASLHHAISGLLVPPDSSGSDSLPQTLDKDSLQLPEGLCLMQTVFGEVPHFGVFCSSFIAKGVRFGPFQGKVVNASEVKTYGDNSVMWEIFEDGHLSHFIDGKGGTGNWMSYVNCARFPKEQNLVAVQCQGHIFYESCKEIHQNQELLVWYGDCYEKFLDIPVSLQVTEPGKQPSGPSEESAEGYRCERCGKVFTYKYYRDKHLKYTPCVDKGDRKFPCSLCKRSFEKRDRLRIHILHVHEKHRPHKCSTCGKCFSQSSSLNKHMRVHSGDRPYQCVYCTKRFTASSILRTHIRQHSGEKPFKCKYCGKSFASHAAHDSHVRRSHKEDDGCSCSICGKIFSDQETFYSHMKFHEDY

SEQ ID NO: 15528 - protein, 1507 aa, Homo sapiens
MPRRRPPASGAAQFPERIATRSPDPIPLCTFQRQPRAAPVQPPCRLFFVTFAGCGHRWRSESKPGWISRSRSGIALRAARPPGSSPPRPAAPRPPPPGGVVAEAPGDVVIPRPRVQPMRVARGGPWTPNPAFREAESWSQIGNQRVSEQLLETSLGNEVSDTEPLSPASAGLRRNPALPPGPFAQNFSWGNQENLPPALGKIANGGGTGAGKAECGYETESHLLEPHEIPLNVNTHKFSDCEFPYEFCTVCFSPFKLLGMSGVEGVWNQHSRSASMHTFLNHSATGIREAGCRKDMPVSEMAEDGSEEIMFIWCEDCSQYHDSECPELGPVVMVKDSFVLSRARSWPASGHVHTQAGQGMRGYEDRDRADPQQLPEAVPAGLVRRLSGQQLPCRSTLTWGRLCHLVAQGRSSLPPNLEIRRLEDGAEGVFAITQLVKRTQFGPFESRRVAKWEKESAFPLKVFQKDGHPVCFDTSNEDDCNWMMLVRPAAEAEHQNLTAYQHGSDVYFTTSRDIPPGTELRVWYAAFYAKKMDKPMLKQAGSGVHAAGTPENSAPVESEPSQWACKVCSATFLELQLLNEHLLGHLEQAKSLPPGSQSEAAAPEKEQDTPRGEPPAVPESENVATKEQKKKPRRGRKPKVSKAEQPLVIVEDKEPTEQVAEIITEVPPDEPVSATPDERIMELVLGKLATTTTDTSSVPKFTHHQNNTITLKRSLILSSRHGIRRKLIKQLGEHKRVYQCNICSKIFQNSSNLSRHVRSHGDKLFKCEECAKLFSRKESLKQHVSYKHSRNEVDGEYRYRCGTCEKTFRIESALEFHNCRTDDKTFQCEMCFRFFSTNSNLSKHKKKHGDKKFACEVCSKMFYRKDVMLDHQRRHLEGVRRVKREDLEAGGENLVRYKKEPSGCPVCGKVFSCRSNMNKHLLTHGDKKYTCEICGRKFFRVDVLRDHIHVHFKDIALMDDHQREEFIGKIGISSEENDDNSDESADSEPHKYSCKRCQLTFGRGKEYLKHIMEVHKEKGYGCSICNRRFALKATYHAHMVIHRENLPDPNVQKYIHPCEICGRIFNSIGNLERHKLIHTGVKSHACEQCGKSFARKDMLKEHMRVHDNVREYLCAECGKGMKTKHALRHHMKLHKGIKEYECKECHRRFAQKVNMLKHCKRHTGIKDFMCELCGKTFSERNTMETHKLIHTVGKQWTCSVCDKKYVTEYMLQKHVQLTHDKVEAQSCQLCGTKVSTRASMSRHMRRKHPEVLAVRIDDLDHLPETTTIDASSIGIVQPELTLEQEDLAEGKHGKAAKRSHKRKQKPEEEAGAPVPEDATFSEYSEKETEFTGSVGDETNSAVQSIQQVVVTLGDPNVTTPSSSVGLTNITVTPITTAAATQFTNLQPVAVGHLTTPERQLQLDNSILTVTFDTVSGSAMLHNRQNDVQIHPQPEASNPQSVAHFINLTTLVNSITPLGSQLSDQHPLTWRAVPQTDVLPPSQPQAPPQQAAQPQVQAEQQQQQMYSY

SEQ ID NO: 15529 - protein, 1276 aa, Homo sapiens
MRSKARARKLAKSDGDVVNNMYEPNRDLLASHSAEDEAEDSAMSPIPVGPPSPFPTSEDFTPKEGSPYEAPVYIPEDIPIPADFELRESSIPGAGLGVWAKRKMEAGERLGPCVVVPRAAAKETDFGWEQILTDVEVSPQEGCITKISEDLGSEKFCVDANQAGAGSWLKYIRVACSCDDQNLTMCQISEQIYYKVIKDIEPGEELLVHVKEGVYPLGTVPPGLDEEPTFRCDECDELFQSKLDLRRHKKYTCGSVGAALYEGLAEELKPEGLGGGSGQAHECKDCERMFPNKYSLEQHMVIHTEEREYKCDQCPKAFNWKSNLIRHQMSHDSGKRFECENCVKVFTDPSNLQRHIRSQHVGARAHACPDCGKTFATSSGLKQHKHIHSTVKPFICEVCHKSYTQFSNLCRHKRMHADCRTQIKCKDCGQMFSTTSSLNKHRRFCEGKNHYTPGGIFAPGLPLTPSPMMDKAKPSPSLNHASLGFNEYFPSRPHPGSLPFSTAPPTFPALTPGFPGIFPPSLYPRPPLLPPTSLLKSPLNHTQDAKLPSPLGNPALPLVSAVSNSSQGTTAAAGPEEKFESRLEDSCVEKLKTRSSDMSDGSDFEDVNTTTGTDLDTTTGTGSDLDSDVDSDPDKDKGKGKSAEGQPKFGGGLAPPGAPNSVAEVPVFYSQHSFFPPPDEQLLTATGAAGDSIKAIASIAEKYFGPGFMGMQEKKLGSLPYHSAFPFQFLPNFPHSLYPFTDRALAHNLLVKAEPKSPRDALKVGGPSAECPFDLTTKPKDVKPILPMPKGPSAPASGEEQPLDLSIGSRARASQNGGGREPRKNHVYGERKLGAGEGLPQVCPARMPQQPPLHYAKPSPFFMDPIYSRVEKRKVTDPVGALKEKYLRPSPLLFHPQMSAIETMTEKLESFAAMKADSGSSLQPLPHHPFNFRSPPPTLSDPILRKGKERYTCRYCGKIFPRSANLTRHLRTHTGEQPYRCKYCDRSFSISSNLQRHVRNIHNKEKPFKCHLCNRCFGQQTNLDRHLKKHEHENAPVSQHPGVLTNHLGTSASSPTSESDNHALLDEKEDSYFSEIRNFIANSEMNQASTRTEKRADMQIVDGSAQCPGLASEKQEDVEEEDDDDLEEDDEDSLAGKSQDDTVSPAPEPQAAYEDEEDEEPAASLAVGFDHTRRCAEDHEGGLLALEPMPTFGKGLDLRRAAEEAFEVKDVLNSTLDSEALKHTLCRQAKNQAYAMMLSLSEDTPLHTPSQGSLDAWLKVTGATSESGAFHPINHL

SEQ ID NO: 15530 - protein, 1718 aa, Homo sapiens
MNQNTTEPVAATETLAEVPEHVLRGLPEEVRLFPSAVDKTRIGVWATKPILKGKKFGPFVGDKKKRSQVKNNVYMWEVYYPNLGWMCIDATDPEKGNWLRYVNWACSGEEQNLFPLEINRAIYYKTLKPIAPGEELLVWYNGEDNPEIAAAIEEERASARSKRSSPKSRKGKKKSQENKNKGNKIQDIQLKTSEPDFTSANMRDSAEGPKEDEEKPSASALEQPATLQEVASQEVPPELATPAPAWEPQPEPDERLEAAACEVNDLGEEEEEEEEEDEEEEEDDDDDELEDEGEEEASMPNENSVKEPEIRCDEKPEDLLEEPKTTSEETLEDCSEVTPAMQIPRTKEEANGDVFETFMFPCQHCERKFTTKQGLERHMHIHISTVNHAFKCKYCGKAFGTQINRRRHERRHEAGLKRKPSQTLQPSEDLADGKASGENVASKDDSSPPSLGPDCLIMNSEKASQDTINSSVVEENGEVKELHPCKYCKKVFGTHTNMRRHQRRVHERHLIPKGVRRKGGLEEPQPPAEQAQATQNVYVPSTEPEEEGEADDVYIMDISSNISENLNYYIDGKIQTNNNTSNCDVIEMESASADLYGINCLLTPVTVEITQNIKTTQVPVTEDLPKEPLGSTNSEAKKRRTASPPALPKIKAETDSDPMVPSCSLSLPLSISTTEAVSFHKEKSVYLSSKLKQLLQTQDKLTPAGISATEIAKLGPVCVSAPASMLPVTSSRFKRRTSSPPSSPQHSPALRDFGKPSDGKAAWTDAGLTSKKSKLESHSDSPAWSLSGRDERETVSPPCFDEYKMSKEWTASSAFSSVCNQQPLDLSSGVKQKAEGTGKTPVQWESVLDLSVHKKHCSDSEGKEFKESHSVQPTCSAVKKRKPTTCMLQKVLLNEYNGIDLPVENPADGTRSPSPCKSLEAQPDPDLGPGSGFPAPTVESTPDVCPSSPALQTPSLSSGQLPPLLIPTDPSSPPPCPPVLTVATPPPPLLPTVPLPAPSSSASPHPCPSPLSNATAQSPLPILSPTVSPSPSPIPPVEPLMSAASPGPPTLSSSSSSSSSSSSFSSSSSSSSPSPPPLSAISSVVSSGDNLEASLPMISFKQEELENEGLKPREEPQSAAEQDVVVQETFNKNFVCNVCESPFLSIKDLTKHLSIHAEEWPFKCEFCVQLFKDKTDLSEHRFLLHGVGNIFVCSVCKKEFAFLCNLQQHQRDLHPDKVCTHHEFESGTLRPQNFTDPSKAHVEHMQSLPEDPLETSKEEEELNDSSEELYTTIKIMASGIKTKDPDVRLGLNQHYPSFKPPPFQYHHRNPMGIGVTATNFTTHNIPQTFTTAIRCTKCGKGVDNMPELHKHILACASASDKKRYTPKKNPVPLKQTVQPKNGVVVLDNSGKNAFRRMGQPKRLNFSVELSKMSSNKLKLNALKKKNQLVQKAILQKNKSAKQKADLKNACESSSHICPYCNREFTYIGSLNKHAAFSCPKKPLSPPKKKVSHSSKKGGHSSPASSDKNSNSNHRRRTADAEIKMQSMQTPLGKTRARSSGPTQVPLPSSSFRSKQNVKFAASVKSKKPSSSSLRNSSPIRMAKITHVEGKKPKAVAKNHSAQLSSKTSRSLHVRVQKSKAVLQSKSTLASKKRTDRFNIKSRERSGGPVTRSLQLAAAADLSENKREDGSAKQELKDFSYSLRLASRCSPPAAPYITRQYRKVKAPAAAQFQGPFFKE

SEQ ID NO: 15531 - protein, 801 aa, Homo sapiens
MHHRMNEMNLSPVGMEQLTSSSVSNALPVSGSHLGLAASPTHSAIPAPGLPVAIPNLGPSLSSLPSALSLMLPMGIGDRGVMCGLPERNYTLPPPPYPHLESSYFRTILPGILSYLADRPPPQYIHPNSINVDGNTALSITNNPSALDPYQSNGNVGLEPGIVSIDSRSVNTHGAQSLHPSDGHEVALDTAITMENVSRVTSPISTDGMAEELTMDGVAGEHSQIPNGSRSHEPLSVDSVSNNLAADAVGHGGVIPMHGNGLELPVVMETDHIASRVNGMSDSALSDSIHTVAMSTNSVSVALSTSHNLASLESVSLHEVGLSLEPVAVSSITQEVAMGTGHVDVSSDSLSFVSPSLQMEDSNSNKENMATLFTIWCTLCDRAYPSDCPEHGPVTFVPDTPIESRARLSLPKQLVLRQSIVGAEVGVWTGETIPVRTCFGPLIGQQSHSMEVAEWTDKAVNHIWKIYHNGVLEFCIITTDENECNWMMFVRKARNREEQNLVAYPHDGKIFFCTSQDIPPENELLFYYSRDYAQQIGVPEHPDVHLCNCGKECNSYTEFKAHLTSHIHNHLPTQGHSGSHGPSHSKERKWKCSMCPQAFISPSKLHVHFMGHMGMKPHKCDFCSKAFSDPSNLRTHLKIHTGQKNYRCTLCDKSFTQKAHLESHMVIHTGEKNLKCDYCDKLFMRRQDLKQHVLIHTQERQIKCPKCDKLFLRTNHLKKHLNSHEGKRDYVCEKCTKAYLTKYHLTRHLKTCKGPTSSSSAPEEEEEDDSEEEDLADSVGTEDCRINSAVYSADESLSAHK

SEQ ID NO: 15532 - protein, 630 aa, Homo sapiens
MLGMYVPDRFSLKSSRVQDGMGLYTARRVRKGEKFGPFAGEKRMPEDLDENMDYRLMWEVRGSKGEVLYILDATNPRHSNWLRFVHEAPSQEQKNLAAIQEGENIFYLAVEDIETDTELLIGYLDSDMEAEEEEQQIMTVIKEGEVENSRRQSTAGRKDRLGCKEDYACPQCESSFTSEDILAEHLQTLHQKPTEEKEFKCKNCGKKFPVKQALQRHVLQCTAKSSLKESSRSFQCSVCNSSFSSASSFEQHQETCRGDARFVCKADSCGKRLKSKDALKRHQENVHTGDPKKKLICSVCNKKCSSASSLQEHRKIHEIFDCQECMKKFISANQLKRHMITHSEKRPYNCEICNKSFKRLDQVGAHKVIHSEDKPYKCKLCGKGFAHRNVYKNHKKTHSEERPFQCEECKALFRTPFSLQRHLLIHNSERTFKCHHCDATFKRKDTLNVHVQVVHERHKKYRCELCNKAFVTPSVLRSHKKTHTGEKEKICPYCGQKFASSGTLRVHIRSHTGERPYQCPYCEKGFSKNDGLKMHIRTHTREKPYKCSECSKAFSQKRGLDEHKRTHTGEKPFQCDVCDLAFSLKKMLIRHKMTHNPNRPLAECQFCHKKFTRNDYLKVHMDNIHGVADS

SEQ ID NO: 15533 - protein, 595 aa, Homo sapiens
MLKPGDPGGSAFLKVDPAYLQHWQQLFPHGGAGPLKGSGAAGLLSAPQPLQPPPPPPPPERAEPPPDSLRPRPASLSSASSTPASSSTSASSASSCAAAAAAAALAGLSALPVSQLPVFAPLAAAAVAAEPLPPKELCLGATSGPGPVKCGGGGGGGGEGRGAPRFRCSAEELDYYLYGQQRMEIIPLNQHTSDPNNRCDMCADNRNGECPMHGPLHSLRRLVGTSSAAAAAPPPELPEWLRDLPREVCLCTSTVPGLAYGICAAQRIQQGTWIGPFQGVLLPPEKVQAGAVRNTQHLWEIYDQDGTLQHFIDGGEPSKSSWMRYIRCARHCGEQNLTVVQYRSNIFYRACIDIPRGTELLVWYNDSYTSFFGIPLQCIAQDENLNVPSTVMEAMCRQDALQPFNKSSKLAPTTQQRSVVFPQTPCSRNFSLLDKSGPIESGFNQINVKNQRVLASPTSTSQLHSEFSDWHLWKCGQCFKTFTQRILLQMHVCTQNPDRPYQCGHCSQSFSQPSELRNHVVTHSSDRPFKCGYCGRAFAGATTLNNHIRTHTGEKPFKCERCERSFTQATQLSRHQRMPNECKPITESPESIEVD

SEQ ID NO: 15534 - protein, 492 aa, Homo sapiens
MSPERSQEESPEGDTERTERKPMVKDAFKDISIYFTKEEWAEMGDWEKTRYRNVKMNYNALITVGLRATRPAFMCHRRQAIKLQVDDTEDSDEEWTPRQQVKPPWMAFRGEQSKHQKGMPKASFNNESSLRELSGTPNLLNTSDSEQAQKPVSPPGEASTSGQHSRLKLELRRKETEGKMYSLRERKGHAYKEISEPQDDDYLYCEMCQNFFIDSCAAHGPPTFVKDSAVDKGHPNRSALSLPPGLRIGPSGIPQAGLGVWNEASDLPLGLHFGPYEGRITEDEEAANSGYSWLITKGRNCYEYVDGKDKSSANWMRYVNCARDDEEQNLVAFQYHRQIFYRTCRVIRPGCELLVWSGDEYGQELGIRSSIEPAESLGQAVNCWSGMGMSMARNWASSGAASGRKSSWQGENQSQRSIHVPHAVWPFQVKNFSVNMWNAITPLRTSQDHLQENFSNQRIPAQGIRIRSGNILIHAAVMTKPKVKRSKKGPNS

SEQ ID NO: 15535 - protein, 689 aa, Homo sapiens
MEDTGIQRGIWDGDAKAVQQCLTDIFTSVYTTCDIPENAIFGPCVLSHTSLYDSIAFIALKSTDKRTVPYIFRVDTSAANGSSEGLMWLRLVQSARDKEEQNLEAYIKNGQLFYRSLRRIAKDEELLVWYGKELTELLLLCPSRSHNKMNGSSPYTCLECSQRFQFEFPYVAHLRFRCPKRLHSADISPQDEQGGGVGTKDHGGGGGGGKDQQQQQQEAPLGPGPKFCKAGPLHHYPSPSPESSNPSAAAGGSSAKPSTDFHNLARELENSRGGSSCSPAQSLSSGSGSGGGGGHQEAELSPDGIATGGGKGKRKFPEEAAEGGGGAGLVGGRGRFVERPLPASKEDLVCTPQQYRASGSYFGLEENGRLFAPPSPETGEAKRSAFVEVKKAARAASLQEEGTADGAGVASEDQDAGGGGGSSTPAAASPVGAEKLLAPRPGGPLPSRLEGGSPARGSAFTSVPQLGSAGSTSGGGGTGAGAAGGAGGGQGAASDERKSAFSQPARSFSQLSPLVLGQKLGALEPCHPADGVGPTRLYPAAADPLAVKLQGAADLNGGCGSLPSGGGGLPKQSPFLYATAFWPKSSAAAAAAAAAAAAGPLQLQLPSALTLLPPSFTSLCLPAQNWCAKCNASFRMTSDLVYHMRSHHKKEYAMEPLVKRRREEKLKCPICNESFRERHHLSRHMTSHN

SEQ ID NO: 15536 - protein, 894 aa, Homo sapiens
MSPEKSQEESPEEDTERTERKPMVKDAFKDISIYFTKEEWAEMGDWEKTRYRNVKRNYNALITIGLRATRPAFMCHRRQAIKLQVDDTEDSDEEWTPRQQVKPPWMALRVEQRKHQKGMPKASFSNESSLKELSRTANLLNASGSEQAQKPVSPSGEASTSGQHSRLKLELRKKETERKMYSLRERKGHAYKEVSEPQDDDYLYCEMCQNFFIDSCAAHGPPTFVKDSAVDKGHPNRSALSLPPGLRIGPSGIPQAGLGVWNEASDLPLGLHFGPYEGRITEDEEAANNGYSWLITKGRNCYEYVDGKDKSWANWMRYVNCARDDEEQNLVAFQYHRQIFYRTCRVIRPGCELLVWYGDEYGQELGIKWGSKWKKELMAGREPKPEIHPCPSCCLAFSSQKFLSQHVERNHSSQNFPGPSARKLLQPENPCPGDQNQEQQYPDPHSRNDKTKGQEIKERSKLLNKRTWQREISRAFSSPPKGQMGSCRVGKRIMEEESRTGQKVNPGNTGKLFVGVGISRIAKVKYGECGQGFSVKSDVITHQRTHTGEKLYVCRECGRGFSWKSHLLIHQRIHTGEKPYVCRECGRGFSWQSVLLTHQRTHTGEKPYVCRECGRGFSRQSVLLTHQRRHTGEKPYVCRECGRGFSRQSVLLTHQRRHTGEKPYVCRECGRGFSWQSVLLTHQRTHTGEKPYVCRECGRGFSWQSVLLTHQRTHTGEKPYVCRECGRGFSNKSHLLRHQRTHTGEKPYVCRECGRGFRDKSHLLRHQRTHTGEKPYVCRECGRGFRDKSNLLSHQRTHTGEKPYVCRECGRGFSNKSHLLRHQRTHTGEKPYVCRECGRGFRNKSHLLRHQRTHTGEKPYVCRECGRGFSDRSSLCYHQRTHTGEKPYVCREDE

SEQ ID NO: 15537 - protein, 417 aa, Homo sapiens
MGRRRAPELYRAPFPLYALQVDPSTGLLIAAGGGGAAKTGIKNGVHFLQLELINGRLSASLLHSHDTETRATMNLALAGDILAAGQDAHCQLLRFQAHQQQGNKAEKAGSKEQGPRQRKGAAPAEKKCGAETQHEGLELRVENLQAVQTDFSSDPLQKVVCFNHDNTLLATGGTDGYVRVWKVPSLEKVLEFKAHEGEIEDLALGPDGKLVTVGRDLKASVWQKDQLVTQLHWQENGPTFSSTPYRYQACRFGQVPDQPAGLRLFTVQIPHKRLRQPPPCYLTAWDGSNFLPLRTKSCGHEVVSCLDVSESGTFLGLGTVTGSVAIYIAFSLQCLYYVREAHGIVVTDVAFLPEKGRGPELLGSHETALFSVAVDSRCQLHLLPSRRSVPVWLLLLLCVGLIIVTILLLQSAFPGFL

SEQ ID NO: 15538 - protein, 226 aa, Homo sapiens
MEAERRRQAEKPKKGRVGSNLLPERHPATGTPTTTVDSSAPPCRRLPGAGGGRSRFSPQGGQRGRPHSRRRHRTTFSPVQLEQLESAFGRNQYPDIWARESLARDTGLSEARIQVWFQNRRAKQRKQERSLLQPLAHLSPAAFSSFLPESTACPYSYAAPPPPVTCFPHPYSHALPSQPSTGGAFALSHQSEDWYPTLHPAPAGHLPCPPPPPMLPLSLEPSKSWN

SEQ ID NO: 15539 - protein, 737 aa, Homo sapiens
MPDHDSTALLSRQTKRRRVDIGVKRTVGTASAFFAKARATFFSAMNPQGSEQDVEYSVVQHADGEKSNVLRKLLKRANSYEDAMMPFPGATIISQLLKNNMNKNGGTEPSFQASGLSSTGSEVHQEDICSNSSRDSPPECLSPFGRPTMSQFDMDRLCDEHLRAKRARVENIIRGMSHSPSVALRGNENEREMAPQSVSPRESYRENKRKQKLPQQQQQSFQQLVSARKEQKREERRQLKQQLEDMQKQLRQLQEKFYQIYDSTDSENDEDGNLSEDSMRSEILDARAQDSVGRSDNEMCELDPGQFIDRARALIREQEMAENKPKREGNNKERDHGPNSLQPEGKHLAETLKQELNTAMSQVVDTVVKVFSAKPSRQVPQVFPPLQIPQARFAVNGENHNFHTANQRLQCFGDVIIPNPLDTFGNVQMASSTDQTEALPLVVRKNSSDQSASGPAAGGHHQPLHQSPLSATTGFTTSTFRHPFPLPLMAYPFQSPLGAPSGSFSGKDRASPESLDLTRDTTSLRTKMSSHHLSHHPCSPAHPPSTAEGLSLSLIKSECGDLQDMSEISPYSGSAMQEGLSPNHLKKAKLMFFYTRYPSSNMLKTYFSDVKFNRCITSQLIKWFSNFREFYYIQMEKYARQAINDGVTSTEELSITRDCELYRALNMHYNKANDFEVPERFLEVAQITLREFFNAIIAGKDVDPSWKKAIYKVICKLDSEVPEIFKSPNCLQELLHE

SEQ ID NO: 15540 - protein, 592 aa, Homo sapiens
MDPNSILLSPQPQICSHLAEACTEGERSSSPPELDRDSPFPWSQVPSSSPTDPEWFGDEHIQAKRARVETIVRGMCLSPNPLVPGNAQAGVSPRCPKKARERKRKQNLPTPQGLLMPAPAWDQGNRKGGPRVREQLHLLKQQLRHLQEHILQAAKPRDTAQGPGGCGTGKGPLSAKQGNGCGPRPWVVDGDHQQGTSKDLSGAEKHQESEKPSFLPSGAPASLEILRKELTRAVSQAVDSVLQKVLLDPPGHLTQLGRSFQGQVAEGRSEPSPPVGGACKDPLALAALPRRVQLQAGVPVGNLSLAKRLDSPRYPIPPRMTPKPCQDPPANFPLTAPSHIQENQILSQLLGHRYNNGHWSSSPPQDSSSQRHPSSEPALRPWRTTKPQPLVLSQQQCPLPFTSAHLESLPLLPSVKMEQRGLHAVMEALPFSLLHIQEGLNPGHLKKAKLMFFFTRYPSSNLLKVYFPDVQFNRCITSQMIKWFSNFREFYYIQMEKSARQAISDGVTNPKMLVVLRNSELFQALNMHYNKGNDFEVPDCFLEIASLTLQEFFRAVSAGRDSDPSWKKPIYKIISKLDSDIPEIFKSSSYPQ

SEQ ID NO: 15541 - protein, 245 aa, Homo sapiens
MTSSYGHVLERQPALGGRLDSPGNLDTLQAKKNFSVSHLLDLEEAGDMVAAQADENVGEAGRSLLESPGLTSGSDTPQQDNDQLNSEEKKKRKQRRNRTTFNSSQLQALERVFERTHYPDAFVREDLARRVNLTEARVQVWFQNRRAKFRRNERAMLANKNASLLKSYSGDVTAVEQPIVPRPAPRPTDYLSWGTASPYSAMATYSATCANNSPAQGINMANSIANLRLKAKEYSLQRNQVPTVN

SEQ ID NO: 15542 - protein, 253 aa, Homo sapiens
MDSAAAAFALDKPALGPGPPPPPPALGPGDCAQARKNFSVSHLLDLEEVAAAGRLAARPGARAEAREGAAREPSGGSSGSEAAPQDGECPSPGRGSAAKRKKKQRRNRTTFNSSQLQALERVFERTHYPDAFVREELARRVNLSEARVQVWFQNRRAKFRRNERAMLASRSASLLKSYSQEAAIEQPVAPRPTALSPDYLSWTASSPYSTVPPYSPGSSGPATPGVNMANSIASLRLKAKEFSLHHSQVPTVN

SEQ ID NO: 15543 - protein, 523 aa, Homo sapiens
MMLRGNLKQVRIEKNPARLRALESAVGESEPAAAAAMALALAGEPAPPAPAPPEDHPDEEMGFTIDIKSFLKPGEKTYTQRCRLFVGNLPTDITEEDFKRLFERYGEPSEVFINRDRGFGFIRLESRTLAEIAKAELDGTILKSRPLRIRFATHGAALTVKNLSPVVSNELLEQAFSQFGPVEKAVVVVDDRGRATGKGFVEFAAKPPARKALERCGDGAFLLTTTPRPVIVEPMEQFDDEDGLPEKLMQKTQQYHKEREQPPRFAQPGTFEFEYASRWKALDEMEKQQREQVDRNIREAKEKLEAEMEAARHEHQLMLMRQDLMRRQEELRRLEELRNQELQKRKQIQLRHEEEHRRREEEMIRHREQEELRRQQEGFKPNYMENREQEMRMGDMGPRGAINMGDAFSPAPAGNQGPPPMMGMNMNNRATIPGPPMGPGPAMGPEGAANMGTPMMPDNGAVHNDRFPQGPPSQMGSPMGSRTGSETPQAPMSGVGPVSGGPGGFGRGSQGGNFEGPNKRRRY

SEQ ID NO: 15544 - protein, 328 aa, Homo sapiens
MDAVLLEHFPGGLDAFPSSYFDEDDFFTDQSSRDPLEDGDELLADEQAEVEFLSHQLHEYCYRDGACLLLQPAPPAAPLALAPPSSGGLGEPDDGGGGGYCCETGAPPGGFPYSPGSPPSCLAYPCAGAAVLSPGARLRGLSGAAAAAARRRRRVRSEAELQQLRQAANVRERRRMQSINDAFEGLRSHIPTLPYEKRLSKVDTLRLAIGYINFLSELVQADLPLRGGGAGGCGGPGGGGRLGGDSPGSQAQKVIICHRGTRSPSPSDPDYGLPPLAGHSLSWTDEKQLKEQNIIRTAKVWTPEDPRKLNSKSSFNNIENEPPFEFVS

SEQ ID NO: 15545 - protein, 322 aa, Homo sapiens
MADRDSGSEQGGAALGSGGSLGHPGSGSGSGGGGGGGGGGGGSGGGGGGAPGGLQHETQELASKRVDIQNKRFYLDVKQNAKGRFLKIAEVGAGGNKSRLTLSMSVAVEFRDYLGDFIEHYAQLGPSQPPDLAQAQDEPRRALKSEFLVRENRKYYMDLKENQRGRFLRIRQTVNRGPGLGSTQGQTIALPAQGLIEFRDALAKLIDDYGVEEEPAELPEGTSLTVDNKRFFFDVGSNKYGVFMRVSEVKPTYRNSITVPYKVWAKFGHTFCKYSEEMKKIQEKQREKRAACEQLHQQQQQQQEETAAATLLLQGEEEGEED

SEQ ID NO: 15546 - protein, 312 aa, Homo sapiens
MADGDSGSERGGGGGPCGFQPASRGGGEQETQELASKRLDIQNKRFYLDVKQNAKGRFLKIAEVGAGGSKSRLTLSMAVAAEFRDSLGDFIEHYAQLGPSSPEQLAAGAEEGGGPRRALKSEFLVRENRKYYLDLKENQRGRFLRIRQTVNRGGGGFGAGPGPGGLQSGQTIALPAQGLIEFRDALAKLIDDYGGEDDELAGGPGGGAGGPGGGLYGELPEGTSITVDSKRFFFDVGCNKYGVFLRVSEVKPSYRNAITVPFKAWGKFGGAFCRYADEMKEIQERQRDKLYERRGGGSGGGEESEGEEVDED

SEQ ID NO: 15547 - protein, 347 aa, Homo sapiens
MERARRRGGGGGRGRGGKNVGGSGLSKSRLYPQAQHSHYPHYAASATPNQAGGAAEIQELASKRVDIQKKRFYLDVKQSSRGRFLKIAEVWIGRGRQDNIRKSKLTLSLSVAAELKDCLGDFIEHYAHLGLKGHRQEHGHSKEQGSRRRQKHSAPSPPVSVGSEEHPHSVLKTDYIERDNRKYYLDLKENQRGRFLRIRQTMMRGTGMIGYFGHSLGQEQTIVLPAQGMIEFRDALVQLIEDYGEGDIEERRGGDDDPLELPEGTSFRVDNKRFYFDVGSNKYGIFLKVSEVRPPYRNTITVPFKAWTRFGENFIKYEEEMRKICNSHKEKRMDGRKASGEEQECLD

SEQ ID NO: 15548 - protein, 462 aa, Homo sapiens
MASNSSSCPTPGGGHLNGYPVPPYAFFFPPMLGGLSPPGALTTLQHQLPVSGYSTPSPATIETQSSSSEEIVPSPPSPPPLPRIYKPCFVCQDKSSGYHYGVSACEGCKGFFRRSIQKNMVYTCHRDKNCIINKVTRNRCQYCRLQKCFEVGMSKESVRNDRNKKKKEVPKPECSESYTLTPEVGELIEKVRKAHQETFPALCQLGKYTTNNSSEQRVSLDIDLWDKFSELSTKCIIKTVEFAKQLPGFTTLTIADQITLLKAACLDILILRICTRYTPEQDTMTFSDGLTLNRTQMHNAGFGPLTDLVFAFANQLLPLEMDDAETGLLSAICLICGDRQDLEQPDRVDMLQEPLLEALKVYVRKRRPSRPHMFPKMLMKITDLRSISAKGAERVITLKMEIPGSMPPLIQEMLENSEGLDTLSGQPGGGGRDGGGLAPPPGSCSPSLSPSSNRSSPATHSP

SEQ ID NO: 15549 - protein, 455 aa, Homo sapiens
MTTSGHACPVPAVNGHMTHYPATPYPLLFPPVIGGLSLPPLHGLHGHPPPSGCSTPSPATIETQSTSSEELVPSPPSPLPPPRVYKPCFVCQDKSSGYHYGVSACEGCKGFFRRSIQKNMIYTCHRDKNCVINKVTRNRCQYCRLQKCFEVGMSKESVRNDRNKKKKETSKQECTESYEMTAELDDLTEKIRKAHQETFPSLCQLGKYTTNSSADHRVRLDLGLWDKFSELATKCIIKIVEFAKRLPGFTGLTIADQITLLKAACLDILILRICTRYTPEQDTMTFSDGLTLNRTQMHNAGFGPLTDLVFTFANQLLPLEMDDTETGLLSAICLICGDRQDLEEPTKVDKLQEPLLEALKIYIRKRRPSKPHMFPKILMKITDLRSISAKGAERVITLKMEIPGSMPPLIQEMLENSEGHEPLTPSSSGNTAEHSPSISPSSVENSGVSQSPLVQ

SEQ ID NO: 15550 - protein, 454 aa, Homo sapiens
MATNKERLFAAGALGPGSGYPGAGFPFAFPGALRGSPPFEMLSPSFRGLGQPDLPKEMASLSVETQSTSSEEMVPSSPSPPPPPRVYKPCFVCNDKSSGYHYGVSSCEGCKGFFRRSIQKNMVYTCHRDKNCIINKVTRNRCQYCRLQKCFEVGMSKEAVRNDRNKKKKEVKEEGSPDSYELSPQLEELITKVSKAHQETFPSLCQLGKYTTNSSADHRVQLDLGLWDKFSELATKCIIKIVEFAKRLPGFTGLSIADQITLLKAACLDILMLRICTRYTPEQDTMTFSDGLTLNRTQMHNAGFGPLTDLVFAFAGQLLPLEMDDTETGLLSAICLICGDRMDLEEPEKVDKLQEPLLEALRLYARRRRPSQPYMFPRMLMKITDLRGISTKGAERAITLKMEIPGPMPPLIREMLENPEMFEDDSSQPGPHPNASSEDEVPGGQGKGGLKSPA

SEQ ID NO: 15551 - protein, 313 aa, Homo sapiens
MSQSRHRAEAPPLEREDSGTFSLGKMITAKPGKTPIQVLHEYGMKTKNIPVYECERSDVQIHVPTFTFRVTVGDITCTGEGTSKKLAKHRAAEAAINILKANASICFAVPDPLMPDPSKQPKNQLNPIGSLQELAIHHGWRLPEYTLSQEGGPAHKREYTTICRLESFMETGKGASKKQAKRNAAEKFLAKFSNISPENHISLTNVVGHSLGCTWHSLRNSPGEKINLLKRSLLSIPNTDYIQLLSEIAKEQGFNITYLDIDELSANGQYQCLAELSTSPITVCHGSGISCGNAQSDAAHNALQYLKIIAERK

SEQ ID NO: 15552 - protein, 346 aa, Homo sapiens
MHLPGCAPAMADGSFSLAGHLLRSPGGSTSRLHSIEAILGFTKDDGILGTFPAERGARGAKERDRRLGARPACPKAPEEGSEPSPPPAPAPAPEYEAPRPYCPKEPGEARPSPGLPVGPATGEAKLSEEEQPKKKHRRNRTTFTTYQLHELERAFEKSHYPDVYSREELAGKVNLPEVRVQVWFQNRRAKWRRQEKLEVSSMKLQDSPLLSFSRSPPSATLSPLGAGPGSGGGPAGGALPLESWLGPPLPGGGATALQSLPGFGPPAQSLPASYTPPPPPPPFLNSPPLGPGLQPLAPPPPSYPCGPGFGDKFPLDEADPRNSSIAALRLKAKEHIQAIGKPWQAL

SEQ ID NO: 15553 - protein, 184 aa, Homo sapiens
MFLSPGEGPATEGGGLGPGEEAPKKKHRRNRTTFTTYQLHQLERAFEASHYPDVYSREELAAKVHLPEVRVQVWFQNRRAKWRRQERLESGSGAVAAPRLPEAPALPFARPPAMSLPLEPWLGPGPPAVPGLPRLLGPGPGLQASFGPHAFAPTFADGFALEEASLRLLAKEHAQALDRAWPPA

SEQ ID NO: 15554 - protein, 714 aa, Homo sapiens
MNTLQGPVSFKDVAVDFTQEEWQQLDPDEKITYRDVMLENYSHLVSVGYDTTKPNVIIKLEQGEEPWIMGGEFPCQHSPEAWRVDDLIERIQENEDKHSRQAACINSKTLTEEKENTFSQIYMETSLVPSSIIAHNCVSCGKNLESISQLISSDGSYARTKPDECNECGKTYHGEKMCEFNQNGDTYSHNEENILQKISILEKPFEYNECMEALDNEAVFIAHKRAYIGEKPYEWNDSGPDFIQMSNFNAYQRSQMEMKPFECSECGKSFCKKSKFIIHQRAHTGEKPYECNVCGKSFSQKGTLTVHRRSHLEEKPYKCNECGKTFCQKLHLTQHLRTHSGEKPYECSECGKTFCQKTHLTLHQRNHSGERPYPCNECGKSFSRKSALSDHQRTHTGEKLYKCNECGKSYYRKSTLITHQRTHTGEKPYQCSECGKFFSRVSYLTIHYRSHLEEKPYECNECGKTFNLNSAFIRHRKVHTEEKSHECSECGKFSQLYLTDHHTAHLEEKPYECNECGKTFLVNSAFDGHQPLPKGEKSYECNVCGKLFNELSYYTEHYRSHSEEKPYGCSECGKTFSHNSSLFRHQRVHTGEKPYECYECGKFFSQKSYLTIHHRIHSGEKPYECSKCGKVFSRMSNLTVHYRSHSGEKPYECNECGKVFSQKSYLTVHYRTHSGEKPYECNECGKKFHHRSAFNSHQRIHRRGNMNVLDVENL

SEQ ID NO: 15555 - protein, 420 aa, Homo sapiens
MATSLGSNTYNRQNWEDADFPILCQTCLGENPYIRMTKEKYGKECKICARPFTVFRWCPGVRMRFKKTEVCQTCSKLKNVCQTCLLDLEYGLPIQVRDAGLSFKDDMPKSDVNKEYYTQNMEREISNSDGTRPVGMLGKATSTSDMLLKLARTTPYYKRNRPHICSFWVKGECKRGEECPYRHEKPTDPDDPLADQNIKDRYYGINDPVADKLLKRASTMPRLDPPEDKTITTLYVGGLGDTITETDLRNHFYQFGEIRTITVVQRQQCAFIQFATRQAAEVAAEKSFNKLIVNGRRLNVKWGRSQAARGKEKEKDGTTDSGIKLEPVPGLPGALPPPPAAEEEASANYFNLPPSGPPAVVNIALPPPPGIAPPPPPGFGPHMFHPMGPPPPFMRAPGPIHYPSQDPQRMGAHAGKHSSP

SEQ ID NO: 15556 - protein, 500 aa, Homo sapiens
MDHTEGSPAEEPPAHAPSPGKFGERPPPKRLTREAMRNYLKERGDQTVLILHAKVAQKSYGNEKRFFCPPPCVYLMGSGWKKKKEQMERDGCSEQESQPCAFIGIGNSDQEMQQLNLEGKNYCTAKTLYISDSDKRKHFMLSVKMFYGNSDDIGVFLSKRIKVISKPSKKKQSLKNADLCIASGTKVALFNRLRSQTVSTRYLHVEGGNFHASSQQWGAFFIHLLDDDESEGEEFTVRDGYIHYGQTVKLVCSVTGMALPRLIIRKVDKQTALLDADDPVSQLHKCAFYLKDTERMYLCLSQERIIQFQATPCPKEPNKEMINDGASWTIISTDKAEYTFYEGMGPVLAPVTPVPVVESLQLNGGGDVAMLELTGQNFTPNLRVWFGDVEAETMYRCGESMLCVVPDISAFREGWRWVRQPVQVPVTLVRNDGIIYSTSLTFTYTPEPGPRPHCSAAGAILRANSSQVPPNESNTNSEGSYTNASTNSTSVTSSTATVVS

SEQ ID NO: 15557 - protein, 517 aa, Homo sapiens
MDPAGAADPSVPPNPLTHLSLQDRSEMQLQSEADRRSLPGTWTRSSPEHTTILRGGVRRCLQQQCEQTVRILHAKVAQKSYGNEKRFFCPPPCVYLSGPGWRVKPGQDQAHQAGETGPTVCGYMGLDSASGSATETQKLNFEQQPDSREFGCAKTLYISDADKRKHFRLVLRLVLRGGRELGTFHSRLIKVISKPSQKKQSLKNTDLCISSGSKVSLFNRLRSQTVSTRYLSVEDGAFVASARQWAAFTLHLADGHSAQGDFPPREGYVRYGSLVQLVCTVTGITLPPMIIRKVAKQCALLDVDEPISQLHKCAFQFPGSPPGGGGTYLCLATEKVVQFQASPCPKEANRALLNDSSCWTIIGTESVEFSFSTSLACTLEPVTPVPLISTLELSGGGDVATLELHGENFHAGLKVWFGDVEAETMYRSPRSLVCVVPDVAAFCSDWRWLRAPITIPMSLVRADGLFYPSAFSFTYTPEYSVRPGHPGVPEPATDADALLESIHQEFTRTNFHLFIQT

SEQ ID NO: 15558 - protein, 1133 aa, Homo sapiens
MPVQAPQWTDFLSCPICTQTFDETIRKPISLGCGHTVCKMCLNKLHRKACPFDQTTINTDIELLPVNSALLQLVGAQVPEQQPITLCSGVEDTKHYEEAKKCVEELALYLKPLSSARGVGLNSTTQSVLSRPMQRKLVTLVHCQLVEEEGRIRAMRAARSLGERTVTELILQHQNPQQLSSNLWAAVRARGCQFLGPAMQEEALKLVLLALEDGSALSRKVLVLFVVQRLEPRFPQASKTSIGHVVQLLYRASCFKVTKRDEDSSLMQLKEEFRTYEALRREHDSQIVQIAMEAGLRIAPDQWSSLLYGDQSHKSHMQSIIDKLQTPASFAQSVQELTIALQRTGDPANLNRLRPHLELLANIDPSPDAPPPTWEQLENGLVAVRTVVHGLVDYIQNHSKKGADQQQPPQHSKYKTYMCRDMKQRGGCPRGASCTFAHSQEELEKFRKMNKRLVPRRPLSASLGQLNEVGLPSAAILPDEGAVDLPSRKPPALPNGIVSTGNTVTQLIPRGTDPSYDSSLKPGKIDHLSSSAPGSPPDLLESVPKSISALPVNPHSIPPRGPADLPPMPVTKPLQMVPRGSQLYPAQQTDVYYQDPRGAAPPFEPAPYQQGMYYTPPPQCVSRFVRPPPSAPEPAPPYLDHYPPYLQERVVNSQYGTQPQQYPPIYPSHYDGRRVYPAPSYTREEIFRESPIPIEIPPAAVPSYVPESRERYQQIESYYPVAPHPTQIRPSYLREPPYSRLPPPPQPHPSLDELHRRRKEIMAQLEERKVISPPPFAPSPTLPPTFHPEEFLDEDLKVAGKYKGNDYSQYSPWSCDTIGSYIGTKDAKPKDVVAAGSVEMMNVESKGMRDQRLDLQRRAAETSDDDLIPFGDRPTVSRFGAISRTSKTIYQGAGPMQAMAPQGAPTKSINISDYSPYGTHGGWGASPYSPHQNIPSQGHFSERERISMSEVASHGKPLPSAEREQLRLELQQLNHQISQQTQLRGLEAVSNRLVLQREANTLAGQSQPPPPPPPKWPGMISSEQLSLELHQVEREIGKRTRELSMENQCSLDMKSKLNTSKQAENGQPEPQNKVPAEDLTLTFSDVPNGSALTQENISLLSNKTSSLNLSEDPEGGGDNNDSQRSGVTPSSAP

SEQ ID NO: 15559 - protein, 1191 aa, Homo sapiens
MPVQAAQWTEFLSCPICYNEFDENVHKPISLGCSHTVCKTCLNKLHRKACPFDQTAINTDIDVLPVNFALLQLVGAQVPDHQSIKLSNLGENKHYEVAKKCVEDLALYLKPLSGGKGVASLNQSALSRPMQRKLVTLVNCQLVEEEGRVRAMRAARSLGERTVTELILQHQNPQQLSANLWAAVRARGCQFLGPAMQEEALKLVLLALEDGSALSRKVLVLFVVQRLEPRFPQASKTSIGHVVQLLYRASCFKVTKRDEDSSLMQLKEEFRSYEALRREHDAQIVHIAMEAGLRISPEQWSSLLYGDLAHKSHMQSIIDKLQSPESFAKSVQELTIVLQRTGDPANLNRLRPHLELLANIDPNPDAVSPTWEQLENAMVAVKTVVHGLVDFIQNYSRKGHETPQPQPNSKYKTSMCRDLRQQGGCPRGTNCTFAHSQEELEKYRLRNKKINATVRTFPLLNKVGVNNTVTTTAGNVISVIGSTETTGKIVPSTNGISNAENSVSQLISRSTDSTLRALETVKKVGKVGANGQNAAGPSADSVTENKIGSPPKTPVSNVAATSAGPSNVGTELNSVPQKSSPFLTRVPVYPPHSENIQYFQDPRTQIPFEVPQYPQTGYYPPPPTVPAGVAPCVPRFVRSNNVPESSLPPASMPYADHYSTFSPRDRMNSSPYQPPPPQPYGPVPPVPSGMYAPVYDSRRIWRPPMYQRDDIIRSNSLPPMDVMHSSVYQTSLRERYNSLDGYYSVACQPPSEPRTTVPLPREPCGHLKTSCEEQIRRKPDQWAQYHTQKAPLVSSTLPVATQSPTPPSPLFSVDFRADFSESVSGTKFEEDHLSHYSPWSCGTIGSCINAIDSEPKDVIANSNAVLMDLDSGDVKRRVHLFETQRRTKEEDPIIPFSDGPIISKWGAISRSSRTGYHTTDPVQATASQGSATKPISVSDYVPYVNAVDSRWSSYGNEATSSAHYVERDRFIVTDLSGHRKHSSTGDLLSLELQQAKSNSLLLQREANALAMQQKWNSLDEGRHLTLNLLSKEIELRNGELQSDYTEDATDTKPDRDIELELSALDTDEPDGQSEPIEEILDIQLGISSQNDQLLNGMAVENGHPVQQHQKEPPKQKKQSLGEDHVILEEQKTILPVTSCFSQPLPVSISNASCLPITTSVSAGNLILKTHVMSEDKNDFLKPVANGKMVNS

SEQ ID NO: 15560 - protein, 485 aa, Homo sapiens; identical to SEQ ID NO: 11271

SEQ ID NO: 15561 - protein, 523 aa, Homo sapiens
MPSVMEKPSAGSGILSRSRAKTVPNGGQPHSEDDSSEEEHSHDSMIRVGTNYQAVIPECKPESPARYSNKELKGMLVWSPNHCVSDAKLDKYIAMAKEKHGYNIEQALGMLLWHKHDVEKSLADLANFTPFPDEWTVEDKVLFEQAFGFHGKCFQRIQQMLPDKLIPSLVKYYYSWKKTRSRTSVMDRQARRLGGRKDKEDSDELEEGRGGVSEGEPDPADPKREPLPSRPLNARPGPGKKEVQVSQYRHHPLRTRRRPPKGMYLSPEGLTAVSGSPDLANLTLRGLDSQLISLKRQVQSMKQTNSSLRQALEGGIDPLRPPEANTKFNSRWTTDEQLLAVQAIRRYGKDFGAIAEVIGNKTLTQVKTFFVSYRRRFNLEEVLQEWEAEQDGAPGAPVPMEEARRGAPLPAPALEEDDEVQITSVSTSVPRSVPPAPPPPPPPTSLSQPPPLLRPPLPTAPTLLRQPPPLQQGRFLQPRLAPNQPPPPLIRPALAAPRHSARPGPQPPPTLIGTPLEPPAPSL

SEQ ID NO: 15562 - protein, 495 aa, Homo sapiens
MRVGAEYQARIPEFDPGATKYTDKDNGGMLVWSPYHSIPDAKLDEYIAIAKEKHGYNVEQALGMLFWHKHNIEKSLADLPNFTPFPDEWTVEDKVLFEQAFSFHGKSFHRIQQMLPDKTIASLVKYYYSWKKTRSRTSLMDRQARKLANRHNQGDSDDDVEETHPMDGNDSDYDPKKEAKKEGNTEQPVQTSKIGLGRREYQSLQHRHHSQRSKCRPPKGMYLTQEDVVAVSCSPNAANTILRQLDMELISLKRQVQNAKQVNSALKQKMEGGIEEFKPPESNQKINARWTTEEQLLAVQGVRKYGKDFQAIADVIGNKTVGQVKNFFVNYRRRFNLEEVLQEWEAEQGTQASNGDASTLGEETKSASNVPSGKSTDEEEEAQTPQAPRTLGPSPPAPSSTPTPTAPIATLNQPPPLLRPTLPAAPALHRQPPPLQQQARFIQPRPTLNQPPPPLIRPANSMPPRLNPRPVLSTVGGQQPPSLIGIQTDSQSSLH

SEQ ID NO: 15563 - protein, 619 aa, Homo sapiens
MASGAYNPYIEIIEQPRQRGMRFRYKCEGRSAGSIPGEHSTDNNRTYPSIQIMNYYGKGKVRITLVTKNDPYKPHPHDLVGKDCRDGYYEAEFGQERRPLFFQNLGIRCVKKKEVKEAIITRIKAGINPFNVPEKQLNDIEDCDLNVVRLCFQVFLPDEHGNLTTALPPVVSNPIYDNRAPNTAELRICRVNKNCGSVRGGDEIFLLCDKVQKDDIEVRFVLNDWEAKGIFSQADVHRQVAIVFKTPPYCKAITEPVTVKMQLRRPSDQEVSESMDFRYLPDEKDTYGNKAKKQKTTLLFQKLCQDHVETGFRHVDQDGLELLTSGDPPTLASQSAGITVNFPERPRPGLLGSIGEGRYFKKEPNLFSHDAVVREMPTGVSSQAESYYPSPGPISSGLSHHASMAPLPSSSWSSVAHPTPRSGNTNPLSSFSTRTLPSNSQGIPPFLRIPVGNDLNASNACIYNNADDIVGMEASSMPSADLYGISDPNMLSNCSVNMMTTSSDSMGETDNPRLLSMNLENPSCNSVLDPRDLRQLHQMSSSSMSAGANSNTTVFVSQSDAFEGSDFSCADNSMINESGPSNSTNPNSHGFVQDSQYSGIGSMQNEQLSDSFPYEFFQV

SEQ ID NO: 15564 - protein, 551 aa, Homo sapiens
MDELFPLIFPAEPAQASGPYVEIIEQPKQRGMRFRYKCEGRSAGSIPGERSTDTTKTHPTIKINGYTGPGTVRISLVTKDPPHRPHPHELVGKDCRDGFYEAELCPDRCIHSFQNLGIQCVKKRDLEQAISQRIQTNNNPFQVPIEEQRGDYDLNAVRLCFQVTVRDPSGRPLRLPPVLSHPIFDNRAPNTAELKICRVNRNSGSCLGGDEIFLLCDKVQKEDIEVYFTGPGWEARGSFSQADVHRQVAIVFRTPPYADPSLQAPVRVSMQLRRPSDRELSEPMEFQYLPDTDDRHRIEEKRKRTYETFKSIMKKSPFSGPTDPRPPPRRIAVPSRSSASVPKPAPQPYPFTSSLSTINYDEFPTMVFPSGQISQASALAPAPPQVLPQAPAPAPAPAMVSALAQAPAPVPVLAPGPPQAVAPPAPKPTQAGEGTLSEALLQLQFDDEDLGALLGNSTDPAVFTDLASVDNSEFQQLLNQGIPVAPHTTEPMLMEYPEAITRLVTGAQRPPDPAPAPLGAPGLPNGLLSGDEDFSSIADMDFSALLSQISS

SEQ ID NO: 15565 - protein, 579 aa, Homo sapiens
MLRSGPASGPSVPTGRAMPSRRVARPPAAPELGALGSPDLSSLSLAVSRSTDELEIIDEYIKENGFGLDGGQPGPGEGLPRLVSRGAASLSTVTLGPVAPPATPPPWGCPLGRLVSPAPGPGPQPHLVITEQPKQRGMRFRYECEGRSAGSILGESSTEASKTLPAIELRDCGGLREVEVTACLVWKDWPHRVHPHSLVGKDCTDGICRVRLRPHVSPRHSFNNLGIQCVRKKEIEAAIERKIQLGIDPYNAGSLKNHQEVDMNVVRICFQASYRDQQGQMRRMDPVLSEPVYDKKSTNTSELRICRINKESGPCTGGEELYLLCDKVQKEDISVVFSRASWEGRADFSQADVHRQIAIVFKTPPYEDLEIVEPVTVNVFLQRLTDGVCSEPLPFTYLPRDHDSYGVDKKRKRGMPDVLGELNSSDPHGIESKRRKKKPAILDHFLPNHGSGPFLPPSALLPDPDFFSGTVSLPGLEPPGGPDLLDDGFAYDPTAPTLFTMLDLLPPAPPHASAVVCSGGAGAVVGETPGPEPLTLDSYQAPGPGDGGTASLVGSNMFPNHYREAAFGGGLLSPGPEAT

SEQ ID NO: 15566 - protein, 1566 aa, Homo sapiens
MTADKDKDKDKEKDRDRDRDREREKRDKARESENSRPRRSCTLEGGAKNYAESDHSEDEDNDNNSATAEESTKKNKKKPPKKKSRYERTDTGEITSYITEDDVVYRPGDCVYIESRRPNTPYFICSIQDFKLVHNSQACCRSPTPALCDPPACSLPVASQPPQHLSEAGRGPVGSKRDHLLMNVKWYYRQSEVPDSVYQHLVQDRHNENDSGRELVITDPVIKNRELFISDYVDTYHAAALRGKCNISHFSDIFAAREFKARVDSFFYILGYNPETRRLNSTQGEIRVGPSHQAKLPDLQPFPSPDGDTVTQHEELVWMPGVNDCDLLMYLRAARSMAAFAGMCDGGSTEDGCVAASRDDTTLNALNTLHESGYDAGKALQRLVKKPVPKLIEKCWTEDEVKRFVKGLRQYGKNFFRIRKELLPNKETGELITFYYYWKKTPEAASSRAHRRHRRQAVFRRIKTRTASTPVNTPSRPPSSEFLDLSSASEDDFDSEDSEQELKGYACRHCFTTTSKDWHHGGRENILLCTDCRIHFKKYGELPPIEKPVDPPPFMFKPVKEEDDGLSGKHSMRTRRSRGSMSTLRSGRKKQPASPDGRTSPINEDIRSSGRNSPSAASTSSNDSKAETVKKSAKKVKEEASSPLKSNKRQREKVASDTEEADRTSSKKTKTQEISRPNSPSEGEGESSDSRSVNDEGSSDPKDIDQDNRSTSPSIPSPQDNESDSDSSAQQQMLQAQPPALQAPTGVTPAPSSAPPGTPQLPTPGPTPSATAVPPQGSPTASQAPNQPQAPTAPVPHTHIQQAPALHPQRPPSPHPPPHPSPHPPLQPLTGSAGQPSAPSHAQPPLHGQGPPGPHSLQAGPLLQHPGPPQPFGLPPQASQGQAPLGTSPAAAYPHTSLQLPASQSALQSQQPPREQPLPPAPLAMPHIKPPPTTPIPQLPAPQAHKHPPHLSGPSPFSMNANLPPPPALKPLSSLSTHHPPSAHPPPLQLMPQSQPLPSSPAQPPGLTQSQNLPPPPASHPPTGLHQVAPQPPFAQHPFVPGGPPPITPPTCPSTSTPPAGPGTSAQPPCSGAAASGGSIAGGSSCPLPTVQIKEEALDDAEEPESPPPPPRSPSPEPTVVDTPSHASQSARFYKHLDRGYNSCARTDLYFMPLAGSKLAKKREEAIEKAKREAEQKAREEREREKEKEKEREREREREREAERAAKASSSAHEGRLSDPQLSGPGHMRPSFEPPPTTIAAVPPYIGPDTPALRTLSEYARPHVMSPTNRNHPFYMPLNPTDPLLAYHMPGLYNVDPTIRERELREREIREREIRERELRERMKPGFEVKPPELDPLHPAANPMEHFARHSALTIPPTAGPHPFASFHPGLNPLERERLALAGPQLRPEMSYPDRLAAERIHAERMASLTSDPLARLQMFNVTPHHHQHSHIHSHLHLHQQDPLHQGSAGPVHPLVDPLTAGPHLARFPYPPGTLPNPLLGQPPHEHEMLRHPVFGTPYPRDLPGAIPPPMSAAHQLQAMHAQSAELQRLAMEQQWLHGHPHMHGGHLPSQEDYYSRLKKEGDKQL

SEQ ID NO: 15567 - protein, 1097 aa, Homo sapiens
MATQVMGQSSGGGGLFTSSGNIGMALPNDMYDLHDLSKAELAAPQLIMLANVALTGEVNGSCCDYLVGEERQMAELMPVGDNNFSDSEEGEGLEESADIKGEPHGLENMELRSLELSVVEPQPVFEASGAPDIYSSNKDLPPETPGAEDKGKSSKTKPFRCKPCQYEAESEEQFVHHIRVHSAKKFFVEESAEKQAKARESGSSTAEEGDFSKGPIRCDRCGYNTNRYDHYTAHLKHHTRAGDNERVYKCIICTYTTVSEYHWRKHLRNHFPRKVYTCGKCNYFSDRKNNYVQHVRTHTGERPYKCELCPYSSSQKTHLTRHMRTHSGEKPFKCDQCSYVASNQHEVTRHARQVHNGPKPLNCPHCDYKTADRSNFKKHVELHVNPRQFNCPVCDYAASKKCNLQYHFKSKHPTCPNKTMDVSKVKLKKTKKREADLPDNITNEKTEIEQTKIKGDVAGKKNEKSVKAEKRDVSKEKKPSNNVSVIQVTTRTRKSVTEVKEMDVHTGSNSEKFSKTKKSKRKLEVDSHSLHGPVNDEESSTKKKKKVESKSKNNSQEVPKGDSKVEENKKQNTCMKKSTKKKTLKNKSSKKSSKPPQKEPVEKGSAQMDPPQMGPAPTEAVQKGPVQVEPPPPMEHAQMEGAQIRPAPDEPVQMEVVQEGPAQKELLPPVEPAQMVGAQIVLAHMELPPPMETAQTEVAQMGPAPMEPAQMEVAQVESAPMQVVQKEPVQMELSPPMEVVQKEPVQIELSPPMEVVQKEPVKIELSPPIEVVQKEPVQMELSPPMGVVQKEPAQREPPPPREPPLHMEPISKKPPLRKDKKEKSNMQSERARKEQVLIEVGLVPVKDSWLLKESVSTEDLSPPSPPLPKENLREEASGDQKLLNTGEGNKEAPLQKVGAEEADESLPGLAANINESTHISSSGQNLNTPEGETLNGKHQTDSIVCEMKMDTDQNTRENLTGINSTVEEPVSPMLPPSAVEEREAVSKTALASPPATMAANESQEIDEDEGIHSHEGSDLSDNMSEGSDDSGLHGARPVPQESSRKNAKEALAVKAAKGDFVCIFCDRSFRKGKDYSKHLNRHLVNVYYLEEAAQGQE

SEQ ID NO: 15568 - protein, 979 aa, Homo sapiens
MATQAYTELQAAPPPSQPPQAPPQAQPQPPPPPPPAAPQPPQPPTAAATPQPQYVTELQSPQPQAQPPGGQKQYVTELPAVPAPSQPTGAPTPSPAPQQYIVVTVSEGAMRASETVSEASPGSTASQTGVPTQVVQQVQGTQQRLLVQTSVQAKPGHVSPLQLTNIQVPQQALPTQRLVVQSAAPGSKGGQVSLTVHGTQQVHSPPEQSPVQANSSSSKTAGAPTGTVPQQLQVHGVQQSVPVTQERSVVQATPQAPKPGPVQPLTVQGLQPVHVAQEVQQLQQVPVPHVYSSQVQYVEGGDASYTASAIRSSTYSYPETPLYTQTASTSYYEAAGTATQVSTPATSQAVASSGSMPMYVSGSQVVASSTSTGAGASNSSGGGGSGGGGGGGGGGGGGGSGSTGGGGSGAGTYVIQGGYMLGSASQSYSHTTRASPATVQWLLDNYETAEGVSLPRSTLYCHYLLHCQEQKLEPVNAASFGKLIRSVFMGLRTRRLGTRGNSKYHYYGLRIKASSPLLRLMEDQQHMAMRGQPFSQKQRLKPIQKMEGMTNGVAVGQQPSTGLSDISAQVQQYQQFLDASRSLPDFTELDLQGKVLPEGVGPGDIKAFQVLYREHCEAIVDVMVNLQFTLVETLWKTFWRYNLSQPSEAPPLAVHDEAEKRLPKAILVLLSKFEPVLQWTKHCDNVLYQGLVEILIPDVLRPIPSALTQAIRNFAKSLESWLTHAMVNIPEEMLRVKVAAAGAFAQTLRRYTSLNHLAQAARAVLQNTAQINQMLSDLNRVDFANVQEQASWVCRCEDRVVQRLEQDFKVTLQQQNSLEQWAAWLDGVVSQVLKPYQGSAGFPKAAKLFLLKWSFYSSMVIRDLTLRSAASFGSFHLIRLLYDEYMYYLIEHRVAQAKGETPIAVMGEFANLATSLNPLDPDKDEEEEEEEESEDELPQDISLAAGGESPALGPETLEPPAKLARTDARGLFVQALPSS

SEQ ID NO: 15569 - protein, 723 aa, Homo sapiens
MQNSEGGADSPASVALRPSAAAPPVPASPQRVLVQAASSNPKGAQMQPISLPRVQQVPQQVQPVQHVYPAQVQYVEGGDAVYTNGAIRTAYTYNPEPQMYAPSSTASYFEAPGGAQVTVAASSPPAVPSHSMVGITMDVGGSPIVSSAGAYLIHGGMDSTRHSLAHTSRSSPATLEMAIENLQKSEGITSHKSGLLNSHLQWLLDNYETAEGVSLPRSSLYNHYLRHCQEHKLDPVNAASFGKLIRSVFMGLRTRRLGTRGNSKYHYYGIRLKPDSPLNRLQEDTQYMAMRQQPMHQKPRYRPAQKTDSLGDSGSHSGLHSTPEQTMAVQSQHHQQYIDVSHVFPEFPAPDLGSFLLQDGVTLHDVKALQLVYRRHCEATVDVVMNLQFHYIEKLWLSFWNSKASSSDGPTSLPASDEDPEGAVLPKDKLISLCQCDPILRWMRSCDHILYQALVEILIPDVLRPVPSTLTQAIRNFAKSLEGWLTNAMSDFPQQVIQTKVGVVSAFAQTLRRYTSLNHLAQAARAVLQNTSQINQMLSDLNRVDFANVQEQASWVCQCEESVVQRLEQDFKLTLQQQSSLDQWASWLDSVVTQVLKQHAGSPSFPKAARQFLLKWSFYSSMVIRDLTLRSAASFGSFHLIRLLYDEYMFYLVEHRVAEATGETPIAVMGEFNDLASLSLTLLDKDDMGDEQRGSEAGPDARSLGEPLVKRERSDPNHSLQGI

SEQ ID NO: 15570 - protein, 749 aa, Homo sapiens
MQTSETGSDTGSTVTLQTSVASQAAVPTQVVQQVPVQQQVQQVQTVQQVQHVYPAQVQYVEGSDTVYTNGAIRTTTYPYTETQMYSQNTGGNYFDTQGSSAQVTTVVSSHSMVGTGGIQMGVTGGQLISSSGGTYLIGNSMENSGHSVTHTTRASPATIEMAIETLQKSDGLSTHRSSLLNSHLQWLLDNYETAEGVSLPRSTLYNHYLRHCQEHKLDPVNAASFGKLIRSIFMGLRTRRLGTRGNSKYHYYGIRVKPDSPLNRLQEDMQYMAMRQQPMQQKQRYKPMQKVDGVADGFTGSGQQTGTSVEQTVIAQSQHHQQFLDASRALPEFGEVEISSLPDGTTFEDIKSLQSLYREHCEAILDVVVNLQFSLIEKLWQTFWRYSPSTPTDGTTITESSNLSEIESRLPKAKLITLCKHESILKWMCNCDHGMYQALVEILIPDVLRPIPSALTQAIRNFAKSLEGWLSNAMNNIPQRMIQTKVAAVSAFAQTLRRYTSLNHLAQAARAVLQNTSQINQMLSDLNRVDFANVQEQASWVCQCDDNMVQRLETDFKMTLQQQSTLEQWAAWLDNVMMQALKPYEGRPSFPKAARQFLLKWSFYSSMVIRDLTLRSAASFGSFHLIRLLYDEYMFYLVEHRVAQATGETPIAVMGEFGDLNAVSPGNLDKDEGSEVESEMDEELDDSSEPQAKREKTELSQAFPVGCMQPVLETGVQPSLLNPIHSEHIVTSTQTIRQCSATGNTYTAV

SEQ ID NO: 15571 - protein, 735 aa, Homo sapiens
MHCGLLEEPDMDSTESWIERCLNESENKRYSSHTSLGNVSNDENEEKENNRASKPHSTPATLQWLEENYEIAEGVCIPRSALYMHYLDFCEKNDTQPVNAASFGKIIRQQFPQLTTRRLGTRGQSKYHYYGIAVKESSQYYDVMYSKKGAAWVSETGKKEVSKQTVAYSPRSKLGTLLPEFPNVKDLNLPASLPEEKVSTFIMMYRTHCQRILDTVIRANFDEVQSFLLHFWQGMPPHMLPVLGSSTVVNIVGVCDSILYKAISGVLMPTVLQALPDSLTQVIRKFAKQLDEWLKVALHDLPENLRNIKFELSRRFSQILRRQTSLNHLCQASRTVIHSADITFQMLEDWRNVDLNSITKQTLYTMEDSRDEHRKLITQLYQEFDHLLEEQSPIESYIEWLDTMVDRCVVKVAAKRQGSLKKVAQQFLLMWSCFGTRVIRDMTLHSAPSFGSFHLIHLMFDDYVLYLLESLHCQERANELMRAMKGEGSTAEVREEIILTEAAAPTPSPVPSFSPAKSATSVEVPPPSSPVSNPSPEYTGLSTTGAMQSYTWSLTYTVTTAAGSPAENSQQLPCMRNTHVPSSSVTHRIPVYPHREEHGYTGSYNYGSYGNQHPHPMQSQYPALPHDTAISGPLHYAPYHRSSAQYPFNSPTSRMEPCLMSSTPRLHPTPVTPRWPEVPSANTCYTSPSVHSARYGNSSDMYTPLTTRRNSEYEHMQHFPGFAYINGEASTGWAK

SEQ ID NO: 15572 - protein, 616 aa, Homo sapiens
MAEDEPDAKSPKTGGRAPPGGAEAGEPTTLLQRLRGTISKAVQNKVEGILQDVQKFSDNDKLYLYLQLPSGPTTGDKSSEPSTLSNEEYMYAYRWIRNHLEEHTDTCLPKQSVYDAYRKYCESLACCRPLSTANFGKIIREIFPDIKARRLGGRGQSKYCYSGIRRKTLVSMPPLPGLDLKGSESPEMGPEVTPAPRDELVEAACALTCDWAERILKRSFSSIVEVARFLLQQHLISARSAHAHVLKAMGLAEEDEHAPRERSSKPKNGLENPEGGAHKKPERLAQPPKDLEARTGAGPLARGERKKSVVESSAPGANNLQVNALVARLPLLLPRAPRSLIPPIPVSPPILAPRLSSGALKVATLPLSSRAGAPPAAVPIINMILPTVPALPGPGPGPGRAPPGGLTQPRGTENREVGIGGDQGPHDKGVKRTAEVPVSEASGQAPPAKAAKQDIEDTASDAKRKRGRPRKKSGGSGERNSTPLKSAAAMESAQSSRLPWETWGSGGEGNSAGGAERPGPMGEAEKGAVLAQGQGDGTVSKGGRGPGSQHTKEAEDKIPLVPSKVSVIKGSRSQKEAFPLAKGEVDTAPQGNKDLKEHVLQSSLSQEHKDPKATPP

SEQ ID NO: 15573 - protein, 928 aa, Homo sapiens
MAKVPELEDTFLQAQPAPQLSPGIQEDCCVQLLGKGLLVYPEETVYLAAEGQPGGEQGGGEKGEDPELPGAVKSEMHLNNGNFSSEEEDADNHDSKTKAADQYLSQKKTITQIVKDKKKQTQLTLQWLEENYIVCEGVCLPRCILYAHYLDFCRKEKLEPACAATFGKTIRQKFPLLTTRRLGTRGHSKYHYYGIGIKESSAYYHSVYSGKGLTRFSGSKLKNEGGFTRKYSLSSKTGTLLPEFPSAQHLVYQGCISKDKVDTLIMMYKTHCQCILDNAINGNFEEIQHFLLHFWQGMPDHLLPLLENPVIIDIFCVCDSILYKVLTDVLIPATMQEMPESLLADIRNFAKNWEQWVVSSLENLPEALTDKKIPIVRRFVSSLKRQTSFLHLAQIARPALFDQHVVNSMVSDIERVDLNSIGSQALLTISGSTDTESGIYTEHDSITVFQELKDLLKKNATVEAFIEWLDTVVEQRVIKTSKQNGRSLKKRAQDFLLKWSFFGARVMHNLTLNNASSFGSFHLIRMLLDEYILLAMETQFNNDKEQELQNLLDKYMKNSDASKAAFTASPSSCFLANRNKGSMVSSDAVKNESHVETTYLPLPSSQPGGLGPALHQFPAGNTDNMPLTGQMELSQIAGHLMTPPISPAMASRGSVINQGPMAGRPPSVGPVLSAPSHCSTYPEPIYPTLPQANHDFYSTSSNYQTVFRAQPHSTSGLYPHHTEHGRCMAWTEQQLSRDFFSGSCAGSPYNSRPPSSYGPSLQAQDSHNMQFLNTGSFNFLSNTGAASCQGATLPPNSPNGYYGSNINYPESHRLGSMVNQHVSVISSIRSLPPYSDIHDPLNILDDSGRKQTSSFYTDTSSPVACRTPVLASSLQTPIPSSSSQCMYGTSNQYPAQETLDSHGTSSREMVSSLPPINTVFMGTAAGGT

SEQ ID NO: 15574 - protein, 1363 aa, Homo sapiens
MSSSRAQQMHAFSWIRNTLEEHPETSLPKQEVYDEYKSYCDNLGYHPLSAADFGKIMKNVFPNMKARRLGTRGKSKYCYSGLRKKAFVHMPTLPNLDFHKTGDGLEGAEPSGQLQNIDEEVISSACRLVCEWAQKVLSQPFDTVLELARFLVKSHYIGTKSMAALTVMAAAPAGMKGITQPSAFIPTAESNSFQPQVKTLPSPIDAKQQLQRKIQKKQQEQKLQSPLPGESAAKKSESATSNGVTNLPNGNPSILSPQPIGIVVAAVPSPIPVQRTRQLVTSPSPMSSSDGKVLPLNVQVVTQHMQSVKQAPKTPQNVPASPGGDRSARHRYPQILPKPANTSALTIRSPTTVLFTSSPIKTAVVPASHMSSLNVVKMTTISLTPSNSNTPLKHSASVSSATGTTEESRSVPQIKNGSVVSLQSPGSRSSSAGGTSAVEVKVEPETSSDEHPVQCQENSDEAKAPQTPSALLGQKSNTDGALQKPSNEGVIEIKATKVCDQRTKCKSRCNEMLPGTSTGNNQSTITLSVASQNLTFTSSSSPPNGDSINKDPKLCTKSPRKRLSSTLQETQVPPVKKPIVEQLSAATIEGQKQGSVKKDQKVPHSGKTEGSTAGAQIPSKVSVNVSSHIGANQPLNSSALVISDSALEQQTTPSSSPDIKVKLEGSVFLLDSDSKSVGSFNPNGWQQITKDSEFISASCEQQQDISVMTIPEHSDINDLEKSVWELEGMPQDTYSQQLHSQIQESSLNQIQAHSSDQLPLQSELKEFEPSVSQTNESYFPFDDELTQDSIVEELVLMEQQMSMNNSHSYGNCLGMTLQSQSVTPGAPMSSHTSSTHFYHPIHSNGTPIHTPTPTPTPTPTPTPTPTPTSEMIAGSQSLSRESPCSRLAQTTPVDSALGSSRHTPIGTPHSNCSSSVPPSPVECRNPFAFTPISSSMAYHDASIVSSSPVKPMQRPMATHPDKTKLEWMNNGYSGVGNSSVSGHGILPSYQELVEDRFRKPHAFAVPGQSYQSQSRHHDTHFGRLTPVSPVQHQGATVNNTNKQEGFAVPAPLDNKGTNSSASSNFRCRSVSPAVHRQRNLSGSTLYPVSNIPRSNVTPFGSPVTPEVHVFTNVHTDACANNIAQRSQSVPLTVMMQTAFPNALQKQANSKKITNVLLSKLDSDNDDAVRGLGMNNLPSNYTARMNLTQILEPSTVFPSANPQNMIDSSTSVYEFQTPSYLTKSNSTGQINFSPGDNQAQSEIGEQQLDFNSTVKDLLSGDSLQTNQQLVGQGASDLTNTASDFSSDIRLSSELSGSINDLNTLDPNLLFDPGRQQGQDDEATLEELKNDPLFQQICSESMNSMTSSGFEWIESKDHPTVEMLG

SEQ ID NO: 15575 - protein, 586 aa, Homo sapiens
MAEGVPASPSSGEGSRGPHSGVIQWLVDNFCICEECSVPRCLMYEIYVETCGQNTENQVNPATFGKLVRLVFPDLGTRRLGTRGSARYHYDGICIKKSSFFYAQYCYLIGEKRYHSGDAIAFEKSTNYNSIIQQEATCEDHSPMKTDPVGSPLSEFRRCPFLEQEQAKKYSCNMMAFLADEYCNYCRDILRNVEDLLTSFWKSLQQDTVMLMSLPDVCQLFKCYDVQLYKGIEDVLLHDFLEDVSIQYLKSVQLFSKKFKLWLLNALEGVPALLQISKLKEVTLFVKRLRRKTYLSNMAKTMRMVLKSKRRVSVLKSDLQAIINQGTLATSKKALASDRSGADELENNPEMKCLRNLISLLGTSTDLRVFLSCLSSHLQAFVFQTSRSKEEFTKLAASFQLRWNLLLTAVSKAMTLCHRDSFGSWHLFHLLLLEYMIHILQSCLEEEEEEEDMGTVKEMLPDDPTLGQPDQALFHSLNSSLSQACASPSMEPLGVMPTHMGQGRYPVGVSNMVLRILGFLVDTAMGNKLIQVLLEDETTESAVKLSLPMGQEALITLKDGQQFVIQISDVPQSSEDIYFRENNANV

SEQ ID NO: 15576 - protein, 260 aa, Homo sapiens
MELTQPAEDLIQTQQTPASELGDPEDPGEEAADGSDTVVLSLFPCTPEPVNPEPDASVSSPQAGSSLKHSTTLTNRQRGNEVSALPATLDSLSIHQLAAQGELDQLKEHLRKGDNLVNKPDERGFTPLIWASAFGEIETVRFLLEWGADPHILAKERESALSLASTGGYTDIVGLLLERDVDINIYDWNGGTPLLYAVRGNHVKCVEALLARGADLTTEADSGYTPMDLAVALGYRKVQQVIENHILKLFQSNLVPADPE

SEQ ID NO: 15577 - protein, 272 aa, Homo sapiens
MEAQGVAEGAGPGAASGVPHPAALAPAAAPTLAPASVAAAASQFTLLVMQPCAGQDEAAAPGGSVGAGKPVRYLCEGAGDGEEEAGEDEADLLDTSDPPGGGESAASLEDLEDEETHSGGEGSSGGARRRGSGGGSMSKTCTYEGCSETTSQVAKQRKPWMCKKHRNKMYKDKYKKKKSDQALNCGGTASTGSAGNVKLEESADNILSIVKQRTGSFGDRPARPTLLEQVLNQKRLSLLRSPEVVQFLQKQQQLLNQQVLEQRQQQFPGTSM

SEQ ID NO: 15578 - protein, 184 aa, Homo sapiens
MARSLVHDTVFYCLSVYQVKISPTPQLGAASSAEGHVGQGAPGLMGNMNPEGGVNHENGMNRDGGMIPEGGGGNQEPRQQPQPPPEEPAQAAMEGPQPENMQPRTRRTKFTLLQVEELESVFRHTQYPDVPTRRELAENLGVTEDKVRVWFKNKRARCRRHQRELMLANELRADPDDCVYIVVD

SEQ ID NO: 15579 - protein, 288 aa, Homo sapiens
MEPPDQCSQYMTSLLSPAVDDEKELQDMNAMVLSLTEEVKEEEEDAQPEPEQGTAAGEKLKSAGAQGGEEKDGGGEEKDGGGAGVPGHLWEGDLEGTSGSDGNVEDSDQSEKEPGQQYSRPQGAVGGLEPGNAQQPNVHAFTPLQLQELERIFQREQFPSEFLRRRLARSMNVTELAVQIWFENRRAKWRRHQRALMARNMLPFMAVGQPVMVTAAEAITAPLFISGMRDDYFWDHSHSSSLCFPMPPFPPPSLPLPLMLLPPMPPAGQAEFGPFPFVIVPSFTFPNV

SEQ ID NO: 15580 - protein, 288 aa, Homo sapiens
MEPPDQCSQYMTSLLSPAVDDEKELQDMNAMVLSLTEEVKEEEEDAQPEPEQGTAAGEKLKSAGAQGGEEKDGGGEEKDGGGAGVPGHLWEGNLEGTSGSDGNVEDSDQSEKEPGQQYSRPQGAVGGLEPGNAQQPNVHAFTPLQLQELECIFQREQFPSEFLRRRLARSMNVTELAVQIWFENRRAKWRRHQRALMARNMLPFMAVGQPVMVTAAEAITAPLFISGMRDDYFWDHSHSSSLCFPMPPFPPPSLPLPLMLLPPMPPAGQAEFGPFPFVIVPSFTFPNV

SEQ ID NO: 15581 - protein, 131 aa, Homo sapiens; identical to SEQ ID NO: 7198

SEQ ID NO: 15582 - protein, 1914 aa, Homo sapiens
MADGKGDAAAVAGAGAEAPAVAGAGDGVETESMVRGHRPVSPAPGASGLRPCLWQLETELREQEVSEVSSLNYCRSFCQTLLQYASNKNASEHIVYLLEVYRLAIQSFASARPYLTTECEDVLLVLGRLVLSCFELLLSVSESELPCEVWLPFLQSLQESHDALLEFGNNNLQILVHVTKEGVWKNPVLLKILSQQPVETEEVNKLIAQEGPSFLQMRIKHLLKSNCIPQATALSKLCAESKEISNVSSFQQAYITCLCSMLPNEDAIKEIAKVDCKEVLDIICNLESEGQDNTAFVLCTTYLTQQLQTASVYCSWELTLFWSKLQRRIDPSLDTFLERCRQFGVIAKTQQHLFCLIRVIQTEAQDAGLGVSILLCVRALQLRSSEDEEMKASVCKTIACLLPEDLEVRRACQLTEFLIEPSLDGFNMLEELYLQPDQKFDEENAPVPNSLRCELLLALKAHWPFDPEFWDWKTLKRHCHQLLGQEASDSDDDLSGYEMSINDTDVLESFLSDYDEGKEDKQYRRRDLTDQHKEKRDKKPIGSSERYQRWLQYKFFCLLCKRECIEARILHHSKMHMEDGIYTCPVCIKKFKRKEMFVPHVMEHVKMPPSRRDRSKKKLLLKGSQKGICPKSPSAIPEQNHSLNDQAKGESHEYVTFSKLEDCHLQDRDLYPCPGTDCSRVFKQFKYLSVHLKAEHQNNDENAKHYLDMKNRREKCTYCRRHFMSAFHLREHEQVHCGPQPYMCVSIDCYARFGSVNELLNHKQKHDDLRYKCELNGCNIVFSDLGQLYHHEAQHFRDASYTCNFLGCKKFYYSKIEYQNHLSMHNVENSNGDIKKSVKLEESATGEKQDCINQPHLLNQTDKSHLPEDLFCAESANSQIDTETAENLKENSDSNSSDQLSHSSSASMNEELIDTLDHSETMQDVLLSNEKVFGPSSLKEKCSSMAVCFDGTKFTCGFDGCGSTYKNARGMQKHLRKVHPYHFKPKKIKTKDLFPSLGNEHNQTTEKLDAEPKPCSDTNSDSPDEGLDHNIHIKCKREHQGYSSESSICASKRPCTEDTMLELLLRLKHLSLKNSITHGSFSGSLQGYPSSGAKSLQSVSSISDLNFQNQDENMPSQYLAQLAAKPFFCELQGCKYEFVTREALLMHYLKKHNYSKEKVLQLTMFQHRYSPFQCHICQRSFTRKTHLRIHYKNKHQIGSDRATHKLLDNEKCDHEGPCSVDRLKGDCSAELGGDPSSNSEKPHCHPKKDECSSETDLESSCEETESKTSDISSPIGSHREEQEGREGRGSRRTVAKGNLCYILNKYHKPFHCIHKTCNSSFTNLKGLIRHYRTVHQYNKEQLCLEKDKARTKRELVKCKKIFACKYKECNKRFLCSKALAKHCSDSHNLDHIEEPKVLSEAGSAARFSCNQPQCPAVFYTFNKLKHHLMEQHNIEGEIHSDYEIHCDLNGCGQIFTHRSNYSQHVYYRHKDYYDDLFRSQKVANERLLRSEKVCQTADTQGHEHQTTRRSFNAKSKKCGLIKEKKAPISFKTRAEALHMCVEHSEHTQYPCMVQGCLSVVKLESSIVRHYKRTHQMSSAYLEQQMENLVVCVKYGTKIKEEPPSEADPCIKKEENRSCESERTEHSHSPGDSSAPIQNTDCCHSSERDGGQKGCIESSSVFDADTLLYRGTLKCNHSSKTTSLEQCNIVQPPPPCKIENSIPNPNGTESGTYFTSFQLPLPRIKESETRQHSSGQENTVKNPTHVPKENFRKHSQPRSFDLKTYKPMGFESSFLKFIQESEEKEDDFDDWEPSEHLTLSNSSQSSNDLTGNVVANNMVNDSEPEVDIPHSSSDSTIHENLTAIPPLIVAETTTVPSLENLRVVLDKALTDCGELALKQLHYLRPVVVLERSKFSTPILDLFPTKKTDELCVGSS

SEQ ID NO: 15583 - protein, 523 aa, Homo sapiens
MESAPAAPDPAASEPGSSGADAAAGSRETPLNQESARKSEPPAPVRRQSYSSTSRGISVTKKTHTSQIEIIPCKICGDKSSGIHYGVITCEGCKGFFRRSQQSNATYSCPRQKNCLIDRTSRNRCQHCRLQKCLAVGMSRDAVKFGRMSKKQRDSLYAEVQKHRMQQQQRDHQQQPGEAEPLTPTYNISANGLTELHDDLSNYIDGHTPEGSKADSAVSSFYLDIQPSPDQSGLDINGIKPEPICDYTPASGFFPYCSFTNGETSPTVSMAELEHLAQNISKSHLETCQYLREELQQITWQTFLQEEIENYQNKQREVMWQLCAIKITEAIQYVVEFAKRIDGFMELCQNDQIVLLKAGSLEVVFIRMCRAFDSQNNTVYFDGKYASPDVFKSLGCEDFISFVFEFGKSLCSMHLTEDEIALFSAFVLMSADRSWLQEKVKIEKLQQKIQLALQHVLQKNHREDGILTKLICKVSTLRALCGRHTEKLMAFKAIYPDIVRLHFPPLYKELFTSEFEPAMQIDG

SEQ ID NO: 15584 - protein, 470 aa, Homo sapiens
MCENQLKTKADATAQIEVIPCKICGDKSSGIHYGVITCEGCKGFFRRSQQNNASYSCPRQRNCLIDRTNRNRCQHCRLQKCLALGMSRDAVKFGRMSKKQRDSLYAEVQKHQQRLQEQRQQQSGEAEALARVYSSSISNGLSNLNNETSGTYANGHVIDLPKSEGYYNVDSGQPSPDQSGLDMTGIKQIKQEPIYDLTSVPNLFTYSSFNNGQLAPGITMTEIDRIAQNIIKSHLETCQYTMEELHQLAWQTHTYEEIKAYQSKSREALWQQCAIQITHAIQYVVEFAKRITGFMELCQNDQILLLKSGCLEVVLVRMCRAFNPLNNTVLFEGKYGGMQMFKALGSDDLVNEAFDFAKNLCSLQLTEEEIALFSSAVLISPDRAWLIEPRKVQKLQEKIYFALQHVIQKNHLDDETLAKLIAKIPTITAVCNLHGEKLQVFKQSHPEIVNTLFPPLYKELFNPDCATGCK

SEQ ID NO: 15585 - protein, 518 aa, Homo sapiens
MDRAPQRQHRASRELLAAKKTHTSQIEVIPCKICGDKSSGIHYGVITCEGCKGFFRRSQRCNAAYSCTRQQNCPIDRTSRNRCQHCRLQKCLALGMSRDAVKFGRMSKKQRDSLHAEVQKQLQQRQQQQQEPVVKTPPAGAQGADTLTYTLGLPDGQLPLGSSPDLPEASACPPGLLKASGSGPSYSNNLAKAGLNGASCHLEYSPERGKAEGRESFYSTGSQLTPDRCGLRFEEHRHPGLGELGQGPDSYGSPSFRSTPEAPYASLTEIEHLVQSVCKSYRETCQLRLEDLLRQRSNIFSREEVTGYQRKSMWEMWERCAHHLTEAIQYVVEFAKRLSGFMELCQNDQIVLLKAGAMEVVLVRMCRAYNADNRTVFFEGKYGGMELFRALGCSELISSIFDFSHSLSALHFSEDEIALYTALVLINAHRPGLQEKRKVEQLQYNLELAFHHHLCKTHRQSILAKLPPKGKLRSLCSQHVERLQIFQHLHPIVVQAAFPPLYKELFSTETESPVGLSK

SEQ ID NO: 15586 - protein, 497 aa, Homo sapiens
MRTQIEVIPCKICGDKSSGIHYGVITCEGCKGFFRRSQRCNAAYSCTRQQNCPIDRTSRNRCQHCRLQKCLALGMSRDAVKFGRMSKKQRDSLHAEVQKQLQQRQQQQQEPVVKTPPAGAQGADTLTYTLGLPDGQLPLGSSPDLPEASACPPGLLKASGSGPSYSNNLAKAGLNGASCHLEYSPERGKAEGRESFYSTGSQLTPDRCGLRFEEHRHPGLGELGQGPDSYGSPSFRSTPEAPYASLTEIEHLVQSVCKSYRETCQLRLEDLLRQRSNIFSREEVTGYQRKSMWEMWERCAHHLTEAIQYVVEFAKRLSGFMELCQNDQIVLLKAGAMEVVLVRMCRAYNADNRTVFFEGKYGGMELFRALGCSELISSIFDFSHSLSALHFSEDEIALYTALVLINAHRPGLQEKRKVEQLQYNLELAFHHHLCKTHRQSILAKLPPKGKLRSLCSQHVERLQIFQHLHPIVVQAAFPPLYKELFSTETESPVGLSK

SEQ ID NO: 15587 - protein, 1687 aa, Homo sapiens
MTSSSPAGLEGSDLSSINTMMSAVMSVGKVTENGGSPQGIKSPSKPPGPNRIGRRNQETKEEKSSYNCPLCEKICTTQHQLTMHIRQHNTDTGGADHSCSICGKSLSSASSLDRHMLVHSGERPYKCTVCGQSFTTNGNMHRHMKIHEKDPNSATATAPPSPLKRRRLSSKRKLSHDAESEREDPAPAKKMVEDGQSGDLEKKADEVFHCPVCFKEFVCKYGLETHMETHSDNPLRCDICCVTFRTHRGLLRHNALVHKQLPRDAMGRPFIQNNPSIPAGFHDLGFTDFSCRKFPRISQAWCETNLRRCISEQHRFVCDTCDKAFPMLCSLALHKQTHVAADQGQEKPQATPLPGDALDQKGFLALLGLQHTKDVRPAPAEEPLPDDNQAIQLQTLKCQLPQDPGCTNLLSLSPFEAASLGGSLTVLPATKDSIKHLSLQPFQKGFIIQPDSSIVVKPISGESAIELADIQQILKMAASAPPQISLPPFSKAPAAPLQAIFKHMPPLKPKPLVTPRTVVATSTPPPLINAQQASPGCISPSLPPPPLKLLKGSVEAASNAHLLQSKSGTQPHAATRLSLQQPRAELPGQPEMKTQLEQDSIIEALLPLSMEAKIKQEITEGELKAFMTAPGGKKTPAMRKVLYPCRFCNQVFAFSGVLRAHVRSHLGISPYQCNICDYIAADKAALIRHLRTHSGERPYICKICHYPFTVKANCERHLRKKHLKATRKDIEKNIEYVSSSAAELVDAFCAPDTVCRLCGEDLKHYRALRIHMRTHCGRGLGGGHKGRKPFECKECSAAFAAKRNCIHHILKQHLHVPEQDIESYVLAADGLGPAEAPAAEASGRGEDSGCAALGDCKPLTAFLEPQNGFLHRGPTQPPPPHVSIKLEPASSFAVDFNEPLDFSQKGLALVQVKQENISFLSPSSLVPYDCSMEPIDLSIPKNFRKGDKDLATPSEAKKPEEEAGSSEQPSPCPAPGPSLPVTLGPSGILESPMAPAPAATPEPPAQPLQGPVQLAVPIYSSALVSSPPLVGSSALLSGTALLRPLRPKPPLLLPKPPVTEELPPLASIAQIISSVSSAPTLLKTKVADPGPASTGSNTTASDSLGGSVPKAATTATPAATTSPKESSEPPAPASSPEAASPTEQGPAGTSKKRGRKRGMRSRPRANSGGVDLDSSGEFASIEKMLATTDTNKFSPFLQTAEDNTQDEVAGAPADHHGPSDEEQGSPPEDKLLRAKRNSYTNCLQKITCPHCPRVFPWASSLQRHMLTHTDSQSDAETAAAAGEVLDLTSRDREQPSEGATELRQVAGDAPVEQATAETASPVHREEHGRGESHEPEEEHGTEESTGDADGAEEDASSNQSLDLDFATKLMDFKLAEGDGEAGAGGAASQEQKLACDTCGKSFKFLGTLSRHRKAHGRQEPKDEKGDGASTAEEGPQPAPEQEEKPPETPAEVVESAPGAGEAPAEKLAEETEGPSDGESAAEKRSSEKSDDDKKPKTDSPKSVASKADKRKKVCSVCNKRFWSLQDLTRHMRSHTGERPYKCQTCERTFTLKHSLVRHQRIHQKARHAKHHGKDSDKEERGEEDSENESTHSGNNAVSENEAELAPNASNHMAVTRSRKEGLASATKDCSHREEKVTAGWPSEPGQGDLNPESPAALGQDLLEPRSKRPAHPILATADGASQLVGME

SEQ ID NO: 15588 - protein, 453 aa, Homo sapiens
MRIPVDASTSRRFTPPSTALSPGKMSEALPLGAPDAGAALAGKLRSGDRSMVEVLADHPGELVRTDSPNFLCSVLPTHWRCNKTLPIAFKVVALGDVPDGTLVTVMAGNDENYSAELRNATAAMKNQVARFNDLRFVGRSGRGKSFTLTITVFTNPPQVATYHRAIKITVDGPREPRRHRQKLDDQTKPGSLSFSERLSELEQLRRTAMRVSPHHPAPTPNPRASLNHSTAFNPQPQSQMQDTRQIQPSPPWSYDQSYQYLGSIASPSVHPATPISPGRASGMTTLSAELSSRLSTAPDLTAFSDPRQFPALPSISDPRMHYPGAFTYSPTPVTSGIGIGMSAMGSATRYHTYLPPPYPGSSQAQGGPFQASSPSYHLYYGASAGSYQFSMVGGERSPPRILPPCTNASTGSALLNPSLPNQSDVVEAEGSHSNSPTNMAPSARLEEAVWRPY

SEQ ID NO: 15589 - protein, 604 aa, Homo sapiens
MISVKRNTWRALSLVIGDCRKKGNFEYCQDRTEKHSTMPDSPVDVKTQSRLTPPTMPPPPTTQGAPRTSSFTPTTLTNGTSHSPTALNGAPSPPNGFSNGPSSSSSSSLANQQLPPACGARQLSKLKRFLTTLQQFGNDISPEIGERVRTLVLGLVNSTLTIEEFHSKLQEATNFPLRPFVIPFLKANLPLLQRELLHCARLAKQNPAQYLAQHEQLLLDASTTSPVDSSELLLDVNENGKRRTPDRTKENGFDREPLHSEHPSKRPCTISPGQRYSPNNGLSYQPNGLPHPTPPPPQHYRLDDMAIAHHYRDSYRHPSHRDLRDRNRPMGLHGTRQEEMIDHRLTDREWAEEWKHLDHLLNCIMDMVEKTRRSLTVLRRCQEADREELNYWIRRYSDAEDLKKGGGSSSSHSRQQSPVNPDPVALDAHREFLHRPASGYVPEEIWKKAEEAVNEVKRQAMTELQKAVSEAERKAHDMITTERAKMERTVAEAKRQAAEDALAVINQQEDSSESCWNCGRKASETCSGCNTARYCGSFCQHKDWEKHHHICGQTLQAQQQGDTPAVSSSVTPNSGAGSPMDTPPAATPRSTTPGTPSTIETTPR

SEQ ID NO: 15590 - protein, 521 aa, Homo sapiens
MASNSLFSTVTPCQQNFFWDPSTSRRFSPPSSSLQPGKMSDVSPVVAAQQQQQQQQQQQQQQQQQQQQQQQEAAAAAAAAAAAAAAAAAVPRLRPPHDNRTMVEIIADHPAELVRTDSPNFLCSVLPSHWRCNKTLPVAFKVVALGEVPDGTVVTVMAGNDENYSAELRNASAVMKNQVARFNDLRFVGRSGRGKSFTLTITVFTNPPQVATYHRAIKVTVDGPREPRRHRQKLDDSKPSLFSDRLSDLGRIPHPSMRVGVPPQNPRPSLNSAPSPFNPQGQSQITDPRQAQSSPPWSYDQSYPSYLSQMTSPSIHSTTPLSSTRGTGLPAITDVPRRISDDDTATSDFCLWPSTLSKKSQAGASELGPFSDPRQFPSISSLTESRFSNPRMHYPATFTYTPPVTSGMSLGMSATTHYHTYLPPPYPGSSQSQSGPFQTSSTPYLYYGTSSGSYQFPMVPGGDRSPSRMLPPCTTTSNGSTLLNPNLPNQNDGVDADGSHSSSPTVLNSSGRMDESVWRPY

SEQ ID NO: 15591 - protein, 415 aa, Homo sapiens
MRIPVDPSTSRRFTPPSPAFPCGGGGGKMGENSGALSAQAAVGPGGRARPEVRSMVDVLADHAGELVRTDSPNFLCSVLPSHWRCNKTLPVAFKVVALGDVPDGTVVTVMAGNDENYSAELRNASAVMKNQVARFNDLRFVGRSGRGKSFTLTITVFTNPTQVATYHRAIKVTVDGPREPRRHRQKLEDQTKPFPDRFGDLERLRMRVTPSTPSPRGSLSTTSHFSSQPQTPIQGTSELNPFSDPRQFDRSFPTLPTLTESRFPDPRMHYPGAMSAAFPYSATPSGTSISSLSVAGMPATSRFHHTYLPPPYPGAPQNQSGPFQANPSPYHLYYGTSSGSYQFSMVAGSSSGGDRSPTRMLASCTSSAASVAAGNLMNPSLGGQSDGVEADGSHSNSPTALSTPGRMDEAVWRPY

SEQ ID NO: 15592 - protein, 462 aa, Homo sapiens
MDTKHFLPLDFSTQVNSSLTSPTGRGSMAAPSLHPSLGPGIGSPGQLHSPISTLSSPINGMGPPFSVISSPMGPHSMSVPTTPTLGFSTGSPQLSSPMNPVSSSEDIKPPLGLNGVLKVPAHPSGNMASFTKHICAICGDRSSGKHYGVYSCEGCKGFFKRTVRKDLTYTCRDNKDCLIDKRQRNRCQYCRYQKCLAMGMKREAVQEERQRGKDRNENEVESTSSANEDMPVERILEAELAVEPKTETYVEANMGLNPSSPNDPVTNICQAADKQLFTLVEWAKRIPHFSELPLDDQVILLRAGWNELLIASFSHRSIAVKDGILLATGLHVHRNSAHSAGVGAIFDRVLTELVSKMRDMQMDKTELGCLRAIVLFNPDSKGLSNPAEVEALREKVYASLEAYCKHKYPEQPGRFAKLLLRLPALRSIGLKCLEHLFFFKLIGDTPIDTFLMEMLEAPHQMT

SEQ ID NO: 15593 - protein, 533 aa, Homo sapiens
MSWAARPPFLPQRHAAGQCGPVGVRKEMHCGVASRWRRRRPWLDPAAAAAAAVAGGEQQTPEPEPGEAGRDGMGDSGRDSRSPDSSSPNPLPQGVPPPSPPGPPLPPSTAPSLGGSGAPPPPPMPPPPLGSPFPVISSSMGSPGLPPPAPPGFSGPVSSPQINSTVSLPGGGSGPPEDVKPPVLGVRGLHCPPPPGGPGAGKRLCAICGDRSSGKHYGVYSCEGCKGFFKRTIRKDLTYSCRDNKDCTVDKRQRNRCQYCRYQKCLATGMKREAVQEERQRGKDKDGDGEGAGGAPEEMPVDRILEAELAVEQKSDQGVEGPGGTGGSGSSPNDPVTNICQAADKQLFTLVEWAKRIPHFSSLPLDDQVILLRAGWNELLIASFSHRSIDVRDGILLATGLHVHRNSAHSAGVGAIFDRVLTELVSKMRDMRMDKTELGCLRAIILFNPDAKGLSNPSEVEVLREKVYASLETYCKQKYPEQQGRFAKLLLRLPALRSIGLKCLEHLFFFKLIGDTPIDTFLMEMLEAPHQLA

SEQ ID NO: 15594 - protein, 463 aa, Homo sapiens
MYGNYSHFMKFPAGYGGSPGHTGSTSMSPSAALSTGKPMDSHPSYTDTPVSAPRTLSAVGTPLNALGSPYRVITSAMGPPSGALAAPPGINLVAPPSSQLNVVNSVSSSEDIKPLPGLPGIGNMNYPSTSPGSLVKHICAICGDRSSGKHYGVYSCEGCKGFFKRTIRKDLIYTCRDNKDCLIDKRQRNRCQYCRYQKCLVMGMKREAVQEERQRSRERAESEAECATSGHEDMPVERILEAELAVEPKTESYGDMNMENSTNDPVTNICHAADKQLFTLVEWAKRIPHFSDLTLEDQVILLRAGWNELLIASFSHRSVSVQDGILLATGLHVHRSSAHSAGVGSIFDRVLTELVSKMKDMQMDKSELGCLRAIVLFNPDAKGLSNPSEVETLREKVYATLEAYTKQKYPEQPGRFAKLLLRLPALRSIGLKCLEHLFFFKLIGDTPIDTFLMEMLETPLQIT

SEQ ID NO: 15595 - protein, 1324 aa, Homo sapiens
MSRRKQAKPQHFQSDPEVASLPRRDGDTEKGQPSRPTKSKDAHVCGRCCAEFFELSDLLLHKKNCTKNQLVLIVNENPASPPETFSPSPPPDNPDEQMNDTVNKTDQVDCSDLSEHNGLDREESMEVEAPVANKSGSGTSSGSHSSTAPSSSSSSSSSSGGGGSSSTGTSAITTSLPQLGDLTTLGNFSVINSNVIIENLQSTKVAVAQFSQEARCGGASGGKLAVPALMEQLLALQQQQIHQLQLIEQIRHQILLLASQNADLPTSSSPSQGTLRTSANPLSTLSSHLSQQLAAAAGLAQSLASQSASISGVKQLPPIQLPQSSSGNTIIPSNSGSSPNMNILAAAVTTPSSEKVASSAGASHVSNPAVSSSSSPAFAISSLLSPASNPLLPQQASANSVFPSPLPNIGTTAEDLNSLSALAQQRKSKPPNVTAFEAKSTSDEAFFKHKCRFCAKVFGSDSALQIHLRSHTGERPFKCNICGNRFSTKGNLKVHFQRHKEKYPHIQMNPYPVPEHLDNIPTSTGIPYGMSIPPEKPVTSWLDTKPVLPTLTTSVGLPLPPTLPSLIPFIKTEEPAPIPISHSATSPPGSVKSDSGGPESATRNLGGLPEEAEGSTLPPSGGKSEESGMVTNSVPTASSSVLSSPAADCGPAGSATTFTNPLLPLMSEQFKAKFPFGGLLDSAQASETSKLQQLVENIDKKATDPNECIICHRVLSCQSALKMHYRTHTGERPFKCKICGRAFTTKGNLKTHYSVHRAMPPLRVQHSCPICQKKFTNAVVLQQHIRMHMGGQIPNTPVPDSYSESMESDTGSFDEKNFDDLDNFSDENMEDCPEGSIPDTPKSADASQDSLSSSPLPLEMSSIAALENQMKMINAGLAEQLQASLKSVENGSIEGDVLTNDSSSVGGDMESQSAGSPAISESTSSMQALSPSNSTQEFHKSPSIEEKPQRAVPSEFANGLSPTPVNGGALDLTSSHAEKIIKEDSLGILFPFRDRGKFKNTACDICGKTFACQSALDIHYRSHTKERPFICTVCNRGFSTKGNLKQHMLTHQMRDLPSQLFEPSSNLGPNQNSAVIPANSLSSLIKTEVNGFVHVSPQDSKDTPTSHVPSGPLSSSATSPVLLPALPRRTPKQHYCNTCGKTFSSSSALQIHERTHTGEKPFACTICGRAFTTKGNLKVHMGTHMWNSTPARRGRRLSVDGPMTFLGGNPVKFPEMFQKDLAARSGSGDPSSFWNQYAAALSNGLAMKANEISVIQNGGIPPIPGSLGSGNSSPVSGLTGNLERLQNSEPNAPLAGLEKMASSENGTNFRFTRFVEDSKEIVTS

SEQ ID NO: 15596 - protein, 1007 aa, Homo sapiens
MSRRKQRKPQQLISDCEGPSASENGDASEEDHPQVCAKCCAQFTDPTEFLAHQNACSTDPPVMVIIGGQENPNNSSASSEPRPEGHNNPQVMDTEHSNPPDSGSSVPTDPTWGPERRGEESPGHFLVAATGTAAGGGGGLILASPKLGATPLPPESTPAPPPPPPPPPPPGVGSGHLNIPLILEELRVLQQRQIHQMQMTEQICRQVLLLGSLGQTVGAPASPSELPGTGTASSTKPLLPLFSPIKPVQTSKTLASSSSSSSSSSGAETPKQAFFHLYHPLGSQHPFSAGGVGRSHKPTPAPSPALPGSTDQLIASPHLAFPSTTGLLAAQCLGAARGLEATASPGLLKPKNGSGELSYGEVMGPLEKPGGRHKCRFCAKVFGSDSALQIHLRSHTGERPYKCNVCGNRFTTRGNLKVHFHRHREKYPHVQMNPHPVPEHLDYVITSSGLPYGMSVPPEKAEEEAATPGGGVERKPLVASTTALSATESLTLLSTSAGTATAPGLPAFNKFVLMKAVEPKNKADENTPPGSEGSAISGVAESSTATRMQLSKLVTSLPSWALLTNHFKSTGSFPFPYVLEPLGASPSETSKLQQLVEKIDRQGAVAVTSAASGAPTTSAPAPSSSASSGPNQCVICLRVLSCPRALRLHYGQHGGERPFKCKVCGRAFSTRGNLRAHFVGHKASPAARAQNSCPICQKKFTNAVTLQQHVRMHLGGQIPNGGTALPEGGGAAQENGSEQSTVSGAGSFPQQQSQQPSPEEELSEEEEEEDEEEEEDVTDEDSLAGRGSESGGEKAISVRGDSEEASGAEEEVGTVAAAATAGKEMDSNEKTTQQSSLPPPPPPDSLDQPQPMEQGSSGVLGGKEEGGKPERSSSPASALTPEGEATSVTLVEELSLQEAMRKEPGESSSRKACEVCGQAFPSQAALEEHQKTHPKEGPLFTCVFCRQGFLERATLKKHMLLAHHQVQPFAPHGPQNIAALSLVPGCSPSITSTGLSPFPRKDDPTIP

SEQ ID NO: 15597 - protein, 1300 aa, Homo sapiens
MSRRKQAKPQHLKSDEELLPPDGAPEHAAPGEGAEDADSGPESRSGGEETSVCEKCCAEFFKWADFLEHQRSCTKLPPVLIVHEDAPAPPPEDFPEPSPASSPSERAESEAAEEAGAEGAEGEARPVEKEAEPMDAEPAGDTRAPRPPPAAPAPPTPAYGAPSTNVTLEALLSTKVAVAQFSQGARAAGGSGAGGGVAAAAVPLILEQLMALQQQQIHQLQLIEQIRSQVALMQRPPPRPSLSPAAAPSAPGPAPSQLPGLAALPLSAGAPAAAIAGSGPAAPAAFEGAQPLSRPESGASTPGGPAEPSAPAAPSAAPAPAAPAPAPAPQSAASSQPQSASTPPALAPGSLLGAAPGLPSPLLPQTSASGVIFPNPLVSIAATANALDPLSALMKHRKGKPPNVSVFEPKASAEDPFFKHKCRFCAKVFGSDSALQIHLRSHTGERPFKCNICGNRFSTKGNLKVHFQRHKEKYPHIQMNPYPVPEYLDNVPTCSGIPYGMSLPPEKPVTTWLDSKPVLPTVPTSVGLQLPPTVPGAHGYADSPSATPASRSPQRPSPASSECASLSPGLNHVESGVSATAESPQSLLGGPPLTKAEPVSLPCTNARAGDAPVGAQASAAPTSVDGAPTSLGSPGLPAVSEQFKAQFPFGGLLDSMQTSETSKLQQLVENIDKKMTDPNQCVICHRVLSCQSALKMHYRTHTGERPFKCKICGRAFTTKGNLKTHFGVHRAKPPLRVQHSCPICQKKFTNAVVLQQHIRMHMGGQIPNTPLPEGFQDAMDSELAYDDKNAETLSSYDDDMDENSMEDDAELKDAATDPAKPLLSYAGSCPPSPPSVISSIAALENQMKMIDSVMSCQQLTGLKSVENGSGESDRLSNDSSSAVGDLESRSAGSPALSESSSSQALSPAPSNGESFRSKSPGLGAPEEPQEIPLKTERPDSPAAAPGSGGAPGRAGIKEEAPFSLLFLSRERGKCPSTVCGVCGKPFACKSALEIHYRSHTKERPFVCALCRRGCSTMGNLKQHLLTHRLKELPSQLFDPNFALGPSQSTPSLISSAAPTMIKMEVNGHGKAMALGEGPPLPAGVQVPAGPQTVMGPGLAPMLAPPPRRTPKQHNCQSCGKTFSSASALQIHERTHTGEKPFGCTICGRAFTTKGNLKVHMGTHMWNNAPARRGRRLSVENPMALLGGDALKFSEMFQKDLAARAMNVDPSFWNQYAAAITNGLAMKNNEISVIQNGGIPQLPVSLGGSALPPLGSMASGMDKARTGSSPPIVSLDKASSETAASRPFTRFIEDNKEIGIN

SEQ ID NO: 15598 - protein, 1053 aa, Homo sapiens
MSRRKQAKPQHINSEEDQGEQQPQQQTPEFADAAPAAPAAGELGAPVNHPGNDEVASEDEATVKRLRREETHVCEKCCAEFFSISEFLEHKKNCTKNPPVLIMNDSEGPVPSEDFSGAVLSHQPTSPGSKDCHRENGGSSEDMKEKPDAESVVYLKTETALPPTPQDISYLAKGKVANTNVTLQALRGTKVAVNQRSADALPAPVPGANSIPWVLEQILCLQQQQLQQIQLTEQIRIQVNMWASHALHSSGAGADTLKTLGSHMSQQVSAAVALLSQKAGSQGLSLDALKQAKLPHANIPSATSSLSPGLAPFTLKPDGTRVLPNVMSRLPSALLPQAPGSVLFQSPFSTVALDTSKKGKGKPPNISAVDVKPKDEAALYKHKCKYCSKVFGTDSSLQIHLRSHTGERPFVCSVCGHRFTTKGNLKVHFHRHPQVKANPQLFAEFQDKVAAGNGIPYALSVPDPIDEPSLSLDSKPVLVTTSVGLPQNLSSGTNPKDLTGGSLPGDLQPGPSPESEGGPTLPGVGPNYNSPRAGGFQGSGTPEPGSETLKLQQLVENIDKATTDPNECLICHRVLSCQSSLKMHYRTHTGERPFQCKICGRAFSTKGNLKTHLGVHRTNTSIKTQHSCPICQKKFTNAVMLQQHIRMHMGGQIPNTPLPENPCDFTGSEPMTVGENGSTGAICHDDVIESIDVEEVSSQEAPSSSSKVPTPLPSIHSASPTLGFAMMASLDAPGKVGPAPFNLQRQGSRENGSVESDGLTNDSSSLMGDQEYQSRSPDILETTSFQALSPANSQAESIKSKSPDAGSKAESSENSRTEMEGRSSLPSTFIRAPPTYVKVEVPGTFVGPSTLSPGMTPLLAAQPRRQAKQHGCTRCGKNFSSASALQIHERTHTGEKPFVCNICGRAFTTKGNLKVHYMTHGANNNSARRGRKLAIENTMALLGTDGKRVSEIFPKEILAPSVNVDPVVWNQYTSMLNGGLAVKTNEISVIQSGGVPTLPVSLGATSVVNNATVSKMDGSQSGISADVEKPSATDGVPKHQFPHFLEENKIAVS

SEQ ID NO: 15599 - protein, 763 aa, Homo sapiens; identical to SEQ ID NO: 11649

SEQ ID NO: 15600 - protein, 733 aa, Homo sapiens
MERRSESPCLRDSPDRRSGSPDVKGPPPVKVARLEQNGSPMGARGRPNGAVAKAVGGLMIPVFCVVEQLDGSLEYDNREEHAEFVLVRKDVLFSQLVETALLALGYSHSSAAQAQGIIKLGRWNPLPLSYVTDAPDATVADMLQDVYHVVTLKIQLQSCSKLEDLPAEQWNHATVRNALKELLKEMNQSTLAKECPLSQSMISSIVNSTYYANVSATKCQEFGRWYKKYKKIKVERVERENLSDYCVLGQRPMHLPNMNQLASLGKTNEQSPHSQIHHSTPIRNQVPALQPIMSPGLLSPQLSPQLVRQQIAMAHLINQQIAVSRLLAHQHPQAINQQFLNHPPIPRAVKPEPTNSSVEVSPDIYQQVRDELKRASVSQAVFARVAFNRTQGLLSEILRKEEDPRTASQSLLVNLRAMQNFLNLPEVERDRIYQDERERSMNPNVSMVSSASSSPSSSRTPQAKTSTPTTDLPIKVDGANINITAAIYDEIQQEMKRAKVSQALFAKVAANKSQGWLCELLRWKENPSPENRTLWENLCTIRRFLNLPQHERDVIYEEESRHHHSERMQHVVQLPPEPVQVLHRQQSQPAKESSPPREEAPPPPPPTEDSCAKKPRSRTKISLEALGILQSFIHDVGLYPDQEAIHTLSAQLDLPKHTIIKFFQNQRYHVKHHGKLKEHLGSAVDVAEYKDEELLTESEENDSEEGSEEMYKVEAEEENADKSKAAPAEIDQR
